United States Patent Application Publication US 2017/0114356 A1 - sequence listing, part 31

SEQ ID NO: 41205 - DNA, 1878 bp, Zea Mays
aatagtcatgtgcgctcgacgcgtcgcgtgcctctctctccgctccctctgacttgttcgcttgccgtcctcgctcgcggcaaagctgcagcgtgtctcggctccggcgcgccaccgctcgggacgcccgacggatccgctcccgcgtgcgctcgatatcccttgcttcaacggtccaagtcaacccccccaccaaatcgccgtccgtccggccgctgccgcaccctagcaggatcgcagcgtgcacagctcttcttcaatctgcaggattgcagccacgcacaagtcgtagctgctcgctcaattgtacttcagatagcatcttctttgattgtcctcttctgcatactcttgttgatggtgctatcatattcttgaaaaccttccgtgctgtctatctggcattcttctgtctctgtacttgtcctttaacagtcacttgcttcgaggttccattttccatgtggatacccatggctgaatccactttgagattattacataccttttgttctagctgtttctgttgtttttctttctatccatacattatcacttggctcccccaatattattggttcatgtgctctttccaaagtttccttggaactttgagctttggaagatgccaaggagaacaggaaatgctgcttcgaccaaatcagttgaattggtcaaacaagaccaaatggagtttgatcatcctgatgaggtagatgaagaggaagaagttgagtatgaagaaattgaggaggaggttgagtatgaagaggtagaggtagaggaggaggaggaggaggaggaggaggatgaaattgaaggtgtgcgtgaagttgatgctaatcatgacagtaaaatagtggatgatgatcccaaggatgggaatgaaaaagaaaagcatgctgagcttcttgctcttcctcctcatggagctgaagtttatgttggggggctttcctctgatgtatcttctgaagatctcaaacaactatttgaatctgttggagaagttgcagaagtgcgaatgcgaggaaagggggataacaagacatatgcttttattaatttcagaactaaagagatggctttaaaggccatccaaaagttgagcaataaagacctaaagggaaaaaagataaaagtttcatcctctcaggctaagaataggctttttattgggaatgtaccccatgattggacacctgatgatttcaaaaccgcagtggaagaagttggtcctggagttttaaaagttgatctcatgaaggcaccaggctcaggtcgcaataagggttatggctttattgaatactacaaccaggcatgtgcagagtatgctaagcagaagatgtctactccagaattcaaactagatacaaatgctcctactgtcagctgggcagatcataagaatgctagtgaagctacatctacttcacaggttaaatctctatatgtcaaaaacctccccaagactgttactcaagagcagctgaaaaagctgtttgagcatgttggagaaatcacaaaagttgttattccacctgcaaaatctgggcatgaaaatcggtacggttttgttcattttaaggaacggtccatggttatgaaggctctgaagaacactgagagatatgaacttgatggtcagctgctggattgttcacctgcgaaacctcctgctgataagaaggatgatactggatcatctcctactgcaaaaggacgtccattacccccaagttatgccccacttggatatggactagcgggagcttataatccacttggaaaaggactggcagggggagaaacatttacaataggtgatgtccttctaactgttgtgcatttttggcatcaattgcacatgtgcag

SEQ ID NO: 41206 - DNA, 2134 bp, Zea Mays
aatagtcatgtgcgctcgacgcgtcgcgtgcctctctctccgctccctctgacttgttcgcttgccgtcctcgctcgcggcaaagctgcagcgtgtctcggctccggcgcgccaccgctcgggacgcccgacggatccgctcccgcgtgcgctcgatatcccttgcttcaacggtccaagtcaacccccccaccaaatcgccgtccgtccggccgctgccgcaccctagcaggatcgcagcgtgcacagctcttcttcaatctgcaggattgcagccacgcacaagtcgtagctgatgccaaggagaacaggaaatgctgcttcgaccaaatcagttgaattggtcaaacaagaccaaatggagtttgatcatcctgatgaggtagatgaagaggaagaagttgagtatgaagaaattgaggaggaggttgagtatgaagaggtagaggtagaggaggaggaggaggaggaggaggaggatgaaattgaaggtgtgcgtgaagttgatgctaatcatgacagtaaaatagtggatgatgatcccaaggatgggaatgaaaaagaaaagcatgctgagcttcttgctcttcctcctcatggagctgaagtttatgttggggggctttcctctgatgtatcttctgaagatctcaaacaactatttgaatctgttggagaagttgcagaagtgcgaatgcgaggaaagggggataacaagacatatgcttttattaatttcagaactaaagagatggctttaaaggccatccaaaagttgagcaataaagacctaaagggaaaaaagataaaagtttcatcctctcaggctaagaataggctttttattgggaatgtaccccatgattggacacctgatgatttcaaaaccgcagtggaagaagttggtcctggagttttaaaagttgatctcatgaaggcaccaggctcaggtcgcaataagggttatggctttattgaatactacaaccaggcatgtgcagagtatgctaagcagaagatgtctactccagaattcaaactagatacaaatgctcctactgtcagctgggcagatcataagaatgctagtgaagctacatctacttcacaggttaaatctctatatgtcaaaaacctccccaagactgttactcaagagcagctgaaaaagctgtttgagcatgttggagaaatcacaaaagttgttattccacctgcaaaatctgggcatgaaaatcggtacggttttgttcattttaaggaacggtccatggttatgaaggctctgaagaacactgagagatatgaacttgatggtcagctgctggattgttcacctgcgaaacctcctgctgataagaaggatgatactggatcatctcctactgcaaaaggacgtccattacccccaagttatgccccacttggatatggactagcgggagcttataatccacttggaaaaggactggcaggtgcttacaattcccctggaaacggactggcaggtgcttatggcgtgctttctgctcatgccgcacagccaatgttgtatgctccaggtgcttctccaggttcaacaatgatcccaatggtcctaccagacggccgtcttgtatacgtaccacagactgcagggcagcagcctctgcatgtgacttcgcctctgcctcagcaaggcggtcgtcgattcggcggcggtggcggatccagctccggcggaaagcgacagaggggagatgaccgtggcagtaacagcaacagtagccgcaggggctggcaccgtccgtattgatgtttgcaatgccgctgatttgcaattagaagttagaacccagcaattagcatatttatcgcagtaccatgctggaaactgtactttgaattatttgtttttcctgtgtgcttcgtagcaggcctgccctaaaaagaacgatagtaccggaaggggcaaatgtagtggtaatatactctatacatttgtaaccatctccatcctgccgttgaccgtcttaggttattaaaataaatatatttcttccgttcttttttatttgtcttgttttagttaaaaagaaactagcataacatcaactcatgtcatggttagttcaaacactgagctaaagctcat

SEQ ID NO: 41207 - DNA, 2464 bp, Zea Mays
aatagtcatgtgcgctcgacgcgtcgcgtgcctctctctccgctccctctgacttgttcgcttgccgtcctcgctcgcggcaaagctgcagcgtgtctcggctccggcgcgccaccgctcgggacgcccgacggatccgctcccgcgtgcgctcgatatcccttgcttcaacggtccaagtcaacccccccaccaaatcgccgtccgtccggccgctgccgcaccctagcaggatcgcagcgtgcacagctcttcttcaatctgcaggattgcagccacgcacaagtcgtagctgctcgctcaattgtacttcagatagcatcttctttgattgtcctcttctgcatactcttgttgatggtgctatcatattcttgaaaaccttccgtgctgtctatctggcattcttctgtctctgtacttgtcctttaacagtcacttgcttcgaggttccattttccatgtggatacccatggctgaatccactttgagattattacataccttttgttctagctgtttctgttgtttttctttctatccatacattatcacttggctcccccaatattattggttcatgtgctctttccaaagtttccttggaactttgagctttggaagatgccaaggagaacaggaaatgctgcttcgaccaaatcagttgaattggtcaaacaagaccaaatggagtttgatcatcctgatgaggtagatgaagaggaagaagttgagtatgaagaaattgaggaggaggttgagtatgaagaggtagaggtagaggaggaggaggaggaggaggaggaggatgaaattgaaggtgtgcgtgaagttgatgctaatcatgacagtaaaatagtggatgatgatcccaaggatgggaatgaaaaagaaaagcatgctgagcttcttgctcttcctcctcatggagctgaagtttatgttggggggctttcctctgatgtatcttctgaagatctcaaacaactatttgaatctgttggagaagttgcagaagtgcgaatgcgaggaaagggggataacaagacatatgcttttattaatttcagaactaaagagatggctttaaaggccatccaaaagttgagcaataaagacctaaagggaaaaaagataaaagtttcatcctctcaggctaagaataggctttttattgggaatgtaccccatgattggacacctgatgatttcaaaaccgcagtggaagaagttggtcctggagttttaaaagttgatctcatgaaggcaccaggctcaggtcgcaataagggttatggctttattgaatactacaaccaggcatgtgcagagtatgctaagcagaagatgtctactccagaattcaaactagatacaaatgctcctactgtcagctgggcagatcataagaatgctagtgaagctacatctacttcacaggttaaatctctatatgtcaaaaacctccccaagactgttactcaagagcagctgaaaaagctgtttgagcatgttggagaaatcacaaaagttgttattccacctgcaaaatctgggcatgaaaatcggtacggttttgttcattttaaggaacggtccatggttatgaaggctctgaagaacactgagagatatgaacttgatggtcagctgctggattgttcacctgcgaaacctcctgctgataagaaggatgatactggatcatctcctactgcaaaaggacgtccattacccccaagttatgccccacttggatatggactagcgggagcttataatccacttggaaaaggactggcaggtgcttacaattcccctggaaacggactggcaggtgcttatggcgtgctttctgctcatgccgcacagccaatgttgtatgctccaggtgcttctccaggttcaacaatgatcccaatggtcctaccagacggccgtcttgtatacgtaccacagactgcagggcagcagcctctgcatgtgacttcgcctctgcctcagcaaggcggtcgtcgattcggcggcggtggcggatccagctccggcggaaagcgacagaggggagatgaccgtggcagtaacagcaacagtagccgcaggggctggcaccgtccgtattgatgtttgcaatgccgctgatttgcaattagaagttagaacccagcaattagcatatttatcgcagtaccatgctggaaactgtactttgaattatttgtttttcctgtgtgcttcgtagcaggcctgccctaaaaagaacgatagtaccggaaggggcaaatgtagtggtaatatactctatacatttgtaaccatctccatcctgccgttgaccgtcttaggttattaaaataaatatatttcttccgttcttttttatttgtcttgttttagttaaaaagaaactagcataacatcaactcatgtcatggttagttcaaacactgagctaaagctcat

SEQ ID NO: 41208 - DNA, 1919 bp, Zea Mays
cgtagctgatagcatcttctttgattgtcctcttctgcatactcttgttgatgtttccttggaactttgagctttggaagatgccaaggagaacaggaaatgctgcttcgaccaaatcagttgaattggtcaaacaagaccaaatggagtttgatcatcctgatgaggtagatgaagaggaagaagttgagtatgaagaaattgaggaggaggttgagtatgaagaggtagaggtagaggaggaggaggaggaggaggaggaggatgaaattgaaggtgtgcgtgaagttgatgctaatcatgacagtaaaatagtggatgatgatcccaaggatgggaatgaaaaagaaaagcatgctgagcttcttgctcttcctcctcatggagctgaagtttatgttggggggctttcctctgatgtatcttctgaagatctcaaacaactatttgaatctgttggagaagttgcagaagtgcgaatgcgaggaaagggggataacaagacatatgcttttattaatttcagaactaaagagatggctttaaaggccatccaaaagttgagcaataaagacctaaagggaaaaaagataaaagtttcatcctctcaggctaagaataggctttttattgggaatgtaccccatgattggacacctgatgatttcaaaaccgcagtggaagaagttggtcctggagttttaaaagttgatctcatgaaggcaccaggctcaggtcgcaataagggttatggctttattgaatactacaaccaggcatgtgcagagtatgctaagcagaagatgtctactccagaattcaaactagatacaaatgctcctactgtcagctgggcagatcataagaatgctagtgaagctacatctacttcacaggttaaatctctatatgtcaaaaacctccccaagactgttactcaagagcagctgaaaaagctgtttgagcatgttggagaaatcacaaaagttgttattccacctgcaaaatctgggcatgaaaatcggtacggttttgttcattttaaggaacggtccatggttatgaaggctctgaagaacactgagagatatgaacttgatggtcagctgctggattgttcacctgcgaaacctcctgctgataagaaggatgatactggatcatctcctactgcaaaaggacgtccattacccccaagttatgccccacttggatatggactagcgggagcttataatccacttggaaaaggactggcaggtgcttacaattcccctggaaacggactggcaggtgcttatggcgtgctttctgctcatgccgcacagccaatgttgtatgctccaggtgcttctccaggttcaacaatgatcccaatggtcctaccagacggccgtcttgtatacgtaccacagactgcagggcagcagcctctgcatgtgacttcgcctctgcctcagcaaggcggtcgtcgattcggcggcggtggcggatccagctccggcggaaagcgacagaggggagatgaccgtggcagtaacagcaacagtagccgcaggggctggcaccgtccgtattgatgtttgcaatgccgctgatttgcaattagaagttagaacccagcaattagcatatttatcgcagtaccatgctggaaactgtactttgaattatttgtttttcctgtgtgcttcgtagcaggcctgccctaaaaagaacgatagtaccggaaggggcaaatgtagtggtaatatactctatacatttgtaaccatctccatcctgccgttgaccgtcttaggttattaaaataaatatatttcttccgttcttttttatttgtcttgttttagttaaaaagaaactagcataacatcaactcatgtcatggttagttcaaacactgagctaaagctcat

SEQ ID NO: 41209 - DNA, 1906 bp, Zea Mays
gtgatcatggactatactgaattgcatacggtagaattggtttccttggaactttgagctttggaagatgccaaggagaacaggaaatgctgcttcgaccaaatcagttgaattggtcaaacaagaccaaatggagtttgatcatcctgatgaggtagatgaagaggaagaagttgagtatgaagaaattgaggaggaggttgagtatgaagaggtagaggtagaggaggaggaggaggaggaggaggaggatgaaattgaaggtgtgcgtgaagttgatgctaatcatgacagtaaaatagtggatgatgatcccaaggatgggaatgaaaaagaaaagcatgctgagcttcttgctcttcctcctcatggagctgaagtttatgttggggggctttcctctgatgtatcttctgaagatctcaaacaactatttgaatctgttggagaagttgcagaagtgcgaatgcgaggaaagggggataacaagacatatgcttttattaatttcagaactaaagagatggctttaaaggccatccaaaagttgagcaataaagacctaaagggaaaaaagataaaagtttcatcctctcaggctaagaataggctttttattgggaatgtaccccatgattggacacctgatgatttcaaaaccgcagtggaagaagttggtcctggagttttaaaagttgatctcatgaaggcaccaggctcaggtcgcaataagggttatggctttattgaatactacaaccaggcatgtgcagagtatgctaagcagaagatgtctactccagaattcaaactagatacaaatgctcctactgtcagctgggcagatcataagaatgctagtgaagctacatctacttcacaggttaaatctctatatgtcaaaaacctccccaagactgttactcaagagcagctgaaaaagctgtttgagcatgttggagaaatcacaaaagttgttattccacctgcaaaatctgggcatgaaaatcggtacggttttgttcattttaaggaacggtccatggttatgaaggctctgaagaacactgagagatatgaacttgatggtcagctgctggattgttcacctgcgaaacctcctgctgataagaaggatgatactggatcatctcctactgcaaaaggacgtccattacccccaagttatgccccacttggatatggactagcgggagcttataatccacttggaaaaggactggcaggtgcttacaattcccctggaaacggactggcaggtgcttatggcgtgctttctgctcatgccgcacagccaatgttgtatgctccaggtgcttctccaggttcaacaatgatcccaatggtcctaccagacggccgtcttgtatacgtaccacagactgcagggcagcagcctctgcatgtgacttcgcctctgcctcagcaaggcggtcgtcgattcggcggcggtggcggatccagctccggcggaaagcgacagaggggagatgaccgtggcagtaacagcaacagtagccgcaggggctggcaccgtccgtattgatgtttgcaatgccgctgatttgcaattagaagttagaacccagcaattagcatatttatcgcagtaccatgctggaaactgtactttgaattatttgtttttcctgtgtgcttcgtagcaggcctgccctaaaaagaacgatagtaccggaaggggcaaatgtagtggtaatatactctatacatttgtaaccatctccatcctgccgttgaccgtcttaggttattaaaataaatatatttcttccgttcttttttatttgtcttgttttagttaaaaagaaactagcataacatcaactcatgtcatggttagttcaaacactgagctaaagctcat

SEQ ID NO: 41210 - DNA, 1373 bp, Zea Mays
cgcggcctgggcgtgcgaccgagactgcgcgaagggagcgatggagaggctggagagctacctgaaggagcacttcgacgtgccgcccaagaacccctctgaggaggcgcagcggcgatggcggtccgccgttggcgcgctcgtcaagaaccgccgccgccgcttccgcatggtgccggacctccaccgccgcagcctggacgaggcccagcggcggtccacccaggtcatggctcgttctttaccgttggacaagcatacccttgtgacgaacttgcgaggtatgtttcgcgaggtggttgctgtgacaggtgacggcacgaatgatgctccagcgttgcatgaagcagatatcggccttgctatgggcatagcaggaacagaggttgccaaggagagtgctgatgtgatagtgcttgatgacaatttcacaactataataaatgtcgcgaggtggggtcgtgcggtttacataaacatccaaaagttcgtgcagttccagctgactgtcaacattgttgctttggtcatcaacttcgtctcagcatgcattacagggagcgctccgctcacagcggtgcaactgttgtgggtgaatatgattatggatacattaggagctctagctctagcaacggagcctccaaacgatgacatgatgaagagaccacctgtcgggcgaggggaaagcttcatcaccaaggtcatgtggagaaatatcattgggcaaagtttgtaccagttggttgtgctcggagccctcatgtttggcggggaacagtttctgaacatcaagggcgcggattccaaatctgttgtcaatactctcatattcaactccttcgtgttctgccaggtgttcaacgaaataaacagcagagaaatggagaagatcaacgtgttccgcggcatggtcaccaactggatcttcatcgcgatcatagccgcgacggtcctgttccaagtggtgatcgtagagctgctcggcacctttgccagcaccgtcccactcgactggcggctttggctgcttagcgtcggcctcggatcggttagcttggtcgtcggtgccgtcctcaagtgcataccagttgccaaatcgaacggagctcctgcgagtcccaacggctacgccccgctccccagcggtcctgacgacatttagctgaagaagaggggatgcatggagaaaagaagttgcatccgatttttgcgtcttgtttggaataagtaatgaaccactggctaggctcagctttagcagattgttctatatatatatatatatatatattgtcctgcaattacacgatcttcctgtttgctgattgttctatatatgaatgaacgcaatgcaaggcaccattatttcc

SEQ ID NO: 41211 - DNA, 3244 bp, Zea Mays
agacagagtaggacggcgacctccatgggaggaaggaagcttccaggaagcagccttccgaaattgcaggcagcaccagagggtcaaagcagggaaaaaatccggcttgccctctatgtgcagaaggctgccatgaccttcattgatggtgccaagcacaaagactaccggatcacagaggatatcagaaacgctgggttctccataaacccagacgagctggcatcgatcacaagcaagcacgacgcgaaagccttaaagatgcacggcggggtggacggggtgtcgaagaagatccggtcggcgttggaccatggcatatctgccagcgacctagacacgaggcaaagcatctacggcgtcaaccggtacgcggagaagccttcgagaacgttctggatgtttgtgtgggacgcgttgcaggacatgactctgatcatcctgatggtgtgcgctctgctgtctgctgccgtcggtctggcgtctgaaggctggcccaggggcatgtacgatggcctggggatcatgctcagcatcctgctggttgtcatggtcactgctgtcagtgactacaggcagtcgctccagttcaaggagcttgacaatgagaagaagaagatattcatccatgtgaccagagacggatcccggcagaaggtctctatctatgacttggcggtcggtgacatcgtgcatctgtccatcggagaccaggtgcctgccgacgggctgtacgtgcatggatactcccttttgatcgacgagtccagcttgtcaggcgagagcgagccggtctatgtttctcaggacaagccattcatcttggcggggactaaggttcaggatgggtcagctaagatgatggtgaccgccgtcggcatgcgcaccgagtggggaaggttgatgagcacgctgagcgagggaggagaggacgagacgccgctgcaggtcaagctgaacggagttgcaaccatcattggcaagatcggcctgttgtttgccacattgacatttgttgtcctgatggttaggttcctcattgagaaaggtttgacggttggtctgtccaaatggtactctactgatgcgctgactatagtgaactacttcgcgactgctgtcactattatcgtcgtcgctgttcctgaagggctgcctcttgctgttactctgagccttgcatttgcgatgaagaagctaatgaatgataaggcacttgtccggcacctttcagcgtgtgagactatgggatctgccggaaccatctgcacggataaaacgggaactttgactactaaccatatggtggtcgacaagatatgggcatccgaggtctcaaaatcggttaccgatagcagtagtttggaagatctggcttctgccgtttctccagccacattgagcctgcttctgcaaggaatttttgagaacaccagcgcagaggtagtcaatgagaaggatggcaagcagactgtcttgggaactccgacagagagggcaatatttgagtttggcttgaaactggaaggtcttggtgctgaggataggacctgcaccaaggtcaaggtcgagccgttcaattcggttaagaagaagatggcggtgctggtctcgttgcacgatggcggctcgtaccgctggttcaccaaaggcgcgtcggagatcgttgtggagatgtgcgacatgatgatagatggcgatgggaacagcgtccccttgtcagaagctcagagaaagatcgtcttggatactatcaactcctttgcttcagatgctttgaggacactgtgcttggcgtataaggatgtggatggtctcgaggacgacgacgacgatgcagatagcccaacaagtggtttcactctaatctgcatttttggcatcaaggatcccttgcgcccaggagtcaaggacgctgtggaggcctgtaagtctgctggcatcgtcgtgagaatggtgaccggtgacaacatcaatacagccaaagctatagccaaagagtgtgggatactaactgatggtgacctagcaatagaagggccagaattccgcagcaagagcccagaagagatgagggacataatacctaagattcgggtcatggctcgttctttaccgttggacaagcatacccttgtgacgaacttgcgaggtatgtttcgcgaggtggttgctgtgacaggtgacggcacgaatgatgctccagcgttgcatgaagcagatatcggccttgctatgggcatagcaggaacagaggttgccaaggagagtgctgatgtgatagtgcttgatgacaatttcacaactataataaatgtcgcgaggtggggtcgtgcggtttacataaacatccaaaagttcgtgcagttccagctgactgtcaacattgttgctttggtcatcaacttcgtctcagcatgcattacagggagcgctccgctcacagcggtgcaactgttgtgggtgaatatgattatggatacattaggagctctagctctagcaacggagcctccaaacgatgacatgatgaagagaccacctgtcgggcgaggggaaagcttcatcaccaaggtcatgtggagaaatatcattgggcaaagtttgtaccagttggttgtgctcggagccctcatgtttggcggggaacagtttctgaacatcaagggcgcggattccaaatctgttgtcaatactctcatattcaactccttcgtgttctgccaggtgttcaacgaaataaacagcagagaaatggagaagatcaacgtgttccgcggcatggtcaccaactggatcttcatcgcgatcatagccgcgacggtcctgttccaagtggtgatcgtagagctgctcggcacctttgccagcaccgtcccactcgactggcggctttggctgcttagcgtcggcctcggatcggttagcttggtcgtcggtgccgtcctcaagtgcataccagttgccaaatcgaacggagctcctgcgagtcccaacggctacgccccgctccccagcggtcctgacgacatttagctgaagaagaggggatgcatggagaaaagaagttgcatccgatttttgcgtcttgtttggaataagtaatgaaccactggctaggctcagctttagcagattgttctatatatatatatatatatatattgtcctgcaattacacgatcttcctgtttgctgattgttctatatatgaatgaacgcaatgcaaggcaccattatttcc

SEQ ID NO: 41212 - DNA, 1890 bp, Zea Mays
tgaataccagtatccgcagtgtaaaagcttcattttattacaaaaaaaaaaatcttcgtcctccccgcgaagacgcttcccgagcttctccttcgttcctcctcttccccgcggctctcctctgccccgcaccggcaccgctagggttttgccgccgacctctcgctcgcttccgggctccgcgaggcaaccgtccggaccggccggtcgaaatggtggatgtggaggaggtcgggaacaagatgcaatcgcagatgcgcctgcacgcggagccggatgacgccgccgccgacctccccctcccggcgctcttcgacagggcgtcgcggcttcacgccctggcctccagctccgccctcgaccaggatgggatccgcaccggggttgagctgctgcggcgctgcgacgagatggtcggcaggctcggtcttttctcccccaacgagaccaaggacgacgtctccaccgcaaacctcaagtacctactcgtcccatattaccttgcggaaatgaccgagaagatggcgcaggaggatcggatcccggttcttaaggcgtcgcaggaccatttgaaggttatcaattgctctatcacattgtttcagtaggagttcattgctctatgcgaagtactagagcttattccagaggatgagctagaattgtctaggcagaagcagtctgatactatggcaaacagaagagcacagaaggttgcccggttcaaacgtcaaaaggctgcagaaacaaagctccaagagatcagagagagaaaagaaaggcgtggacgctcattgagagcaactgctttgtctgccccagttgaagctggagaggaagatgacctggaggatgacggggaggaagaaagggaggcttggttagctaccatctcattggctatctgcaaggcttttgatcttctcgacatgttaaagaaggaagaagaaatgcttctagctgtaaaggaaaggaaggcaaaggacgggaatgcatttgctcgtgaaatgctcgacgaacggacaaagaaggctgaagcatggcaccacaaagctgccagtcgtgtggcgtattccaaaccagccgatccgatcacctgtgcaacatttgctcaggatgtcattgaagggagagcgagcgtttcacaggcccacgagcacaaacaccagcccctgatatttggacctgcaagccttgttggcggcggtctgaccagtgaaagggaaagaatggcagcgcaagtttttcagcccagttacaggatgccaacaatgagcatagaagaggctggcttgcgcgagatgaagatgatggagaggtggcaagagaggaccgccgagatgatgagagaagcaaactccgcgtggcacaagggcggcgacagcagcagcagctcgatgccgcaaggggagggcggggacgaggatgccgaggaggccaaggcacgagcgtgggacgactggaaggacgacaaccctcgcggcgctggcaacaagaagctcacgccctgtggctagactgcaaatcgaagcacgctcgctgtgtgatcgtacggtgtttgactcgaccagtatttagtttgtatctgacgatcagtgtatttattatataggctgcttctgtaacagtgtgtttatacaccatccactgcagcttcttcacacaggtgtttccgaagttaactgggttagacaaactgtgttgtccaagcaagagtatctaacaaatagctacgtaactacttcatccgtttctttttagttgtcgttgatagttcaaaccgtttctttttagttgtcgttggatagttcaattttgcactatccagagacaactaaaacgaaacagagggagtattaactaatttactaaaaatagataatagttaaa

SEQ ID NO: 41213 - DNA, 1847 bp, Zea Mays
tgaataccagtatccgcagtgtaaaagcttcattttattacaaaaaaaaaaatcttcgtcctccccgcgaagacgcttcccgagcttctccttcgttcctcctcttccccgcggctctcctctgccccgcaccggcaccgctagggttttgccgccgacctctcgctcgcttccgggctccgcgaggcaaccgtccggaccggccggtcgaaatggtggatgtggaggaggtcgggaacaagatgcaatcgcagatgcgcctgcacgcggagccggatgacgccgccgccgacctccccctcccggcgctcttcgacagggcgtcgcggcttcacgccctggcctccagctccgccctcgaccaggatgggatccgcaccggggttgagctgctgcggcgctgcgacgagatggtcggcaggctcggtcttttctcccccaacgagaccaaggacgacgtctccaccgcaaacctcaagtcccatattaccttgcggaaatgaccgagaagatggcgcaggaggatcggatcccggttcttaaggcgtcgcaggaccatttgaaggagttcattgctctatgcgaagtactagagcttattccagaggatgagctagaattgtctaggcagaagcagtctgatactatggcaaacagaagagcacagaaggttgcccggttcaaacgtcaaaaggctgcagaaacaaagctccaagagatcagagagagaaaagaaaggcgtggacgctcattgagagcaactgctttgtctgccccagttgaagctggagaggaagatgacctggaggatgacggggaggaagaaagggaggcttggttagctaccatctcattggctatctgcaaggcttttgatcttctcgacatgttaaagaaggaagaagaaatgcttctagctgtaaaggaaaggaaggcaaaggacgggaatgcatttgctcgtgaaatgctcgacgaacggacaaagaaggctgaagcatggcaccacaaagctgccagtcgtgtggcgtattccaaaccagccgatccgatcacctgtgcaacatttgctcaggatgtcattgaagggagagcgagcgtttcacaggcccacgagcacaaacaccagcccctgatatttggacctgcaagccttgttggcggcggtctgaccagtgaaagggaaagaatggcagcgcaagtttttcagcccagttacaggatgccaacaatgagcatagaagaggctggcttgcgcgagatgaagatgatggagaggtggcaagagaggaccgccgagatgatgagagaagcaaactccgcgtggcacaagggcggcgacagcagcagcagctcgatgccgcaaggggagggcggggacgaggatgccgaggaggccaaggcacgagcgtgggacgactggaaggacgacaaccctcgcggcgctggcaacaagaagctcacgccctgtggctagactgcaaatcgaagcacgctcgctgtgtgatcgtacggtgtttgactcgaccagtatttagtttgtatctgacgatcagtgtatttattatataggctgcttctgtaacagtgtgtttatacaccatccactgcagcttcttcacacaggtgtttccgaagttaactgggttagacaaactgtgttgtccaagcaagagtatctaacaaatagctacgtaactacttcatccgtttctttttagttgtcgttgatagttcaaaccgtttctttttagttgtcgttggatagttcaattttgcactatccagagacaactaaaacgaaacagagggagtattaactaatttactaaaaatagataatagttaaa

SEQ ID NO: 41214 - DNA, 374 bp, Zea Mays
aagagaatcggacgcgggatttctcgccacggtggcacgcttcgccatggtcgtggtgctctacgctgcaaagccgggagaagaacaggtggttcaagaggagccacacaacgaggagttcgattcgatctaggtggcgtctcccagttgactttctgacgccaaggatggattttagatccatttacatttataatttattttgtaagacttccgctatgtaataagtactctgattatattgtgacatttatctctatacactctattattatatatgttgttatctttggcgcatgtatgagatgtactcggctttgtcccttaaatctgggtgtgacaaaagcctaggcctcaagtttactttatgggca

SEQ ID NO: 41215 - DNA, 2107 bp, Zea Mays
cagcagtctggttttccttgcatgcatgacgcgcgcatgtgcaatccggttcttcttcctcgcgatcatgatctgctttctgctatgctcccgctttggtcttggtcgatcgcctgcgcaccgcaggctttggttcggtgcgccgtgtcagggcccgccgggtgggtgcgagtgcgacgtcgacggtcgacctatccattgacgcccatcaccgcgtccgcgtcccatgcaagctgcatgcgtcgtcacgtgtggtgtggtcgtgtggtgtggtgcagcagctagcactagcagagcaggccagacggtgccgtgccggtgcaagcctgtcgttgcactcgcgccgagcgaacggagcaccgagcagtggccgcgacggctcctcccgcgtccggccaagcaccgcaatccccatcgcctatgtcctcacgcgcgcgatccccatcgcccgtcgtcgtcgcatccgcggcaggcaccacgcatcgccagagtctggaacaggcggccggccatgcgtcaacagctaccaggacggtgctcggttcgtctggactctggactcaccgtggacaccccacggtttgtacggcgtatgattgtgccctcgatggcgaacgccgtgcgccggccggccgccatggaggagcgcagctaaaacgtggagcgaggctgggagacacgctcacacacatggcagggcattcaagtggcgaagtgaaggtagcagagcagagcagaggaaggagaacaagtgctgccgtcgctggactcgagcggcgacgtcaggctgctggagatcggcgacgctgagctgctgccgctggacggcgccgcggggccagagagcctcgtgttcgccggtgggtacggtgacggcggtgagggcggcccccgttcacgggcgtgtcggacggccgggtgcttgggtgccggcggagcggcgctgggccgagcactcctgctccgcgcgcagacctgctggacagctgcaggggctcccaggacccggggcgcgagcacgagtgcgggcgcccgttgggcctcaagttcaaccccgacacgggggagctctacgtggccgacgcctaccacggcctgcgcatggtcgcgccgggcccgggcggcggcaaggcgtcgaggccggtggcgccggagtggtggcagggcgcgcgcgccttcagcttcgccaacggcgtcgaggtcgacccgggcaccggcgccgtctacttcaccgagacgagcacgaggttccagaggcgggagttcctgcgcatcgtcgtgtccggcgacacgacggggcggctgctgcggtacgacccgaggggcggcggtggggtggaggtgctggccgacggcctggcgttccccaacggcctcgcgatgagcagcgacggcacgcacctgctgctggcggagaccaccacggggaggatcctccggtactggctccgcccgacggctcccaaggcgccggcgctgctggaggaggtggcgcggctgccgtggttcccggacaacatcaggatgagcccccggggcggcttctgggtggggctccacgccaggaggggcaagctcgcccagtactgcatctcctacccctggctccggcgcctggtgctggcgctgccgccgcgccacgtccagcgcgcctcgtcgctgctcagccgcctcgggcggcaggtcatcgcgctgcggctgagcgaggaggacgggagggtggtggagatggccagcgtccacggggatcttcggagggtgttcaggtccgtcagcgaagtggcggagaggaacggcagcatctggattggctctgtcatgtcgccgtttctcggagtctacaagttgcagtagaggcatttacgcttaaatatggattcagtagcttattatagcaaaggaaaacatacatcgcatctatatttgtgtataaaattccttgtgtcgtcgatggacatgttcatctggccagaggttgtgaaaagcgtctatgcatctatgaactgaatgcatgagatggtcctgggccccattcaacttgtgtgaagccttgagcaactaaacttatcgtgtttcgtgttaatatatcaccgtttttttatatatc

SEQ ID NO: 41216 - DNA, 2700 bp, Zea Mays
catttttgtcttcctcttcctcaccgcagccgccgtgctcgtgtcagccagctccgctccgtggcgcctacgaaaccaccacccgtccggatccggatatattctccattccctgctgactgactgtgactgacatgtcgtcggactcctctccttttccagatcactcacatacacatttcgcgcatccactgactttaacacaagatccccgccagcgccgccgcgcgaccaccccttcctaaaccccgacgaccaccaaccatggccttcaacgctaaaccctactgctccaccaccgccaaaccgcccacccccgccgcccaccgctcgccgtccggcccgtccccctgcatctccgtccgcgccgccgccgtatccccccgcgcccggcactcagcctatggcctctccgccgccggcaacgcgtcctccagcaccgtccgcctccgcgcgctggcccagcgcacccgggcgcagccgcagcctccccggcggcggcccgagtacgtgccgaaccgcatcgacgaccccaactacgtgcgcatcttcgacaccacgctccgcgacggggagcagtcgccgggcgccaccatgacgagcgccgagaagctcgtcgtcgcgcgccagctggcccgcctcggcgtcgacgtcatcgaggccgggttcccggcctcctcccccgacgacctcgacgccgtgcgctccatcgccatcgaggtcggcaacccgccgccgggggacgacgggggcgcccacgtgcccgtcatctgcggcctctcgcgctgcaacaggagggacatcgacgccgcgtgggaggccgtcaggcacgcgcggaggcccaggatccacaccttcatcgccaccagcgagatccacatgcagcacaagctcaggaagacgcccgaccaggtcgtcgccgttgccagggagatggtggcgtacgcacgcagccttgggtgcgccgatgtcgagttcagccctgaggatgccggcaggtcaaatcgagaattcctgtaccatatactggaggaagtcataaaagctggggcaaccactcttaatatcccagatactgtcggatacactcttccttatgaatttgggaagttaatttctgacataaaggaaaacactcctggaattgaaaatgccattatttccactcattgccagaatgaccttggccttgcaactgccaacacattagcggagcacgacagttagaggtgactattaatggtattggtgaaagggctggaaatgcttcattggaagaggttgtcatggcaattaaatgtcgtggggagctcttagatggtctatatacgggaataaattcccaacatattactttgacaagcaaaatggtacaagagcacagtggacttcatgtacaaccacataaagctattgttggtgccaatgcctttgcccatgaaagtggaattcatcaggatgggatgcttaaatataaaggaacatatgaaataatatcgcctgatgatattggtttagcacgtgcaaatgaatttggtattgttcttgggaaactcagtggaaggcatgcagtgagatctaagctggtagagcttggatatgaaatcagtgacaaggaatttgaagatttctttaaacgctacaaagaggtcgcagagaagaaaaagcgtgtaactgatgaggacatagaagctttattgtcagatgagatattccagcctaaggttatttggtcccttgctgatgtacaggcaacatgtggaacacttggcttatctacagcaactgtgaaactgatagggccagatggagaggagagaatagcatgttcagttggaacaggtccagttgatgcagcttacaaggctgttgaccaaataatccagattccaaccgtcctccgagaatacggcatgacttcagtcacagaaggcattgacgctattgcgacgactcgagtggttgtcaccggagacgtggccaacaactccaaacacgccttgactggccactctttcaaccgctccttcagcgggagcggggcggcaatggacatcgtcgtgtccagcgtcagagcttacctgagtgccctgaacaagatgtgcagcttcgctggcgctgcgagagccagcagcactgaggtgcctgggagcgcaagtgttcaacgcgcagaatgagctcggcggcgttcgcgttcgtgttagttctcgtatgggatgccaggatggactgtgcgttgtaagagcttgtcaagctgttgaggtgacatttcgtttcagtaacaggctgctcgatattatggggtaccccttgtcagtggggtgacgacaatgctgttctttttctgggaggatagtcccttcagcttagaacatgcaggaaattttggccctatgtagtgtacattttgtatctttaaacatactttcaataatgaaataatattagggtccatctagccacatgggtggccatcggcatgaaaatgatcgaaaataaatatttattcggtttgtcttttttttattacggataaataggatatagaatttacaatgaaaatatatattcttatttttaacattaaactcataaagattcataaaagataaaccttaaaattatcatatatcttctcaataaagtttggatatagattcagatataatttcgaatgttttttcttctttttttggttgt

SEQ ID NO: 41217 - DNA, 1919 bp, Zea Mays
cgtgtcagccagctccgctccgtggcgcctacgaaaccaccacccgtccggatccggatatattctccattccctgctgactgactgtgactgacatgtcgtcggactcctctccttttccagatcactcacatacacatttcgcgcatccactgactttaacacaagatccccgccagcgccgccgcgcgaccaccccttcctaaaccccgacgaccaccaaccatggccttcaacgctaaaccctactgctccaccaccgccaaaccgcccacccccgccgcccaccgctcgccgtccggcccgtccccctgcatctccgtccgcgccgccgccgtatccccccgcgcccggcactcagcctatggcctctccgccgccggcaacgcgtcctccagcaccgtccgcctccgcgcgctggcccagcgcacccgggcgcagccgcagcctccccggcggcggcccgagtacgtgccgaaccgcatcgacgaccccaactacgtgcgcatcttcgacaccacgctccgcgacggggagcagtcgccgggcgccaccatgacgagcgccgagaagctcgtcgtcgcgcgccagctggcccgcctcggcgtcgacgtcatcgaggccgggttcccggcctcctcccccgacgacctcgacgccgtgcgctccatcgccatcgaggtcggcaacccgccgccgggggacgacgggggcgcccacgtgcccgtcatctgcggcctctcgcgctgcaacaggagggacatcgacgccgcgtgggaggccgtcaggcacgcgcggaggcccaggatccacaccttcatcgccaccagcgagatccacatgcagcacaagctcaggaagacgcccgaccaggtcgtcgccgttgccagggagatggtggcgtacgcacgcagccttgggtgcgccgatgtcgagttcagccctgaggatgccggcaggtcaaatcgagaattcctgtaccatatactggaggaagtcataaaagctggggcaaccactcttaatatcccagatactgtcggatacactcttccttatgaatttgggaagttaatttctgacataaaggaaaacactcctggaattgaaaatgccattatttccactcattgccagaatgaccttggccttgcaactgccaacacattagcgggtgctcatgcaggagcacgacagttagaggtgactattaatggtattggtgaaagggctggaaatgcttcattggaagaggttgtcatggcaattaaatgtcgtggggagctcttagatggtctatatacgggaataaattcccaacatattactttgacaagcaaaatggtacaagagcacagtggacttcatgtacaaccacataaagctattgttggtgccaatgcctttgcccatgaaagtggaattcatcaggatgggatgcttaaatataaaggaacatatgaaataatatcgcctgatgatattggtttagcacgtgcaaatgaatttggtattgttcttgggaaactcagtggaaggcatgcagtgagatctaagctggtagagcttggatatgaaatcagtgacaaggaatttgaagatttctttaaacgctacaaagaggtcgcagagaagaaaaagcgtgtaactgatgaggacatagaagctttattgtcagatgagatattccagcctaaggttatttggtcccttgctgatgtacaggcaacatgtggaacacttggcttatctacagcaactgtgaaactgatagggccagatggagaggagagaatagcatgttcagttggaacaggtccagttgatgcagcttacaaggctgttgaccaaataatccagtttcgtatcgtcattataaagccactaagacccagtgtttacaaggatttgcatcgaat

SEQ ID NO: 41218 - DNA, 2644 bp, Zea Mays
cgtgtcagccagctccgctccgtggcgcctacgaaaccaccacccgtccggatccggatatattctccattccctgctgactgactgtgactgacatgtcgtcggactcctctccttttccagatcactcacatacacatttcgcgcatccactgactttaacacaagatccccgccagcgccgccgcgcgaccaccccttcctaaaccccgacgaccaccaaccatggccttcaacgctaaaccctactgctccaccaccgccaaaccgcccacccccgccgcccaccgctcgccgtccggcccgtccccctgcatctccgtccgcgccgccgccgtatccccccgcgcccggcactcagcctatggcctctccgccgccggcaacgcgtcctccagcaccgtccgcctccgcgcgctggcccagcgcacccgggcgcagccgcagcctccccggcggcggcccgagtacgtgccgaaccgcatcgacgaccccaactacgtgcgcatcttcgacaccacgctccgcgacggggagcagtcgccgggcgccaccatgacgagcgccgagaagctcgtcgtcgcgcgccagctggcccgcctcggcgtcgacgtcatcgaggccgggttcccggcctcctcccccgacgacctcgacgccgtgcgctccatcgccatcgaggtcggcaacccgccgccgggggacgacgggggcgcccacgtgcccgtcatctgcggcctctcgcgctgcaacaggagggacatcgacgccgcgtgggaggccgtcaggcacgcgcggaggcccaggatccacaccttcatcgccaccagcgagatccacatgcagcacaagctcaggaagacgcccgaccaggtcgtcgccgttgccagggagatggtggcgtacgcacgcagccttgggtgcgccgatgtcgagttcagccctgaggatgccggcaggtcaaatcgagaattcctgtaccatatactggaggaagtcataaaagctggggcaaccactcttaatatcccagatactgtcggatacactcttccttatgaatttgggaagttaatttctgacataaaggaaaacactcctggaattgaaaatgccattatttccactcattgccagaatgaccttggccttgcaactgccaacacattagcggagcacgacagttagaggtgactattaatggtattggtgaaagggctggaaatgcttcattggaagaggttgtcatggcaattaaatgtcgtggggagctcttagatggtctatatacgggaataaattcccaacatattactttgacaagcaaaatggtacaagagcacagtggacttcatgtacaaccacataaagctattgttggtgccaatgcctttgcccatgaaagtggaattcatcaggatgggatgcttaaatataaaggaacatatgaaataatatcgcctgatgatattggtttagcacgtgcaaatgaatttggtattgttcttgggaaactcagtggaaggcatgcagtgagatctaagctggtagagcttggatatgaaatcagtgacaaggaatttgaagatttctttaaacgctacaaagaggtcgcagagaagaaaaagcgtgtaactgatgaggacatagaagctttattgtcagatgagatattccagcctaaggttatttggtcccttgctgatgtacaggtataactgagctgcagttgactaaactctggggccagatggagaggagagaatagcatgttcagttggaacaggtccagttgatgcagcttacaaggctgttgaccaaataatccagattccaaccgtcctccgagaatacggcatgacttcagtcacagaaggcattgacgctattgcgacgactcgagtggttgtcaccggagacgtggccaacaactccaaacacgccttgactggccactctttcaaccgctccttcagcgggagcggggcggcaatggacatcgtcgtgtccagcgtcagagcttacctgagtgccctgaacaagatgtgcagcttcgctggcgctgcgagagccagcagcactgaggtgcctgggagcgcaagtgttcaacgcgcagaatgagctcggcggcgttcgcgttcgtgttagttctcgtatgggatgccaggatggactgtgcgttgtaagagcttgtcaagctgttgaggtgacatttcgtttcagtaacaggctgctcgatattatggggtaccccttgtcagtggggtgacgacaatgctgttctttttctgggaggatagtcccttcagcttagaacatgcaggaaattttggccctatgtagtgtacattttgtatctttaaacatactttcaataatgaaataatattagggtccatctagccacatgggtggccatcggcatgaaaatgatcgaaaataaatatttattcggtttgtcttttttttattacggataaataggatatagaatttacaatgaaaatatatattcttatttttaacattaaactcataaagattcataaaagataaaccttaaaattatcatatatcttctcaataaagtttggatatagattcagatataatttcgaatgttttttcttctttttttggttgt

SEQ ID NO: 41219 - DNA, 2769 bp, Zea Mays
cgtgtcagccagctccgctccgtggcgcctacgaaaccaccacccgtccggatccggatatattctccattccctgctgactgactgtgactgacatgtcgtcggactcctctccttttccagatcactcacatacacatttcgcgcatccactgactttaacacaagatccccgccagcgccgccgcgcgaccaccccttcctaaaccccgacgaccaccaaccatggccttcaacgctaaaccctactgctccaccaccgccaaaccgcccacccccgccgcccaccgctcgccgtccggcccgtccccctgcatctccgtccgcgccgccgccgtatccccccgcgcccggcactcagcctatggcctctccgccgccggcaacgcgtcctccagcaccgtccgcctccgcgcgctggcccagcgcacccgggcgcagccgcagcctccccggcggcggcccgagtacgtgccgaaccgcatcgacgaccccaactacgtgcgcatcttcgacaccacgctccgcgacggggagcagtcgccgggcgccaccatgacgagcgccgagaagctcgtcgtcgcgcgccagctggcccgcctcggcgtcgacgtcatcgaggccgggttcccggcctcctcccccgacgacctcgacgccgtgcgctccatcgccatcgaggtcggcaacccgccgccgggggacgacgggggcgcccacgtgcccgtcatctgcggcctctcgcgctgcaacaggagggacatcgacgccgcgtgggaggccgtcaggcacgcgcggaggcccaggatccacaccttcatcgccaccagcgagatccacatgcagcacaagctcaggaagacgcccgaccaggtcgtcgccgttgccagggagatggtggcgtacgcacgcagccttgggtgcgccgatgtcgagttcagccctgaggatgccggcaggtcaaatcgagaattcctgtaccatatactggaggaagtcataaaagctggggcaaccactcttaatatcccagatactgtcggatacactcttccttatgaatttgggaagttaatttctgacataaaggaaaacactcctggaattgaaaatgccattatttccactcattgccagaatgaccttggccttgcaactgccaacacattagcgggtgctcatgcaggagcacgacagttagaggtgactattaatggtattggtgaaagggctggaaatgcttcattggaagaggttgtcatggcaattaaatgtcgtggggagctcttagatggtctatatacgggaataaattcccaacatattactttgacaagcaaaatggtacaagagcacagtggacttcatgtacaaccacataaagctattgttggtgccaatgcctttgcccatgaaagtggaattcatcaggatgggatgcttaaatataaaggaacatatgaaataatatcgcctgatgatattggtttagcacgtgcaaatgaatttggtattgttcttgggaaactcagtggaaggcatgcagtgagatctaagctggtagaggtacagcttgaatatttctttgtttttcttgctacaagcccacacagctagaggtcttctatttcagttcttactgttactgaatggcatccttgtttttccaaacttgtagcttggatatgaaatcagtgacaaggaatttgaagatttctttaaacgctacaaagaggtcgcagagaagaaaaagcgtgtaactgatgaggacatagaagctttattgtcagatgagatattccagcctaaggttatttggtcccttgctgatgtacaggtataactgagctgcagttgactaaactctggggccagatggagaggagagaatagcatgttcagttggaacaggtccagttgatgcagcttacaaggctgttgaccaaataatccagattccaaccgtcctccgagaatacggcatgacttcagtcacagaaggcattgacgctattgcgacgactcgagtggttgtcaccggagacgtggccaacaactccaaacacgccttgactggccactctttcaaccgctccttcagcgggagcggggcggcaatggacatcgtcgtgtccagcgtcagagcttacctgagtgccctgaacaagatgtgcagcttcgctggcgctgcgagagccagcagcactgaggtgcctgggagcgcaagtgttcaacgcgcagaatgagctcggcggcgttcgcgttcgtgttagttctcgtatgggatgccaggatggactgtgcgttgtaagagcttgtcaagctgttgaggtgacatttcgtttcagtaacaggctgctcgatattatggggtaccccttgtcagtggggtgacgacaatgctgttctttttctgggaggatagtcccttcagcttagaacatgcaggaaattttggccctatgtagtgtacattttgtatctttaaacatactttcaataatgaaataatattagggtccatctagccacatgggtggccatcggcatgaaaatgatcgaaaataaatatttattcggtttgtcttttttttattacggataaataggatatagaatttacaatgaaaatatatattcttatttttaacattaaactcataaagattcataaaagataaaccttaaaattatcatatatcttctcaataaagtttggatatagattcagatataatttcgaatgttttttcttctttttttggttgt

SEQ ID NO: 41220 - DNA, 1114 bp, Zea Mays
aaaaaaccagaaaccagtctggcttacacgcgggcctcacggatggacggtcccactgtcattgagaatcgcaacttggagcaaatctttcagccacccgatccccaaccgcccggcccgacattccctccaaccgccgctgcggctgcgccgcccaccgccgacaggcgacagcatcgacaggcgcagcagtcaacaggaaccgagccatggcgagcgcggatctgctgcggagggaggaggagttctactcctccctgtttgattccgccaaaggcgatggcgccaggtcgcgctcacagctgatcgagaggaagatcgaggccctggaggacatggccaccagggtcagtaaccggagatcgcggaagtggtttaacgaccgtttgctgattgaactcgtcccgcgtctttacgttgaagagatcaaaggcctattcgctcctccgccgtggggtgagcaagtgcccttgtcagcattctacagggcaaatgttggtgaatgggattccttcaggagcattgacatggatgctgaggcaagattgatgcagcatatgaaaaaatcattggaaaaacccaggaatcatgtcgatgaaggggaatcgattgcgctgaatgcttggcatcgaatagatcgacacactagagaagcaataaagagaaatttccttcctgatctgcttggaatatatgaagaacgcgttagggccttcattgaagacgctagtgacaaagatgctcttgtgctgaatgttcaggacccatttcagagactactgctccacggtgtttgtgagttctacaacgtgagctcgacaaccaccagcagtgtgagagaagatgggaggccttggaaggcaaccaccatcaagaagaggcagggcaccggcgttccctctagaatcacactagttagctttctgagaatgaagaagaatggatcgcagtaacgttagttagcgttcaagaatacaacaaaattgctttagattccgtttaggctgttgcaagacaagtgagtggtcactggcaatgtgttcttatatcgcatcagcctgctggctacggtttggaacttcctgacagaaagtagaaacttccggttctacaa

SEQ ID NO: 41221 - DNA, 513 bp, Zea Mays
ttgattatgtatctgtatgtatgtatgtatctactatctaagaacatgtagataatttattggcactacatcgagttttctttccctcttattagaagaacgcgttagggccttcattgaagacgctagtgacaaagatgctcttgtgctgaatgttcaggacccatttcagagactactgctccacggtgtttgtgagttctacaacgtgagctcgacaaccaccagcagtgtgagagaagatgggaggccttggaaggcaaccaccatcaagaagaggcagggcaccggcgttccctctagaatcacactagttagctttctgagaatgaagaagaatggatcgcagtaacgttagttagcgttcaagaatacaacaaaattgctttagattccgtttaggctgttgcaagacaagtgagtggtcactggcaatgtgttcttatatcgcatcagcctgctggctacggtttggaacttcctgacagaaagtagaaacttccggttctacaa

SEQ ID NO: 41222 - DNA, 877 bp, Zea Mays
tatagcttgactctattttagtgtttgttgttggagatgctctaacgtttccggaggccgacatggagcgtggccgcagcagcacctcttgccggtccttgctgctcctcctcctggtctgcttctcccacggcgccggggcggcggcggcggctcggctcctgactccactgcaggcagctgctgccgttcctcctcctctggctcttcaccaagcggagagtaatggcgccacggcggcagctgccgacgacggcctcgtgatgactcaggaaggtgacgctgacgccacgagcaatggcaacgacgacgacgagatctcctccgtctcagagtcagagacgatgacgggcgcagaagaaggcgtgtgggacggagggcaacgacgaggaggagtgcctgcagaggcggctgctcggagacgcgcacctcgactacatctacacgcagcacaagggcaagccgtgagccgagcccgtgaccaatgcatctcggcctcggcctcgccggtttgcatggatggcttggtttgttcagagtgcgtacattacatgcatgctgctgggaagaagtcgatgacagacgatccatcaggctgctgggatcgaatctagtgtgtgcgtgttagctgttgcatgacatgaatctctctctttctgtgtttggttgttttctcactgatgactgatgtatataggccggccggtgcgcggtgtgcaagctctgctaatagtttggttggtttggtgtgagcaatgcaagtttaattatatatggccgtcatcgatccatctgtactcctcctccttaggccttgttcggttattcccgatacacatggattggatgagatttgaaaaaattaagaagaagtttg

SEQ ID NO: 41223 - DNA, 2139 bp, Zea Mays
aggtcggtcagcagtcagcacgtctccgtccccgacgatgccggggagcaatgccaatggagggcgcagcctgtacggacacggccgaccggccatcttcatccccctctccttgccgccctcggttccggactctgctcccctgccccatacccccaccgctcctcacgcctcgcctgactgccaaggcaatcccggaagctcctcccgcgcgcgaacatggcatctagttttcccggtttgtcataggctgcgcatggcggagtcacactaagcaacatgctctggaccttagacagatggaccaaatgcgcatgcttgttaattcgattccccctcatcagcgccaacaagctgccggcatgctttaacatatgatgcttcgttgctatttctggaatgaatagacctgatgttccgaggcacacatgttttattttcttcttcagaatgaagtcaaatttcactgctctgctagaaatgacctgctggaacgttggtgcagatttggcctgcaacaacgcagaggaggtgatcttatgtaactacaaaagatagtaatggggatatccaaggtgacaggcattgccgcgacagcttttcttgtcacatctgttagtctgtgccagttgggaatgaggattattatgcttccattcctagccaccggtattgttgcttccattgtcacggttgcatcgcatgatgccatcaacctaccgtggatcttggggaagaactcggttggaagatttcctctttggtcgattatactgtttggtcctttcttgacgcttgctcggacatatgcgatggttaagagatacatgaggaaggaggccgtgtatgacaagatcgtggaaggcctatatctcggaggatggccgtttctcttgaaacatttgccccctggaaacccatctgtcatagattgcacttgtgagcttccaagaagttcattcgttccagcaaacgagtatctttgccttgcaacttgggataccagagctccaacaccgcaccagatcgaaaaggctgcacgttgggcttgtgaaaagagatctgaggggaagccagtttatgtccattgcgcatttggtcatggaagaagtgcctgtgttgtgtgtgcaattctagtagcgctgggtactgctgagaactggaaagatgctgagaacatcatccgtgaaagaagaaagataaaaatgaacgcccttcaccgtaaaaccttggaagagtggtccaaacaacgagttcgtcagaaaaaggataagtagttgtaagtggaacattttccatagtgatggacttgttttgcggtgttaacgcctgtcataaaatgacatactccctccgttctttgggggtagtatttgcttaggccaagtgtaatttctgtggcattcttatttatgttttaatcagtagtattagtgtttctacctttaaatgtatatgaatttatatgtatccaggttcgggactgttttttgtccacctggttaattgaatgtgagcaggcattagcttaaatgtatttcttcatggaactaaatggatgtatatatgataaagattatataatatagtaaccaaatagtcctagataatggataaacatagtcataaaaattactagatagcctcaaccaacctattcaacatactcaatccagtaatcataggtggaattgttgaatggattcttccatcataggaagagctgttacaagaatttagaccagacaaaagaacacattgtactggagtactcgacatgagattctagcttctctctttccccttcccactgcagtcaatgaagcaatttcaccttcctggaattttcttgtacacacattttcagaaagtgttttttgaaaactaaagaatttccagaaacactccttgttttagagcttcttctatttcccagctttcctctgtagctctcagatatctgctacgtgcatccaaacaatctctcttcccagtcattctcttcccagtcatttttctcttgctcctatgctgagggttagttccacaacatgtgtcagtcagaaggttgaaaattggttttgggatggttgtgctgcgatgcttatctcacaattgccttcatcggtcaccagtatc

SEQ ID NO: 41224 - DNA, 1256 bp, Zea Mays
aggtcggtcagcagtcagcacgtctccgtccccgacgatgccggggagcaatgccaatggagggcgcagcctgtacggacacggccgaccggccatcttcatccccctctccttgccgccctcggttccggactctgctcccctgccccatacccccaccgctcctcacgcctcgcctgactgccaaggcaatcccggaagctcctcccgcgcgcgaacatggtgatgttctttccctgtcccgtgttacttgtttcggatcagtatatatatatggacatttcatgtttcatgaatatattgttactgtgatattcttgatccgttatatttgtaatctttggatcttgcccgctgcttggatctaggcatctagttttcccggtttgtcataggctgcgcatggcggagtcacactaagcaacatgctctggaccttagacagatggaccaaatgcgcatgcttgttaattcgattccccctcatcagcgccaacaagctgccggcatgctttaacatatgatgcttcgttgctatttctggaatgaatagacctgatgttccgaggcacacatgttttattttcttcttcagaatgaagtcaaatttcactgctctgctagaaatgacctgctggaacgttggtgcagatttggcctgcaacaacgcagaggaggtgatcttatgtaactacaaaagatagtaatggggatatccaaggtgacaggcattgccgcgacagcttttcttgtcacatctgttagtctgtgccagttgggaatgaggattattatgcttccattcctagccaccggtattgttgcttccattgtcacggttgcatcgcatgatgccatcaacctaccgtggatcttggggaagaactcggttggaagatttcctctttggtcgattatactgtttggtcctttcttgacgcttgctcggacatatgcgatggttaagagatacatgaggaaggaggccgtgtatgacaagatcgtggaaggcctatatctcggaggatggccgtttctcttgaaacatttgccccctggaaacccatctgtcatagattgcacttgtgagcttccaagaagttcattcgttccagcaaacgagtatctttgccttgcaacttgggataccagagctccaacaccgcaccagatcgaaaaggctgcacgttgggcttgtgaaaagagatctgaggggaagccagtttatgtccattgcgcatttggtttgaccagat

SEQ ID NO: 41225 - DNA, 871 bp, Zea Mays
aggtcggtcagcagtcagcacgtctccgtccccgacgatgccggggagcaatgccaatggagggcgcagcctgtacggacacggccgaccggccatcttcatccccctctccttgccgccctcggttccggactctgctcccctgccccatacccccaccgctcctcacgcctcgcctgactgccaaggcaatcccggaagctcctcccgcgcgcgaacatgatttggcctgcaacaacgcagaggaggtgatcttatgtaactacaaaagatagtaatggggatatccaaggtgacaggcattgccgcgacagcttttcttgtcacatctgttagtctgtgccagttgggaatgaggattattatgcttccattcctagccaccggtattgttgcttccattgtcacggttgcatcgcatgatgccatcaacctaccgtggatcttggggaagaactcggttggaagatttcctctttggtcgattatactgtttggtcctttcttgacgcttgctcggacatatgcgatggttaagagatacatgaggaaggaggccgtgtatgacaagatcgtggaaggcctatatctcggaggatggccgtttctcttgaaacatttgccccctggaaacccatctgtcatagattgcacttgtgagcttccaagaagttcattcgttccagcaaacgagtatctttgccttgcaacttgggataccagagctccaacaccgcaccagatcgaaaaggctgcacgttgggcttgtgaaaagagatctgaggggaagccagtttatgtccattgcgcatttgatcggagggcctgaatccacccatccagaggaagcagcgctcggcgggggtcgtcc

SEQ ID NO: 41226 - DNA, 1459 bp, Zea Mays
aggtcggtcagcagtcagcacgtctccgtccccgacgatgccggggagcaatgccaatggagggcgcagcctgtacggacacggccgaccggccatcttcatccccctctccttgccgccctcggttccggactctgctcccctgccccatacccccaccgctcctcacgcctcgcctgactgccaaggcaatcccggaagctcctcccgcgcgcgaacatgatttggcctgcaacaacgcagaggaggtgatcttatgtaactacaaaagatagtaatggggatatccaaggtgacaggcattgccgcgacagcttttcttgtcacatctgttagtctgtgccagttgggaatgaggattattatgcttccattcctagccaccggtattgttgcttccattgtcacggttgcatcgcatgatgccatcaacctaccgtggatcttggggaagaactcggttggaagatttcctctttggtcgattatactgtttggtcctttcttgacgcttgctcggacatatgcgatggttaagagatacatgaggaaggaggccgtgtatgacaagatcgtggaaggcctatatctcggaggatggccgtttctcttgaaacatttgccccctggaaacccatctgtcatagattgcacttgtgagcttccaagaagttcattcgttccagcaaacgagtatctttgccttgcaacttgggataccagagctccaacaccgcaccagatcgaaaaggctgcacgttgggcttgtgaaaagagatctgaggggaagccagtttatgtccattgcgcatttggtttgaccagatgcatggggttgccctgaatatggtgttattgctgcaccaatttatttcaatccaatattccatagctcatctgtatagttgagtggaatgaggaatatcatagggagcccagatcgtgtgtaggatctatctacggagtacctatgacactgtcatagtaacatattgatttgagattctagatttggtgagaacccataacctgtatcacaaagccttcaaggttggccagtttgccgagggcaagagccatttggctcatgaagctcatgttggcgtcgtcagtcagagacccaccggccatggtgtcagcaagcgactgatgcagctgctccaagccctgcgagagagcttcctctgcctgctgtgatgactgctgaaggctgcatatgccgaccacttgctgctctgtcagtggatctagctggggcagcagtgtctgcaacagaatggaatttcgtatactttattggaactgcaaattcttcttgtactaaggggaaatctgatttacattggaacagttcttgtgatcttagtaatgaaaaagtaacaccgcctgagttccctgctccaatcggagggcctgaatccacccatccagaggaagcagcgctcggcgggggtcgtcc

SEQ ID NO: 41227 - DNA, 1970 bp, Zea Mays
ccctgtcctccaccgcatccagtgcccccgatgccgccgccgccgcagttgaacgggggcaaggtgaccccgaacctggcgatggatgcggcggccactcgtctgctcaacctcacggtgctccagcgcctggacccagccgtcgaggacatcctcatcaccgccgcacacgtcacgctatacgacttcaacatcgatctcaaccagtggagccggaaggacgtcgaggggtcgctgttcgtcgtcaagaggaactcgcagcccagattccagttcattgtcatgaacaggcgcaacactgataatctggtggaggatctcttaagtgattttgaatacgaacttcaacctccatatttgttgtaccggaatgcttcacaagaagtaaatggaatttggttttacaatcaacatgactgtgaagctgttgcaagtctatttggaaggtaaaggcttttcatgtattctcctctcctcatgtcggaggaatctttctctgaaattctgatgtagatcataaacattattgaacaatatgctaatagatgttgttttgatctgaaatatgattatgcattttccaatttccaaattaggtatagagcaaggatgtgcagtgtgcttacaaacttctgatacacataaaggtttccatgtcatgtttccctgatacttctagaaagtagctagtatggtgctctatttgaaatgcatgcgacatgtgattatgattattttagcataatgatttcacatctgcccctttttgggaagcaactgtatctcaagatgccatggttatgtcatgtttccctgatacttgtacagagtagctagtatcgtgctctacttaaaattcatgctacaggggattatgactattttgtcattcattgccttcttctgttcgttttcaaaataacaattgtatctcaggatgcaggggtgaacttctttgttagaattgtgtgggcgccctttgttaggttgtttatgtttactcgattttatttgcaggatactgaacgcatacgccaaagtacctccaaaaccgaaagtgccttccacaaaaagtgaattcgaggaactagaagctgttcctacatctgctgccatagatggcccccttgaacctccgctaggatccactgctgtagtccttgatacccccgacgaaccattgatcaactacttcagtgttgctagcagcattggaagcgaatcaaacgcgccactgtctggaagagtgcagctggctactgagagcatcccatcctcccatgtgctgctgatcattccatctgctgctccagcacatcagctacccccttcagtagcttcatcagctccaccattgcccatccacgacactaatgcccacactagccggtcaacaaatcttgtaacgccagatttctttgcgcctccaccatcctcttctactccactggctccaccgggcgcatccgtgattcctactgccccgcctcttcaccctacttcggcatctgttcagcgctctcaatatggcgccccactgctccagccttttccaccgcccactccacctccttcccttacccccgcacacagtgagagacctgttgttacaagggatagagtcaaggatgctctacagagacttgttcagagcgacgagttcatcgatttggtgtatcgggaattgcagaaatcacttgtgtaggctgcttattaatccttctggagtttctggctcgtgacaagtaccctgttattttttttctttgacctttttcatgcttcccttcctgtaatcctgtatagtttcgtgttcatgtattgatgtatagtactataggaatggctggttagcatacttatgtaactcaaaagcccaagtaaaaagagttttgttcaagaatgttgaaaatcggatctattttttcttgtttatgtacggagaaatctctactgtatttaggggatac

SEQ ID NO: 41228 - DNA, 3633 bp, Zea Mays
gtcaatttattttagtttccggtcccatataggaattgaatatatcgtaatgcacactagtgggtgaagcaacagcatcatcgcttccatattattgcatcttccgactccctcgattcaccagtcaacggcttcatttcttcgctgcaccattaggctccgttctacttctacctaataacagggtgtagttgtttaatttgaaatggactctgaagccagtatgttcgatcacattgagctcatgctacttgatgaaaagtgtggagccgtcagacatgccattatcatttttaacagcaatcaccaataatttctcagaggatcagacaattggccgtggtgggtttgctgtggtttacaagggactgctgcgaaatggactatccgttgcggtaaagaagttctatgataccattgaactatctgatgaaatgtaccgtaaagaggttcaatccatgatgaggttgaaacatgcaaatatagtacgtttttttggatactgtgctgacacacagtggaaaatgttcaaacacgatggaagacatgtgattgcagaagcacgccaacgattgctttgctttgaatttgtgcctaatggaagtcttgataaatatatatctgatatgtttcatggcctcgaatggagaaagcgctatcagataatcaggggaatttgtgagggcttgcgttatcttcatgatgagaatgttcttcacttagatcttaagccttcaaatatactgcttgatcataatcttgttcctaaaattactgattttggtctctcaagatgctttgatgataataaaactcgaaccgttacagcaaatctgattggatcggtgggatacctggcaccagaattttttagtggattgatctctttcaagtcagatgtatatagccttggtgttataatcatggaggtggtgacaggaataaaaggatactgcgaaattgaagatgtacttgaaagctggagaaaaagattgaaaatgccaatgggagatgcactggaacaaataagggtctgcgttgagattggcaccatgtgcattgagagtaacccattgaatcgtccagatctcaggcatataatcgagctgtttgatgaaatggaaaacatgcggctggttacaaaaactacaagttcattaggaacccagggaagtgatgaacatgattcagaagaaacgattgcttcagctatcactgatgaaaagagagagaaactttcagtactaagtacgttgcctaagtatttaccatttgcattcctcgaggatatcacagatggtttttctaaagaacggcagcttggcagaggtgggttcggagtggtttataagggaatccttagtgatggatataccattgctgtccgcagactccttagattccagggaattgagatgaaacaattcgacaatgaggttaatatactcatggagcttagacacaaaaatattgtcaatctcctgggatactgccacgaggttaggggtacgtacgtacagtacaaaggaaaacctgtattcgcagaaacctccgaacagttgctctgctacgagtatctgcactgtggaagcatcgacaagtacatttttggaaaaaaccatgaactagattggcacacgcgttacaaaatgattaaagggatctgtgagggtttacattacctccacgagaatgacagagctccaattattcatttgaacttgaagccagcaaatgttttgctagacgcagccatggaacctaggatcacagattttggtttatcaaggcttattggtgaagggaatactagaatagtcaacacacacactcctggaccaatagggtacatggcacctgaataccgttacatgggggaagtttcacgcaaggtagacatattcagcttgggtattcttatactagagattgtaactggtcaagacaatagtaccaaagttgactttatcgatcatgtatgtgaacactgcatggaagggccacaaataaaatttatgtatccctctctggaacctgaattacatgatcaggtagaactgtgcatcaaaattggcctagagtgtgtccagacagatcgaaaaaaaagacctactgcaggggacattatacgtaagctcgaggaaggaaccaaattgggccctacaccatcccgtgaaaatattactacagaaattggtaagccacagatgttttcgtttgaactcctgaatgacatcacagaaagcttcagtccgggacgcctgcgtgggacaggtggatttggatatgtttatgaggggataccacatggtaacgagggagcgatggccgtgaagaggcttaaagaaaaaataggtatatcaccgaaacagtttgagaatgaggttcataatctgagcagaatcgagcacaggaatattgtacggcttataggctactgcgatgaaatacgggaaatactatctcatggtaaaaacaagaatgatccacctattcgcgaacatattcaagaaaggttattgtgttacgagtatatgcctaagggaagccttgacaagataatttatgataacctcgattggcatacgcgatataaaataatagaaggtatttgccatggcttacattgtcttcacgagggtcaacaggatattcagattgcgcatttggacttaaaaccagcaaatatattacttgacagtgacatggttcctaaacttgctgattttggtatgtcaaggctcttcagtctcgaacaagtttatatccttgcttccaagcctatgggaacaattggctacatagcaccggaataccttgaccacaaaaaggtatcaacaaaggcagatatatatagtttcggcattgtagtactggaaatcgtaacacgaaaacagtgcccacgcagttacgcagacataaatgctcagcattttatccaccatctgcgtcaaaatttgacaaaagataactacgtcaaatccatgtacccggcccttgaagcggactgccttcagcaagtgaaactgtgcatagaaattgggctgaactgcgtggagaaggaacctacaaagagaccaactgccagggaaataatctctatgtttaatcaaaaaaaggattcgagcagatctggggtatctaactgcatcgttaatgtgatagaggcgtggctatcaaggcttccatggcatccttggcctctaactttgctccgtcagacttaagcttgatggcaacagcggtatttgaaagatttgcaagggtgtccgcttgagttcctgcgatgcagcggaaggaagaaaaaaactagcagattaaaaatgagaatggggatcttgtatatctatttatgttttatccttttcatagaaaaattacaagctatgattttgatggtatagtggcaatattatgtcaatgtaacattcaatgggcatcgaattaaaatataatctaagtattttttttcctagcattgtaaggcgtagaaatatatgtcaatactcctttcattttaaattggaagtcgttctggatttgtttttacatacatgacttttagtttttggtatgtactccaaatgggtgattaaggtgatcgacaaaataaggagagggtttatttggaag

SEQ ID NO: 41229 - DNA, 3780 bp, Zea Mays
atttattttagtttccggtcccatataggaattgaatatatcgtaatgcacactagtgggtgaagcaacagcatcatcgcttccatattattgcatcttccgactccctcgattcaccagtcaacggcttcatttcttcgctgcaccattaggctccgttctacttctacctaataacagtttgaagggtgtagttgtttaatttgaaatggactctgaagccagtatgttcgatcacattgagctcatgctacttgatgaaaagtgtggagccgtcagacatgccattatcatttttaacagcaatcaccaataatttctcagaggatcagacaattggccgtggtgggtttgctgtggtttacaagggactgctgcgaaatggactatccgttgcggtaaagaagttctatgataccattgaactatctgatgaaatgtaccgtaaagaggttcaatccatgatgaggttgaaacatgcaaatatatggaaaatgttcaaacacgatggaagacatgtgattgcagaagcacgccaacgattgctttgctttgaatttgtgcctaatggaagtcttgataaatatatatctggtatgactgttgaaaggaatgtttttcatcttcattttttcgctgaatattatctgttccaagtatctcataggtatgatacagtgactttacaatttttcaaatgtgtggaaatatgtcttactgatcgcataaaactgcacaatgcataccttaatttgcatcatacaactccagatatgtttcatggcctcgaatggagaaagcgctatcagataatcaggggaatttgtgagggcttgcgttatcttcatgatgagaatgttcttcacttagatcttaagccttcaaatatactgcttgatcataatcttgttcctaaaattactgattttggtctctcaagatgctttgatgataataaaactcgaaccgttacagcaaatctgattggatcggtgggatacctggcaccagaattttttagtggattgatctctttcaagtcagatgtatatagccttggtgttataatcatggaggtggtgacaggaataaaaggatactgcgaaattgaagatgtacttgaaagctggagaaaaagattgaaaatgccaatgggagatgcactggaacaaataagggtctgcgttgagattggcaccatgtgcattgagagtaacccattgaatcgtccagatctcaggcatataatcgagctgtttgatgaaatggaaaacatgcggctggttacaaaaactacaagttcattaggaacccagggaagtgatgaacatgattcagaagaaacgattgcttcagctatcactgatgaaaagagagagaaactttcagtactaagtacgttgcctaagtatttaccatttgcattcctcgaggatatcacagatggtttttctaaagaacggcagcttggcagaggtgggttcggagtggtttataagggaatccttagtgatggatataccattgctgtccgcagactccttagattccagggaattgagatgaaacaattcgacaatgaggttaatatactcatggagcttagacacaaaaatattgtcaatctcctgggatactgccacgaggttaggggtacgtacgtacagtacaaaggaaaacctgtattcgcagaaacctccgaacagttgctctgctacgagtatctgcactgtggaagcatcgacaagtacatttttggaaaaaaccatgaactagattggcacacgcgttacaaaatgattaaagggatctgtgagggtttacattacctccacgagaatgacagagctccaattattcatttgaacttgaagccagcaaatgttttgctagacgcagccatggaacctaggatcacagattttggtttatcaaggcttattggtgaagggaatactagaatagtcaacacacacactcctggaccaatagggtacatggcacctgaataccgttacatgggggaagtttcacgcaaggtagacatattcagcttgggtattcttatactagagattgtaactggtcaagacaatagtaccaaagttgactttatcgatcatgtatgtgaacactgcatggaagggccacaaataaaatttatgtatccctctctggaacctgaattacatgatcaggtagaactgtgcatcaaaattggcctagagtgtgtccagacagatcgaaaaaaaagacctactgcaggggacattatacgtaagctcgaggaaggaaccaaattgggccctacaccatcccgtgaaaatattactacagaaattggtaagccacagatgttttcgtttgaactcctgaatgacatcacagaaagcttcagtccgggacgcctgcgtgggacaggtggatttggatatgtttatgaggggataccacatggtaacgagggagcgatggccgtgaagaggcttaaagaaaaaataggtatatcaccgaaacagtttgagaatgaggttcataatctgagcagaatcgagcacaggaatattgtacggcttataggctactgcgatgaaatacgggaaatactatctcatggtaaaaacaagaatgatccacctattcgcgaacatattcaagaaaggttattgtgttacgagtatatgcctaagggaagccttgacaagataatttatgataacctcgattggcatacgcgatataaaataatagaaggtatttgccatggcttacattgtcttcacgagggtcaacaggatattcagattgcgcatttggacttaaaaccagcaaatatattacttgacagtgacatggttcctaaacttgctgattttggtatgtcaaggctcttcagtctcgaacaagtttatatccttgcttccaagcctatgggaacaattggctacatagcaccggaataccttgaccacaaaaaggtatcaacaaaggcagatatatatagtttcggcattgtagtactggaaatcgtaacacgaaaacagtgcccacgcagttacgcagacataaatgctcagcattttatccaccatctgcgtcaaaatttgacaaaagataactacgtcaaatccatgtacccggcccttgaagcggactgccttcagcaagtgaaactgtgcatagaaattgggctgaactgcgtggagaaggaacctacaaagagaccaactgccagggaaataatctctatgtttaatcaaaaaaaggattcgagcagatctggggtatctaactgcatcgttaatgtgatagaggcgtggctatcaaggcttccatggcatccttggcctctaactttgctccgtcagacttaagcttgatggcaacagcggtatttgaaagatttgcaagggtgtccgcttgagttcctgcgatgcagcggaaggaagaaaaaaactagcagattaaaaatgagaatggggatcttgtatatctatttatgttttatccttttcatagaaaaattacaagctatgattttgatggtatagtggcaatattatgtcaatgtaacattcaatgggcatcgaattaaaatataatctaagtattttttttcctagcattgtaaggcgtagaaatatatgtcaatactcctttcattttaaattggaagtcgttctggatttgtttttacatacatgacttttagtttttggtatgtactccaaatgggtgattaaggtgatcgacaaaataaggagagggtttatttggaag

SEQ ID NO: 41230 - DNA, 3634 bp, Zea Mays
atttattttagtttccggtcccatataggaattgaatatatcgtaatgcacactagtgggtgaagcaacagcatcatcgcttccatattattgcatcttccgactccctcgattcaccagtcaacggcttcatttcttcgctgcaccattaggctccgttctacttctacctaataacagtttgaagggtgtagttgtttaatttgaaatggactctgaagccagtatgttcgatcacattgagctcatgctacttgatgaaaagtgtggagccgtcagacatgccattatcatttttaacagcaatcaccaataatttctcagaggatcagacaattggccgtggtgggtttgctgtggtttacaagggactgctgcgaaatggactatccgttgcggtaaagaagttctatgataccattgaactatctgatgaaatgtaccgtaaagaggttcaatccatgatgaggttgaaacatgcaaatatagtacgtttttttggatactgtgctgacacacagtggaaaatgttcaaacacgatggaagacatgtgattgcagaagcacgccaacgattgctttgctttgaatttgtgcctaatggaagtcttgataaatatatatctgatatgtttcatggcctcgaatggagaaagcgctatcagataatcaggggaatttgtgagggcttgcgttatcttcatgatgagaatgttcttcacttagatcttaagccttcaaatatactgcttgatcataatcttgttcctaaaattactgattttggtctctcaagatgctttgatgataataaaactcgaaccgttacagcaaatctgattggatcggtgggatacctggcaccagaattttttagtggattgatctctttcaagtcagatgtatatagccttggtgttataatcatggaggtggtgacaggaataaaaggatactgcgaaattgaagatgtacttgaaagctggagaaaaagattgaaaatgccaatgggagatgcactggaacaaataagggtctgcgttgagattggcaccatgtgcattgagagtaacccattgaatcgtccagatctcaggcatataatcgagctgtttgatgaaatggaaaacatgcggctggttacaaaaactacaagttcattaggaacccagggaagtgatgaacatgattcagaagaaacgattgcttcagctatcactgatgaaaagagagagaaactttcagtactaagtacgttgcctaagtatttaccatttgcattcctcgaggatatcacagatggtttttctaaagaacggcagcttggcagaggtgggttcggagtggtttataaggtatgccaacatccttgcgtttcatgttcattatgcatatttatatttgtgcaatctgagaactgagacgcgacagtaaaccgattgagtggtaacatatatatcttctttgcaacagggaatccttagtgatggatataccattgctgtccgcagactccttagattccagggaattgagatgaaacaattcgacaatgaggttaatatactcatggagcttagacacaaaaatattgtcaatctcctgggatactgccacgaggttaggggtacgtacgtacagtacaaaggaaaacctgtattcgcagaaacctccgaacagttgctctgctacgagtatctgcactgtggaagcatcgacaagtacatttttgcaaatgttttgctagacgcagccatggaacctaggatcacagattttggtttatcaaggcttattggtgaagggaatactagaatagtcaacacacacactcctggaccaatagggtacatggcacctgaataccgttacatgggggaagtttcacgcaaggtagacatattcagcttgggtattcttatactagagattgtaactggtcaagacaatagtaccaaagttgactttatcgatcatgtatgtgaacactgcatggaagggccacaaataaaatttatgtatccctctctggaacctgaattacatgatcaggtagaactgtgcatcaaaattggcctagagtgtgtccagacagatcgaaaaaaaagacctactgcaggggacattatacgtaagctcgaggaaggaaccaaattgggccctacaccatcccgtgaaaatattactacagaaattggtaagccacagatgttttcgtttgaactcctgaatgacatcacagaaagcttcagtccgggacgcctgcgtgggacaggtggatttggatatgtttatgaggggataccacatggtaacgagggagcgatggccgtgaagaggcttaaagaaaaaataggtatatcaccgaaacagtttgagaatgaggttcataatctgagcagaatcgagcacaggaatattgtacggcttataggctactgcgatgaaatacgggaaatactatctcatggtaaaaacaagaatgatccacctattcgcgaacatattcaagaaaggttattgtgttacgagtatatgcctaagggaagccttgacaagataatttatgataacctcgattggcatacgcgatataaaataatagaaggtatttgccatggcttacattgtcttcacgagggtcaacaggatattcagattgcgcatttggacttaaaaccagcaaatatattacttgacagtgacatggttcctaaacttgctgattttggtatgtcaaggctcttcagtctcgaacaagtttatatccttgcttccaagcctatgggaacaattggctacatagcaccggaataccttgaccacaaaaaggtatcaacaaaggcagatatatatagtttcggcattgtagtactggaaatcgtaacacgaaaacagtgcccacgcagttacgcagacataaatgctcagcattttatccaccatctgcgtcaaaatttgacaaaagataactacgtcaaatccatgtacccggcccttgaagcggactgccttcagcaagtgaaactgtgcatagaaattgggctgaactgcgtggagaaggaacctacaaagagaccaactgccagggaaataatctctatgtttaatcaaaaaaaggattcgagcagatctggggtatctaactgcatcgttaatgtgatagaggcgtggctatcaaggcttccatggcatccttggcctctaactttgctccgtcagacttaagcttgatggcaacagcggtatttgaaagatttgcaagggtgtccgcttgagttcctgcgatgcagcggaaggaagaaaaaaactagcagattaaaaatgagaatggggatcttgtatatctatttatgttttatccttttcatagaaaaattacaagctatgattttgatggtatagtggcaatattatgtcaatgtaacattcaatgggcatcgaattaaaatataatctaagtattttttttcctagcattgtaaggcgtagaaatatatgtcaatactcctttcattttaaattggaagtcgttctggatttgtttttacatacatgacttttagtttttggtatgtactccaaatgggtgattaaggtgatcgacaaaataaggagagggtttatttggaag

SEQ ID NO: 41231 - DNA, 3642 bp, Zea Mays
gtttccggtcccatataggaattgaatatatcgtaatgcacactagtgggtgaagcaacagcatcatcgcttccatattattgcatcttccgactccctcgattcaccagtcaacggcttcatttcttcgctgcaccattaggctccgttctacttctacctaataacagtttgaagggtgtagttgtttaatttgaaatggactctgaagccagtatgttcgatcacattgagctcatgctacttgatgaaaagtgtggagccgtcagacatgccattatcatttttaacagcaatcaccaataatttctcagaggatcagacaattggccgtggtgggtttgctgtggtttacaagggactgctgcgaaatggactatccgttgcggtaaagaagttctatgataccattgaactatctgatgaaatgtaccgtaaagaggttcaatccatgatgaggttgaaacatgcaaatatagtacgtttttttggatactgtgctgacacacagtggaaaatgttcaaacacgatggaagacatgtgattgcagaagcacgccaacgattgctttgctttgaatttgtgcctaatggaagtcttgataaatatatatctgatatgtttcatggcctcgaatggagaaagcgctatcagataatcaggggaatttgtgagggcttgcgttatcttcatgatgagaatgttcttcacttagatcttaagccttcaaatatactgcttgatcataatcttgttcctaaaattactgattttggtctctcaagatgctttgatgataataaaactcgaaccgttacagcaaatctgattggatcggtgggatacctggcaccagaattttttagtggattgatctctttcaagtcagatgtatatagccttggtgttataatcatggaggtggtgacaggaataaaaggatactgcgaaattgaagatgtacttgaaagctggagaaaaagattgaaaatgccaatgggagatgcactggaacaaataagggtctgcgttgagattggcaccatgtgcattgagagtaacccattgaatcgtccagatctcaggcatataatcgagctgtttgatgaaatggaaaacatgcggctggttacaaaaactacaagttcattaggaacccagggaagtgatgaacatgattcagaagaaacgattgcttcagctatcactgatgaaaagagagagaaactttcagtactaagtacgttgcctaagtatttaccatttgcattcctcgaggatatcacagatggtttttctaaagaacggcagcttggcagaggtgggttcggagtggtttataagggaatccttagtgatggatataccattgctgtccgcagactccttagattccagggaattgagatgaaacaattcgacaatgaggttaatatactcatggagcttagacacaaaaatattgtcaatctcctgggatactgccacgaggttaggggtacgtacgtacagtacaaaggaaaacctgtattcgcagaaacctccgaacagttgctctgctacgagtatctgcactgtggaagcatcgacaagtacatttttgttctatttttttaaaggaaaaaaccatgaactagattggcacacgcgttacaaaatgattaaagggatctgtgagggtttacattacctccacgagaatgacagagctccaattattcatttgaacttgaagccagcaaatgttttgctagacgcagccatggaacctaggatcacagattttggtttatcaaggcttattggtgaagggaatactagaatagtcaacacacacactcctggaccaatagggtacatggcacctgaataccgttacatgggggaagtttcacgcaaggtagacatattcagcttgggtattcttatactagagattgtaactggtcaagacaatagtaccaaagttgactttatcgatcatgtatgtgaacactgcatggaagggccacaaataaaatttatgtatccctctctggaacctgaattacatgatcaggtagaactgtgcatcaaaattggcctagagtgtgtccagacagatcgaaaaaaaagacctactgcaggggacattatacgtaagctcgaggaaggaaccaaattgggccctacaccatcccgtgaaaatattactacagaaattggtaagccacagatgttttcgtttgaactcctgaatgacatcacagaaagcttcagtccgggacgcctgcgtgggacaggtggatttggatatgtttatgaggggataccacatggtaacgagggagcgatggccgtgaagaggcttaaagaaaaaataggtatatcaccgaaacagtttgagaatgaggttcataatctgagcagaatcgagcacaggaatattgtacggcttataggctactgcgatgaaatacgggaaatactatctcatggtaaaaacaagaatgatccacctattcgcgaacatattcaagaaaggttattgtgttacgagtatatgcctaagggaagccttgacaagataatttatgataacctcgattggcatacgcgatataaaataatagaaggtatttgccatggcttacattgtcttcacgagggtcaacaggatattcagattgcgcatttggacttaaaaccagcaaatatattacttgacagtgacatggttcctaaacttgctgattttggtatgtcaaggctcttcagtctcgaacaagtttatatccttgcttccaagcctatgggaacaattggctacatagcaccggaataccttgaccacaaaaaggtatcaacaaaggcagatatatatagtttcggcattgtagtactggaaatcgtaacacgaaaacagtgcccacgcagttacgcagacataaatgctcagcattttatccaccatctgcgtcaaaatttgacaaaagataactacgtcaaatccatgtacccggcccttgaagcggactgccttcagcaagtgaaactgtgcatagaaattgggctgaactgcgtggagaaggaacctacaaagagaccaactgccagggaaataatctctatgtttaatcaaaaaaaggattcgagcagatctggggtatctaactgcatcgttaatgtgatagaggcgtggctatcaaggcttccatggcatccttggcctctaactttgctccgtcagacttaagcttgatggcaacagcggtatttgaaagatttgcaagggtgtccgcttgagttcctgcgatgcagcggaaggaagaaaaaaactagcagattaaaaatgagaatggggatcttgtatatctatttatgttttatccttttcatagaaaaattacaagctatgattttgatggtatagtggcaatattatgtcaatgtaacattcaatgggcatcgaattaaaatataatctaagtattttttttcctagcattgtaaggcgtagaaatatatgtcaatactcctttcattttaaattggaagtcgttctggatttgtttttacatacatgacttttagtttttggtatgtactccaaatgggtgattaaggtgatcgacaaaataaggagagggtttatttggaag

SEQ ID NO: 41232 - DNA, 3570 bp, Zea Mays
atcgcttccatattattgcatcttccgactccctcgattcaccagtcaacggcttcatttcttcgctgcaccattaggctccgttctacttctacctaataacagggtgtagttgtttaatttgaaatggactctgaagccagtatgttcgatcacattgagctcatgctacttgatgaaaagtgtggagccgtcagacatgccattatcatttttaacagcaatcaccaataatttctcagaggatcagacaattggccgtggtgggtttgctgtggtttacaagggactgctgcgaaatggactatccgttgcggtaaagaagttctatgataccattgaactatctgatgaaatgtaccgtaaagaggttcaatccatgatgaggttgaaacatgcaaatatagtacgtttttttggatactgtgctgacacacagtggaaaatgttcaaacacgatggaagacatgtgattgcagaagcacgccaacgattgctttgctttgaatttgtgcctaatggaagtcttgataaatatatatctgatatgtttcatggcctcgaatggagaaagcgctatcagataatcaggggaatttgtgagggcttgcgttatcttcatgatgagaatgttcttcacttagatcttaagccttcaaatatactgcttgatcataatcttgttcctaaaattactgattttggtctctcaagatgctttgatgataataaaactcgaaccgttacagcaaatctgattggatcggtgggatacctggcaccagaattttttagtggattgatctctttcaagtcagatgtatatagccttggtgttataatcatggaggtggtgacaggaataaaaggatactgcgaaattgaagatgtacttgaaagctggagaaaaagattgaaaatgccaatgggagatgcactggaacaaataagggtctgcgttgagattggcaccatgtgcattgagagtaacccattgaatcgtccagatctcaggcatataatcgagctgtttgatgaaatggaaaacatgcggctggttacaaaaactacaagttcattaggaacccagggaagtgatgaacatgattcagaagaaacgattgcttcagctatcactgatgaaaagagagagaaactttcagtactaagtacgttgcctaagtatttaccatttgcattcctcgaggatatcacagatggtttttctaaagaacggcagcttggcagaggtgggttcggagtggtttataagggaatccttagtgatggatataccattgctgtccgcagactccttagattccagggaattgagatgaaacaattcgacaatgaggttaatatactcatggagcttagacacaaaaatattgtcaatctcctgggatactgccacgaggttaggggtacgtacgtacagtacaaaggaaaacctgtattcgcagaaacctccgaacagttgctctgctacgagtatctgcactgtggaagcatcgacaagtacatttttgttctatttttttaaaggaaaaaaccatgaactagattggcacacgcgttacaaaatgattaaagggatctgtgagggtttacattacctccacgagaatgacagagctccaattattcatttgaacttgaagccagcaaatgttttgctagacgcagccatggaacctaggatcacagattttggtttatcaaggcttattggtgaagggaatactagaatagtcaacacacacactcctggaccaatagggtacatggcacctgaataccgttacatgggggaagtttcacgcaaggtagacatattcagcttgggtattcttatactagagattgtaactggtcaagacaatagtaccaaagttgactttatcgatcatgtatgtgaacactgcatggaagggccacaaataaaatttatgtatccctctctggaacctgaattacatgatcaggtagaactgtgcatcaaaattggcctagagtgtgtccagacagatcgaaaaaaaagacctactgcaggggacattatacgtaagctcgaggaaggaaccaaattgggccctacaccatcccgtgaaaatattactacagaaattggtaagccacagatgttttcgtttgaactcctgaatgacatcacagaaagcttcagtccgggacgcctgcgtgggacaggtggatttggatatgtttatgaggggataccacatggtaacgagggagcgatggccgtgaagaggcttaaagaaaaaataggtatatcaccgaaacagtttgagaatgaggttcataatctgagcagaatcgagcacaggaatattgtacggcttataggctactgcgatgaaatacgggaaatactatctcatggtaaaaacaagaatgatccacctattcgcgaacatattcaagaaaggttattgtgttacgagtatatgcctaagggaagccttgacaagataatttatgataacctcgattggcatacgcgatataaaataatagaaggtatttgccatggcttacattgtcttcacgagggtcaacaggatattcagattgcgcatttggacttaaaaccagcaaatatattacttgacagtgacatggttcctaaacttgctgattttggtatgtcaaggctcttcagtctcgaacaagtttatatccttgcttccaagcctatgggaacaattggctacatagcaccggaataccttgaccacaaaaaggtatcaacaaaggcagatatatatagtttcggcattgtagtactggaaatcgtaacacgaaaacagtgcccacgcagttacgcagacataaatgctcagcattttatccaccatctgcgtcaaaatttgacaaaagataactacgtcaaatccatgtacccggcccttgaagcggactgccttcagcaagtgaaactgtgcatagaaattgggctgaactgcgtggagaaggaacctacaaagagaccaactgccagggaaataatctctatgtttaatcaaaaaaaggattcgagcagatctggggtatctaactgcatcgttaatgtgatagaggcgtggctatcaaggcttccatggcatccttggcctctaactttgctccgtcagacttaagcttgatggcaacagcggtatttgaaagatttgcaagggtgtccgcttgagttcctgcgatgcagcggaaggaagaaaaaaactagcagattaaaaatgagaatggggatcttgtatatctatttatgttttatccttttcatagaaaaattacaagctatgattttgatggtatagtggcaatattatgtcaatgtaacattcaatgggcatcgaattaaaatataatctaagtattttttttcctagcattgtaaggcgtagaaatatatgtcaatactcctttcattttaaattggaagtcgttctggatttgtttttacatacatgacttttagtttttggtatgtactccaaatgggtgattaaggtgatcgacaaaataaggagagggtttatttggaag

SEQ ID NO: 41233 - DNA, 347 bp, Zea Mays
cttgtcttcttcctttcctctgttgcatttctccaatccaaacaaggccaataataaccaaaaaaatgtgaaggatatatgtagtcgcatttcatcttgcatctgcctgtcatttctctctctatttccttcaggttgtttttccctcgagggtgtcacggacatgcatcagcactaactcaatgacaattagttctaagaacctactaaaaacatctaaacataacaaaaaaacaaagcaaaaggtagatcaaggaaggctgagctgtctgcctacgtcagccactctgctacacgcctacacatcgcatccttggtcctgcagcttgtcgccgccgccgcctccg

SEQ ID NO: 41234 - DNA, 237 bp, Zea Mays
aggaaggcggaggcgttgatgggggtggcggtgcgggggtcgaccctggcgagccaggcgggcacgacgccggagcggccgatgacgcacaggtaccgggcctgccccagcatggccaccatcagtgacgtgaggatgccgaggctcgcgccggcgccgatgacgttggacacccacgccatcccgtcccgccccttgaacgcccccgagaacggcgcctccgggtcgatctgcacg

SEQ ID NO: 41235 - DNA, 491 bp, Zea Mays
cacgcccgtcagcaccaggttcaccaccgagctctcctttgtgctgcgtgcgtgcgtgcgcccgcccatggaacggaatccgtatcgtctcgtcagcactcaagcagcaaatctggaaatggcgtctacgacgaaactatttgccgaattttcggttttggaaaaaataataaacttgctctgcattaccagttttagtttaccacaaaagttccttttttatattaaaaactgcatcatgccagaaaggatgatgggcaagattctttcctttctgataacagaatgtattaaaattttccagaacagatagaactggagatgtgaactggttccacttgctctgaacaacctcacaacagctggttgcagattatagcagaggaagcaatgaaaccaccagacgcacctacaccagtgcggcgatgaagaagtggacgtaagaaacaaaaaaagaaacagacaaaattttgatcaattgtccataatat

SEQ ID NO: 41236 - DNA, 2037 bp, Zea Mays
tttctgtccccctcgccatttcccacacagtgtggcgagagccggccgcgtggcggatcatcgtcgccgcccctcgcatcctcgtcgtgccgccgcaccgcaagggttgctcgtgttcgacgggatgccaccgctgggacccgggagagattttgctgttgtagaaggttgtgtggaagttggatctcttttccattttggcatcagttctgttattatctgaaggctgtgcatcagtcctggatgcagctaatgtactgcagtaaatgataatctctggaaatttcgtcaggttctcctttgctcagaaaagctggctcaagaaccactagcaaggattttaaaatggcaaacattgcattcaaaaggcgagttatcaggctcactgctagccttttcttgaagaccatgcttgttcataaccttgaggaggcagtggcttcttggaaagcaaggaaatcaagtggttgattgcctgatggatgtatcatgggcattttgttggtccagtcttagttggcccccctgtgtgtgccagttcgtgggtcgcctctgctacgcatttttccagggggaccatctcttatatctgctgcatcctcatcttggtagctttcaatctcgtgatggttacttctagtgccccaccatcatggcatttccatgtgtattctttctttggtagccccatgttttgcatccatgcagcgattctgcaatgaaactgctaggttgaacatcaaaaggtaaaagttgaagatttctatgaatatcttacatggatgacgtgattaaactgtactttgtagttgggaccctttgatatatttttttcttttcctcggtatgtgttaagtaggttgggtctactttatcattatggcagtcacatgacccatttgcgctgatgttaagataaacaacttggtgttcaaaagtcttaatcatgtaaccctgggatagggctcaactttcgccactaaggaaagaaccctggcacatggcttgtgctctagacttcttagtaagcagacaggaaatcttgtcgttgatacggtagttaacctacttgtttaatcatcattaccgcagttgccacaaaatcccattcagatgaatctgaaacctgcgcagtcatctttccattaatcaatctaatgctctgggaccatgtttctctgttctgtatctatatgtagcaaatgaatacctagctctcaggatacttacagtatcccgtggtctttaagctaagaactaacaagtccttgctactgagctacatggaacacttttttgttaagcatattatagacacatcatgcatatatttgtctctatctttgatgtgtttcacaaaccgaagctacagtaacccctttggcttattaccctcggttaagaactaatgtttcgcaagttgattctcctctaggtgtatacttcattttattgactggctgtctaagtaataaactgttgttaggcccgtaccagctatttttttgccccttctttgcataggcaacaaaagcaggagacagccctctgtttttcttttgatacatgctgtgaggaatcttcatgcttattggagttttgcggccttttgtgtcgaaccttgccccttagaccatcaacttaggcagcctttttcttagtatcctactagggcaattgatcccacttgcacacttaaacttttgttgcacctttccttccccagggaacaaaaaggtggagaccggctttaaaagattaggacatgaaaatccccaggtgtcagcatcgcttatgcggtatgcccccatcatttcattaaaattgaaggtttgtgattttaccatgtaaaataccagtttaccactatgtctacgtattccttatatgccattattttagggtcatttcattttcttcctttgattatgcttctctcattgctcccttagccacccaaaaagttataagcacaatactttcgttccatttattgtgatagttccatccatcagccaaattaaccattaattgtta

SEQ ID NO: 41237 - DNA, 353 bp, Zea Mays
aacctgtgcctgcctccgtcgaggacgctatatggcggacaccaaccaactgcaaattaaaagagagaatacttctctaatctctctgtgttagagagcacctcctgttgttggaggatcgggatgcaggacgacgcaaggaccagagaattggggatatgtgtgacgtgattattaatctcacgtggcattatgctttctgctcctcctcctcctctgtggcttcaagttcccaagcatcacaatattcgagcattggaatgggaagtatatataggatcaagattggacctggacaaagatctgcccgcccttagcctgtccgtccaatttccgaaagcctttcgactcag

SEQ ID NO: 41238 - DNA, 2886 bp, Zea Mays
acaagaacgagtgatcactgaccagagctcgctgcaggctgcagctggtggttgttttgcctcctgtagtcctgtccgtcgcatgccatgggggtgccttccttcttcaagtggctcgtgggcaagtaccccaacatcgtcgtcccggccaaggaagacgatggtggcgctggcgccggcgcgtcgtcgccgtcgtcaccgtgggacgaaccagccgccggccctaatggcgtctaccacaacctgtacctggacatgaacgccatcatccacccctgcttccacccggaggacgaggtgtgcccgccgacgacgttcgacgaggtgttcgcggccatgttcgagtacatagatcgcctgttccgcatcgtcaggcctaccaagctgctctacttggcagttgatggtgtagctccccgcgccaaaatgaaccagcagaggtcccgacgcttcaaggccgccaaggaagctaaagacgccgaactggaggagaagcttctgagggagaagttcagagctgaagggagggaggtgcgggcgcggccacgggagacgcatgaggtttcggatcccaacatcatcacgccagggacggagttcatggagaagctctccaaagccctcgagtactacgtccgttcccggctcaacagcgaccccgggtggaaaggcatcaaggtaatactctctgattcaaatgtacctggagaaggtgaacataaggtcatgtctttcatccgaggacaacggagcctggcaagctatgatccaaacacaatgcactgcttgtatggactggatgcggacctaataatgctcgctttggcatctcacgaacttcacttttcaattctgcgtgaggatgggtcacgtcaaagtcagccagaaaaatgcatctctctatccaacgaaatgctcaaaactgaagattcctcaagaaaatgtcgtggatggttcccccaagtaatagaaacaactcccaagaaaccttatcagtttgtgaacatatgggttctgagggagtacctggagcttgatttgaagataccaaaccctgttgtcaaaacagatattgagaggctcatagacgatttcatatttatttgcttcctgacaggaaatgacttcattccacgtattccttcagttgagatacatgagacctgctgttggaagcatacaaacaaacatttaacaagatgggaggctatattgtgagcactgagaagttaaaagacaaacacgctgcatatctcaaagtttcaaggttggagaagttctttcatgaactgtccttatgtgaagagaaaatatttcttaaaagatatgacctacgagagagtttacaacgcaaattcttgcgccaagctgcagaagaatgtaaagaaacaaactatgacactatggaagaaaatactgatggtctaaacttgacagcaaagtctttttctacaaactgtagcatttccacctacagccaagacgagtcagatgtaaaagcaaataccttagagctgaggcgaaacttaaaggatgctcttcgtaacaagcaagaccttataaaaagtggatcctgcaaacatgacatgataagattgggattggcggggtggaaatctcgatactacagagaaaagtttggcgtggaaaaacttagtgaagttgggaaactgaagaatgatatggttcaaagatatatggaaggactttgttgggtgttgcagtactattttacagatgttccatcatggagttggtactacccctactatcatgctccatttgcatctgattttaaaggactatctcagttcaagatatgtttcaccaccgacaagccactaaaaccattcgatcagctcatggcagttcttccaaaagaaagctcatgtgcactgccaaagtgttacagagaactgatggaaaatgaagagtctttggtacaaaaattctatccgtcagatctacagattgatacccatgggaaacgtttcttgtggcaaggtattgcaatgttgccattcattgatgaaaagctgctggtttcggctaccaagacggtggagggcaaacttgcagtgcatgagatcaataggaacgcagttcggcaagagaagatcttcatgaggaactcaaacactactgtgccaaacggttcagcattttcgaaggcatttgactgttcatcgaaaaagctttggttagatccatctaccagtgagcttggagggtggttgtcacctgtcgacgacaaagatacaagctccggtttcttccattcatcggtgatgagagatctaccggacattaggaatgaccagacaatatcattcctgttctcgaacccggaagcggtggaaaccattccaagactgcttgatgatgtcaagaaacctgaaaagactataactgaaactgagatttccaagaggccgctgtggcacacctatccgggttgccgactacctgaaaccaacccaagcgtgctggagccgcagccgatggtcagcagctttggacgtgggagagggagagccaccgctgccgagacgatgctgggcggcggcggccgtggctacgggagaagtttccatggggctgagtcgtcgcaaacgcaaagtcgaggcagcaggaatgacggaaactcttatgcaggaagagggacgtatggtggcgggttccagaggcagcagaccgcttggcgcccagctggggatgcaggcggacgtggtgggagcgagcaacgtcgtggttggtaggcctggcgacagatgacatggaagaactagcgtgtttttttgtcgatacgcggcgttccattttgtctgaaaacatcagtaatgcttatgttaatctctgaaattatccgtggtatctcaaactaga

SEQ ID NO: 41239 - DNA, 2247 bp, Zea Mays
ccaccggcacgctcctcctctttcctgtaggctgcagcaacccgctcccccgctcacaccgaaatttgaaatcctcctcccagtctcgtccttcgaacgaagcaacagccgccgcgccatggagaagatctccgtcgccgtccgcttccgccctcccaacctggtggccgctaacacctccccagccagttccggcggaggcggcgaccgcgagtggcgtatcgatgacacccgcgtttccctcctccaccgcgccgccggccccatcaccggtgcctccttcgccttcgaccacgtcttcgacggtgcggcgaacaacgagcggatctatggcacggtcgtccgggaactcattggcgccgtcgtcggcggattcaacggcaccgccttcgcctacggccagaccagcagcgggaagacattcaccatgaacggctccgacgccgacccgggcatcattccccgcgcggtccgcgacgtcttcgacaccgtgcgccaggctgacgaccgcgagttcctcatccgggtgtcctacatggagatctacaacgaggaaatcaacgacctcttgacacttgaaggccagaagctgaagattcatgagagcttagatcgtggagtgtacgtgtctggtttgcgggaggagatcgtgaacagcgcagagcaagtgtttgagctcctccagcttggagaaggcattttggagagaccaacatgaacatgcggagcagtcggtcacacactattttcagaatggtaattgagagcagtggtaaggaccagacagacggtggagatgctatccgcgtatctgttttgaatttggtggatcttgctgggtcagaaagaatcatcaagacgggggcagaaggggtacgtttgaatgaggggaagtatattaacaagagcttaatgattcttgggaatgtcatcaataagttgagcgagaacggaaaacaaagagggcacattccgtatcgtgatagtaagttgacacgcattctccaacctgcacttggaggcaatgcaaagacatctatcatctgtactgctgctcctgaagagattcacattgaggaaactagaggtactcttcagttcgcaagtagagcaaaatgtgtaagcaattgtgcccaagtaaatgagattctaactgatgctgctttgctgaagaggcaaaaactggaaattgaagaacttcgtaaaaaactgcagggttcccattctgaagggttggagcaggttgtactaaaactacggaacgacatgcacaagtctgaacttgagcgtgatcgattggccatggaacttgaagacgaaagaaagttacggatgactctagagcaacatttgactgagcaacagaagctagaggccatatcgtcagaccactttacagattcaatccagctggatcttctgaaaactccagattcgaagtctgtaccagatggctttgttgcctgtcgctcacgttactcacaagatgttgagttcagcccaatacctgaaaatttggataatattgctgaagaagatctatggacacgtctgaacaaaggctgtgttaccgatcttgatatgcttgagatgacacctaatctcaaacgcgagtcatcctttctacaagaaaaatcatcagctgcgccattggaggaacctaccaacgccatatgccagaggttagcaaaggagtgcatctatgatcagcaacagcttgaggaatcaaaggcgagatgcgccaatctcgagaaagattgcgacgtgctgagggacgagaacttgtccctgcaacaggagctctccgagtccaagctagaggcggacagcctcgtagccgagaagcaggcacagctggatgatttgaggatgaggtgcgtggccctcgagagggatctctccagctccaggcaggaggcccaccgccttgccaccgagaagcaggagctggccgggcagctgggcacagagaggcagaagatggatgagctgaagcaggatatccgggtgatctgcggcgacttgctccagcgggaagggcagctcacgtcgatttacaccaagtccaaggccatcatagagagctgcaaggcctcccaggtagctactctgctttgatggtttcaatgaccgctgttggcttgtgcattttttatacataaaaacagaaggacagcatttttatgttgagattatatccttcgttggcgttgcaattataatttcatcctcagttttttttaactc

SEQ ID NO: 41240 - DNA, 2304 bp, Zea Mays
ccaccggcacgctcctcctctttcctgtaggctgcagcaacccgctcccccgctcacaccgaaatttgaaatcctcctcccagtctcgtccttcgaacgaagcaacagccgccgcgccatggagaagatctccgtcgccgtccgcttccgccctcccaacctggtggccgctaacacctccccagccagttccggcggaggcggcgaccgcgagtggcgtatcgatgacacccgcgtttccctcctccaccgcgccgccggccccatcaccggtgcctccttcgccttcgaccacgtcttcgacggtgcggcgaacaacgagcggatctatggcacggtcgtccgggaactcattggcgccgtcgtcggcggattcaacggcaccgccttcgcctacggccagaccagcagcgggaagacattcaccatgaacggctccgacgccgacccgggcatcattccccgcgcggtccgcgacgtcttcgacaccgtgcgccaggctgacgaccgcgagttcctcatccgggtgtcctacatggagatctacaacgaggaaatcaacgacctcttgacacttgaaggccagaagctgaagattcatgagagcttagatcgtggagtgtacgtgtctggtttgcgggaggagatcgtgaacagcgcagagcaagtgtttgagctcctccagcttggagaagcgaacaggcattttggagagaccaacatgaacatgcggagcagtcggtcacacactattttcagaatggtaattgagagcagtggtaaggaccagacagacggtggagatgctatccgcgtatctgttttgaatttggtggatcttgctgggtcagaaagaatcatcaagacgggggcagaaggggtacgtttgaatgaggggaagtatattaacaagagcttaatgattcttgggaatgtcatcaataagttgagcgagaacggaaaacaaagctcaagttttaggatgattttgttagtatattaaactcaaatccattatccaaagtacaagtgggatctctcagaagggcaggattgatgcagtggtgagagatgtctcacgaagtcaccagagggcacattccgtatcgtgatagtaagttgacacgcattctccaacctgcacttggaggcaatgcaaagacatctatcatctgtactgctgctcctgaagagattcacattgaggaaactagaggtactcttcagttcgcaagtagagcaaaatgtgtaagcaattgtgcccaagtaaatgagattctaactgatgctgctttgctgaagaggcaaaaactggaaattgaagaacttcgtaaaaaactgcagggttcccattctgaagggttggagcaggttgtactaaaactacggaacgacatgcacaagtctgaacttgagcgtgatcgattggccatggaacttgaagacgaaagaaagttacggatgactctagagcaacatttgactgagcaacagaagctagaggccatatcgtcagaccactttacagattcaatccagctggatcttctgaaaactccagattcgaagtctgtaccagatggctttgttgcctgtcgctcacgttactcacaagatgttgagttcagcccaatacctgaaaatttggataatattgctgaagaagatctatggacacgtctgaacaaaggctgtgttaccgatcttgatatgcttgagatgacacctaatctcaaacgcgagtcatcctttctacaagaaaaatcatcagctgcgccattggaggaacctaccaacgccatatgccagaggttagcaaaggagtgcatctatgatcagcaacagcttgaggaatcaaaggcgagatgcgccaatctcgagaaagattgcgacgtgctgagggacgagaacttgtccctgcaacaggagctctccgagtccaagctagaggcggacagcctcgtagccgagaagcaggcacagctggatgatttgaggatgaggtgcgtggccctcgagagggatctctccagctccaggcaggaggcccaccgccttgccaccgagaagcaggagctggccgggcagctgggcacagagaggcagaagatggatgagctgaagcaggatatccgggtgatctgcggcgacttgctccagcgggaagggcagctcacgtcgatttacaccaagtccaaggccatcatagagagctgcaaggcctcccaggggtcagaccgatgacgccgagtcgccgccgaagatgctgccagaggcggcggatgcttgaccgctggcgacgac

SEQ ID NO: 41241 - DNA, 2182 bp, Zea Mays
ccaccggcacgctcctcctctttcctgtaggctgcagcaacccgctcccccgctcacaccgaaatttgaaatcctcctcccagtctcgtccttcgaacgaagcaacagccgccgcgccatggagaagatctccgtcgccgtccgcttccgccctcccaacctggtggccgctaacacctccccagccagttccggcggaggcggcgaccgcgagtggcgtatcgatgacacccgcgtttccctcctccaccgcgccgccggccccatcaccggtgcctccttcgccttcgaccacgtcttcgacggtgcggcgaacaacgagcggatctatggcacggtcgtccgggaactcattggcgccgtcgtcggcggattcaacggcaccgccttcgcctacggccagaccagcagcgggaagacattcaccatgaacggctccgacgccgacccgggcatcattccccgcgcggtccgcgacgtcttcgacaccgtgcgccaggctgacgaccgcgagttcctcatccgggtgtcctacatggagatctacaacgaggaaatcaacgacctcttgacacttgaaggccagaagctgaagattcatgagagcttagatcgtggagtgtacgtgtctggtttgcgggaggagatcgtgaacagcgcagagcaagtgtttgagctcctccagcttggagaagcgaacaggcattttggagagaccaacatgaacatgcggagcagtcggtcacacactattttcagaatggtaattgagagcagtggtaaggaccagacagacggtggagatgctatccgcgtatctgttttgaatttggtggatcttgctgggtcagaaagaatcatcaagacgggggcagaaggggtacgtttgaatgaggggaagtatattaacaagagcttaatgattcttgggaatgtcatcaataagttgagcgagaacggaaaacaaagagggcacattccgtatcgtgatagtaagttgacacgcattctccaacctgcacttggaggcaatgcaaagacatctatcatctgtactgctgctcctgaagagattcacattgaggaaactagaggtactcttcagttcgcaagtagagcaaaatgtgtaagcaattgtgcccaagtaaatgagattctaactgatgctgctttgctgaagaggcaaaaactggaaattgaagaacttcgtaaaaaactgcagggttcccattctgaagggttggagcaggttgtactaaaactacggaacgacatgcacaagtctgaacttgagcgtgatcgattggccatggaacttgaagacgaaagaaagttacggatgactctagagcaacatttgactgagcaacagaagctagaggccatatcgtcagaccactttacagattcaatccagctggatcttctgaaaactccagattcgaagtctgtaccagatggctttgttgcctgtcgctcacgttactcacaagatgttgagttcagcccaatacctgaaaatttggataatattgctgaagaagatctatggacacgtctgaacaaaggctgtgttaccgatcttgatatgcttgagatgacacctaatctcaaacgcgagtcatcctttctacaagaaaaatcatcagctgcgccattggaggaacctaccaacgccatatgccagaggttagcaaaggagtgcatctatgatcagcaacagcttgaggaatcaaaggcgagatgcgccaatctcgagaaagattgcgacgtgctgagggacgagaacttgtccctgcaacaggagctctccgagtccaagctagaggcggacagcctcgtagccgagaagcaggcacagctggatgatttgaggatgaggtgcgtggccctcgagagggatctctccagctccaggcaggaggcccaccgccttgccaccgagaagcaggagctggccgggcagctgggcacagagaggcagaagatggatgagctgaagcaggatatccgggtgatctgcggcgacttgctccagcgggaagggcagctcacgtcgatttacaccaagtccaaggccatcatagagagctgcaaggcctcccaggggtcagaccgatgacgccgagtcgccgccgaagatgctgccagaggcggcggatgcttgaccgctggcgacgac

SEQ ID NO: 41242 - DNA, 1241 bp, Zea Mays
ttgttctgttttctaaaacaaactctagagggcacattccgtatcgtgatagtaagttgacacgcattctccaacctgcacttggaggcaatgcaaagacatctatcatctgtactgctgctcctgaagagattcacattgaggaaactagaggtactcttcagttcgcaagtagagcaaaatgtgtaagcaattgtgcccaagtaaatgagattctaactgatgctgctttgctgaagaggcaaaaactggaaattgaagaacttcgtaaaaaactgcagggttcccattctgaagggttggagcaggttgtactaaaactacggaacgacatgcacaagtctgaacttgagcgtgatcgattggccatggaacttgaagacgaaagaaagttacggatgactctagagcaacatttgactgagcaacagaagctagaggccatatcgtcagaccactttacagattcaatccagctggatcttctgaaaactccagattcgaagtctgtaccagatggctttgttgcctgtcgctcacgttactcacaagatgttgagttcagcccaatacctgaaaatttggataatattgctgaagaagatctatggacacgtctgaacaaaggctgtgttaccgatcttgatatgcttgagatgacacctaatctcaaacgcgagtcatcctttctacaagaaaaatcatcagctgcgccattggaggaacctaccaacgccatatgccagaggttagcaaaggagtgcatctatgatcagcaacagcttgaggaatcaaaggcgagatgcgccaatctcgagaaagattgcgacgtgctgagggacgagaacttgtccctgcaacaggagctctccgagtccaagctagaggcggacagcctcgtagccgagaagcaggcacagctggatgatttgaggatgaggtgcgtggccctcgagagggatctctccagctccaggcaggaggcccaccgccttgccaccgagaagcaggagctggccgggcagctgggcacagagaggcagaagatggatgagctgaagcaggatatccgggtgatctgcggcgacttgctccagcgggaagggcagctcacgtcgatttacaccaagtccaaggccatcatagagagctgcaaggcctcccaggggtcagaccgatgacgccgagtcgccgccgaagatgctgccagaggcggcggatgcttgaccgctggcgacgac

SEQ ID NO: 41243 - DNA, 1937 bp, Zea Mays
taaatatggagatggcctaacagccttacgtaaacagtccagtccgtttcctttcggccttaacacagctatttcgggccgagaaaacccatgtagagcccggcccactttaccgccactgcttgatgtgacgcggtgagaacacgggcgcctcgggacggacgatgccgtcgcgtcgcgatggtgcgctgcgcgcctctactcctccgtggcttcgtgcgttcaatttgcttgtggaacgtggaagaagagcgagaacgccaaacgagaaaagaaacccaagccttcgccatcaaaaaaaaaagaaaaaaagaaaaaaaagagcagaaaaagtagagtagactacgacagcgtccggcgaggaggcggaggcgaagatgaggaagaagctcggcacccggttccccgcggctcgaatcaaaaagataatgcaagcagatgaggatgttggaaagattgcactagcagttcctgttttagtttcgaggtctcttgaattgtttttacaagatttaattgaccgtacttatgaaattactcttcaaagtggagcaaagacactgaattccttccacctgtgagttcaatatcagctgacattttgttttttttttcataaaataaaaaggtgatgtgatgtatcttttaaaataaatggatctctttgatgaatttcagctgtgactttatttagcatttgtagtgagggtaatctagatgcttacaatttgcaattgctatgattcgacgtttgaactttggtgtacaatatcccccctgcccaaaataggattttatccaggattcatcttatttgtgttgcttatgccatcaaaataagttggtggataagctgtactgaaacagaattcattaattataggtcatgcttcatataattactacacattcaattgccttttggttgtagattctttggtataaggtttactggttaaaagttgttatctaagttaacatccataatatctgtaggtgggattcatacctggttggtccctgactatgtccagctaatttgtactatataagtaaataaggcagctcactggccaggcagcccgaaatcagaagcctgggaacgctgcctgagcgaggcagcttctgtcatgagccaaccaaacagccccttaattcgaaaatggaagcaggaagcaatgtgtgaagaggtacagttcttttgatttcctaactgaagttgtcagcaaggtaccagatcttggtggcgctgattcctgtggagatgaaagaggattacctagaagaagaaagtcaaatggcagtgacccagagaatgatgaatcaagatctagtaaaatggccataagaaatgcaaacatcagccccagaggacgtgggaggggtcgaggcagaggacgaggtcggccaccaaccaagagaaaggaggagaggaaacagttcaagagatcaatggcaacgagaccatgcctcaaagcacgcaacctccagtagaggctccgccaacagcccttgcacaagctacaacaagttctaaggcggaagaagcgaacagtgatcatcagtcagattggcctatgccagatgccattggaagcatcggtgtcgtgccatctggttttggacatctgacagtgcaggttgaagatgaggactacgacaatgaggattagtcagggtcatcttctcattgtatgcactaacaggactgttctggtgttgtaaaatgtaaatatagtttgaaatagttgccgcagtttacctgtgattgtctgtcgttttatgcggttatgtagtcctgtgtaactttcgttctccaataattgcttggtagttgcttttttacatgattcaagtgttttgtgacatttaacacagtatttgagcagggattgcctattttaagtatttttgtcttatttcaccgcagtctttga

SEQ ID NO: 41244 - DNA, 2179 bp, Zea Mays
ctcgggacggacgatgccgtcgcgtcgcgatggtgcgctgcgcgcctctactcctccgtggcttcgtgcgttcaatttgcttgtggaacgtggaagaagagcgagaacgccaaacgagaaaagaaacccaagccttcgccatcaaaaaaaaaagaaaaaaagaaaaaaaagagcagaaaaagtagagtagactacgacagcgtccggcgaggaggcggaggcgaagatgaggaagaagctcggcacccggttccccgcggctcgaatcaaaaagataatgcaagcagatgaggatgttggaaagattgcactagcagttcctgttttagtttcgaggtctcttgaattgtttttacaagatttaattgaccgtacttatgaaattactcttcaaagtggagcaaagacactgaattccttccacctgtgagttcaatatcagctgacattttgttttttttttcataaaataaaaaggtgatgtgatgtatcttttaaaataaatggatctctttgatgaatttcagctgtgactttatttagcatttgtagtgagggtaatctagatgcttacaatttgcaattgctatgattcgacgtttgaactttggtgtacaatatcccccctgcccaaaataggattttatccaggattcatcttatttgtgttgcttatgccatcaaaataagttggtggataagctgtactgaaacagaattcattaattataggtcatgcttcatataattactacacattcaattgccttttggttgtagattctttggtataaggtttactggttaaaagttgttatctaagttaacatccataatatctgtaggtgggattcatacctggttggtccctgactatgtccagctaatttgtactatataagtaaataaggcagctcactggccaggcagcccgaaatcagaagcctgggaacgctgcctgagcgaggcagcttctgtcatgagccaaccaaacagccccttaattcgaaaatggaagcaggttggttttagtaaccaatttggaagttgatatttttctttccactgtaagcgacttcagtgtagtttatggaagttgagctcatggacatttctagagaagatatttgtagaggttatgttatatatccttgaaactgaaactggtcagatagttgtcccatcctgctcatgtagatctagcatacgagcttgtctaatttatttggaattaagtttcatatttaaatgtgagttgtattgaggttaatttcgatggaccatgtttttttcttgttaaggcacttagctgatagtttcaatgcatgcgtcttggtattgtttgcatggcatatcagttttgagccattcatattaacattcatatgtctatcttctgacatctgacgttcaggaagcaatgtgtgaagaggtacagttcttttgatttcctaactgaagttgtcagcaaggtaccagatcttggtggcgctgattcctgtggagatgaaagaggattacctagaagaagaaagtcaaatggcagtgacccagagaatgatgaatcaagatctagtaaaatggccataagaaatgcaaacatcagccccagaggacgtgggaggggtcgaggcagaggacgaggtcggccaccaaccaagagaaaggaggagaggaaacagttcaagagatcaatggcaacgagaccatgcctcaaagcacgcaacctccagtagaggctccgccaacagcccttgcacaagctacaacaagttctaaggcggaagaagcgaacagtgatcatcagtcagattggcctatgccagatgccattggaagcatcggtgtcgtgccatctggttttggacatctgacagtgcaggttgaagatgaggactacgacaatgaggattagtcagggtcatcttctcattgtatgcactaacaggactgttctggtgttgtaaaatgtaaatatagtttgaaatagttgccgcagtttacctgtgattgtctgtcgttttatgcggttatgtagtcctgtgtaactttcgttctccaataattgcttggtagttgcttttttacatgattcaagtgttttgtgacatttaacacagtatttgagcagggattgcctattttaagtatttttgtcttatttcaccgcagtctttga

SEQ ID NO: 41245 - DNA, 1706 bp, Zea Mays
tccgtggcttcgtgcgttcaatttgcttgtggaacgtggaagaagagcgagaacgccaaacgagaaaagaaacccaagccttcgccatcaaaaaaaaaagaaaaaaagaaaaaaaagagcagaaaaagtagagtagactacgacagcgtccggcgaggaggcggaggcgaagatgaggaagaagctcggcacccggttccccgcggctcgaatcaaaaagataatgcaagcagatgaggatgttggaaagattgcactagcagttcctgttttagtttcgaggtctcttgaattgtttttacaagatttaattgaccgtacttatgaaattactcttcaaagtggagcaaagacactgaattccttccacctgtgggattcatacctggttggtccctgactatgtccagctaatttgtactatataagtaaataaggcagctcactggccaggcagcccgaaatcagaagcctgggaacgctgcctgagcgaggcagcttctgtcatgagccaaccaaacagccccttaattcgaaaatggaagcaggttggttttagtaaccaatttggaagttgatatttttctttccactgtaagcgacttcagtgtagtttatggaagttgagctcatggacatttctagagaagatatttgtagaggttatgttatatatccttgaaactgaaactggtcagatagttgtcccatcctgctcatgtagatctagcatacgagcttgtctaatttatttggaattaagtttcatatttaaatgtgagttgtattgaggttaatttcgatggaccatgtttttttcttgttaaggcacttagctgatagtttcaatgcatgcgtcttggtattgtttgcatggcatatcagttttgagccattcatattaacattcatatgtctatcttctgacatctgacgttcaggaagcaatgtgtgaagaggtacagttcttttgatttcctaactgaagttgtcagcaaggtaccagatcttggtggcgctgattcctgtggagatgaaagaggattacctagaagaagaaagtcaaatggcagtgacccagagaatgatgaatcaagatctagtaaaatggccataagaaatgcaaacatcagccccagaggacgtgggaggggtcgaggcagaggacgaggtcggccaccaaccaagagaaaggaggagaggaaacagttcaagagatcaatggcaacgagaccatgcctcaaagcacgcaacctccagtagaggctccgccaacagcccttgcacaagctacaacaagttctaaggcggaagaagcgaacagtgatcatcagtcagattggcctatgccagatgccattggaagcatcggtgtcgtgccatctggttttggacatctgacagtgcaggttgaagatgaggactacgacaatgaggattagtcagggtcatcttctcattgtatgcactaacaggactgttctggtgttgtaaaatgtaaatatagtttgaaatagttgccgcagtttacctgtgattgtctgtcgttttatgcggttatgtagtcctgtgtaactttcgttctccaataattgcttggtagttgcttttttacatgattcaagtgttttgtgacatttaacacagtatttgagcagggattgcctattttaagtatttttgtcttatttcaccgcagtctttga

SEQ ID NO: 41246 - DNA, 1064 bp, Zea Mays
tccgtggcttcgtgcgttcaatttgcttgtggaacgtggaagaagagcgagaacgccaaacgagaaaagaaacccaagccttcgccatcaaaaaaaaaagaaaaaaagaaaaaaaagagcagaaaaagtagagtagactacgacagcgtccggcgaggaggcggaggcgaagatgaggaagaagctcggcacccggttccccgcgcgaggtctcttgaattgtttttacaagatttaattgaccgtacttatgaaattactcttcaaagtggagcaaagacactgaattccttccacctgaagcaatgtgtgaagaggtacagttcttttgatttcctaactgaagttgtcagcaaggtaccagatcttggtggcgctgattcctgtggagatgaaagaggattacctagaagaagaaagtcaaatggcagtgacccagagaatgatgaatcaagatctagtaaaatggccataagaaatgcaaacatcagccccagaggacgtgggaggggtcgaggcagaggacgaggtcggccaccaaccaagagaaaggaggagaggaaacagttcaagagatcaatggcaacgagaccatgcctcaaagcacgcaacctccagtagaggctccgccaacagcccttgcacaagctacaacaagttctaaggcggaagaagcgaacagtgatcatcagtcagattggcctatgccagatgccattggaagcatcggtgtcgtgccatctggttttggacatctgacagtgcaggttgaagatgaggactacgacaatgaggattagtcagggtcatcttctcattgtatgcactaacaggactgttctggtgttgtaaaatgtaaatatagtttgaaatagttgccgcagtttacctgtgattgtctgtcgttttatgcggttatgtagtcctgtgtaactttcgttctccaataattgcttggtagttgcttttttacatgattcaagtgttttgtgacatttaacacagtatttgagcagggattgcctattttaagtatttttgtcttatttcaccgcagtctttga

SEQ ID NO: 41247 - DNA, 1047 bp, Zea Mays
ctcggactcagatcggctcctgtgctcgcccgcgcgcgcgcgcgtgcggaagctcgaatcaaaaagataatgcaagcagatgaggatgttggaaagattgcactagcagttcctgttttagtttcgaggtctcttgaattgtttttacaagatttaattgaccgtacttatgaaattactcttcaaagtggagcaaagacactgaattccttccacctgaagcaatgtgtgaagaggtacagttcttttgatttcctaactgaagttgtcagcaaggtaccagatcttggtggcgctgattcctgtggagatgaaagaggattacctagaagaagaaagtcaaatggcagtgacccagagaatgatgaatcaagatctagtaaaatggccataagaaatgcaaacatcagccccagaggacgtgggaggggtcgaggcagaggacgaggtcggccaccaaccaagagaaaggaggttggttatgtacaatttgaagatgagagcagcatgtttgctgaacaaggtgagcccttgccaggagaggaaacagttcaagagatcaatggcaacgagaccatgcctcaaagcacgcaacctccagtagaggctccgccaacagcccttgcacaagctacaacaagttctaaggcggaagaagcgaacagtgatcatcagtcagattggcctatgccagatgccattggaagcatcggtgtcgtgccatctggttttggacatctgacagtgcaggttgaagatgaggactacgacaatgaggattagtcagggtcatcttctcattgtatgcactaacaggactgttctggtgttgtaaaatgtaaatatagtttgaaatagttgccgcagtttacctgtgattgtctgtcgttttatgcggttatgtagtcctgtgtaactttcgttctccaataattgcttggtagttgcttttttacatgattcaagtgttttgtgacatttaacacagtatttgagcagggattgcctattttaagtatttttgtcttatttcaccgcagtctttga

SEQ ID NO: 41248 - DNA, 1733 bp, Zea Mays
ggtctccagatcatgtcagcaattcagcatatatcgcaggctcgaatcaaaaagataatgcaagcagatgaggatgttggaaagattgcactagcagttcctgttttagtttcgaggtctcttgaattgtttttacaagatttaattgaccgtacttatgaaattactcttcaaagtggagcaaagacactgaattccttccacctgtgggattcatacctggttggtccctgactatgtccagctaatttgtactatataagtaaataaggtacttgagctagagccatctaatgtttttgcatcacctctggaggaagtgatgaacagatcgcttttttggcacaagtctcaacttgaaaataatcttttggggcatgtttggttcgataccttccaggcagctcactggccaggcagcccgaaatcagaagcctgggaacgctgcctgagcgaggcagcttctgtcatgagccaaccaaacagccccttaattcgaaaatggaagcaggttggttttagtaaccaatttggaagttgatatttttctttccactgtaagcgacttcagtgtagtttatggaagttgagctcatggacatttctagagaagatatttgtagaggttatgttatatatccttgaaactgaaactggtcagatagttgtcccatcctgctcatgtagatctagcatacgagcttgtctaatttatttggaattaagtttcatatttaaatgtgagttgtattgaggttaatttcgatggaccatgtttttttcttgttaaggcacttagctgatagtttcaatgcatgcgtcttggtattgtttgcatggcatatcagttttgagccattcatattaacattcatatgtctatcttctgacatctgacgttcaggaagcaatgtgtgaagaggtacagttcttttgatttcctaactgaagttgtcagcaaggtaccagatcttggtggcgctgattcctgtggagatgaaagaggattacctagaagaagaaagtcaaatggcagtgacccagagaatgatgaatcaagatctagtaaaatggccataagaaatgcaaacatcagccccagaggacgtgggaggggtcgaggcagaggacgaggtcggccaccaaccaagagaaaggaggttggttatgtacaatttgaagatgagagcagcatgtttgctgaacaaggtgagcccttgccaggagaggaaacagttcaagagatcaatggcaacgagaccatgcctcaaagcacgcaacctccagtagaggctccgccaacagcccttgcacaagctacaacaagttctaaggcggaagaagcgaacagtgatcatcagtcagattggcctatgccagatgccattggaagcatcggtgtcgtgccatctggttttggacatctgacagtgcaggttgaagatgaggactacgacaatgaggattagtcagggtcatcttctcattgtatgcactaacaggactgttctggtgttgtaaaatgtaaatatagtttgaaatagttgccgcagtttacctgtgattgtctgtcgttttatgcggttatgtagtcctgtgtaactttcgttctccaataattgcttggtagttgcttttttacatgattcaagtgttttgtgacatttaacacagtatttgagcagggattgcctattttaagtatttttgtcttatttcaccgcagtctttga

SEQ ID NO: 41249 - DNA, 1050 bp, Zea Mays
gtagcgctcaagcagggctgtttgcggatcacagtatttgttttatgccttcaggctcgaatcaaaaagataatgcaagcagatgaggatgttggaaagattgcactagcagttcctgttttagtttcgaggtctcttgaattgtttttacaagatttaattgaccgtacttatgaaattactcttcaaagtggagcaaagacactgaattccttccacctgaagcaatgtgtgaagaggtacagttcttttgatttcctaactgaagttgtcagcaaggtaccagatcttggtggcgctgattcctgtggagatgaaagaggattacctagaagaagaaagtcaaatggcagtgacccagagaatgatgaatcaagatctagtaaaatggccataagaaatgcaaacatcagccccagaggacgtgggaggggtcgaggcagaggacgaggtcggccaccaaccaagagaaaggaggttggttatgtacaatttgaagatgagagcagcatgtttgctgaacaaggtgagcccttgccaggagaggaaacagttcaagagatcaatggcaacgagaccatgcctcaaagcacgcaacctccagtagaggctccgccaacagcccttgcacaagctacaacaagttctaaggcggaagaagcgaacagtgatcatcagtcagattggcctatgccagatgccattggaagcatcggtgtcgtgccatctggttttggacatctgacagtgcaggttgaagatgaggactacgacaatgaggattagtcagggtcatcttctcattgtatgcactaacaggactgttctggtgttgtaaaatgtaaatatagtttgaaatagttgccgcagtttacctgtgattgtctgtcgttttatgcggttatgtagtcctgtgtaactttcgttctccaataattgcttggtagttgcttttttacatgattcaagtgttttgtgacatttaacacagtatttgagcagggattgcctattttaagtatttttgtcttatttcaccgcagtctttga

SEQ ID NO: 41250 - DNA, 696 bp, Zea Mays
atatgcatccgccgtgagcctcctccagtcctcctcttccttaccccaatctcgcctcaaatccaatcccattcccacctcacagtctagcttgcctcgcatactcctcatctcttctcctagccttaggtcgatgtttgcctaggcttccaccacggatttggcccccaaccgtgttcccttgttcgcttgctattgtctcaatcattgatacttgttcccccaaaaccctgggctccagtcaatcgttgcgtccctcacacggtgatcgaggcatcactgatgatggcaaggatgatgcggtggccacagccaatgacagcgcgcaagtcccccgtgcgactggtggtgcggcatgcgggggtgctcttgctgccttcgccttcacctagcaaccagagatgacttcgaccttccctcgttggcaagtgtctcgaaccgttgccgtgactctccgccaccaagcgcctctgcaactagcggggcaaaggacaaccgagggagaggatggtggagtagccgatggagaggaggaggaggcgcttcggatgaggactttagttttgtattggttctatgactctctgccatgtacctctgcaggtagcggggcaagagcaaccaagagagaggaggcgccgtcgctagcgatgcgtggttaaacagccgaggagagtttctgttgtttgatttgat

SEQ ID NO: 41251 - DNA, 3738 bp, Zea Mays
tccttaaaaatattactcctctaaccgaacggggctgaaaaaaaaaaattctaacattccgccactcgtccgtgcgcgactgcgtgccactcggcccaatcccctccgtccggccgtcccctgcctccctcccggccgcttccaaatccacccgccatccgttccgccgtcgccgcgatggacgccgcggaggcctcggaggtgcaggcgcggctggccgcggccgtgcacgcgctcaaccacgacgcgcgtcccgaggcgcgcctcgccgctaaccaatggctcctcgcgctgcagcggtccccgcaggcgtgggcagtcgccacctccctcctggccaccccagacccgctcccgcccgccgatctcctcttcttcgccgcgcagatgctccgccggaagatccagtctccgggccccgcgctcctcgggctcggcctggcgtcgcagctcctcgatgcgctgctcctggccgcgcggcggttctgcgccgccccggcaccgcgccagctgctcacgcagatctgcctggcgctcgccgcgttggcgctccgcgccgagggcggcgtcgacggcctcttcgcgcgtatgccgcacctgccgccccccgccgtgctggagctgctcaccgtgctccccgaggaggctgcgcaggaccagggcggcgacacgggggttgacgccgccgcgcggtgccggtttacgcgcgagctgctcgcgcacgcgccatcggtgcttgagttcctccaccggcaatccgagaaggcacccgccgatgacgacggggttcccctcgacgagcgcaaccgcagaatcctccggtgcctactgagctgggtccgcgtgaggtgcttctcagagacgccggcagcctcgcttgccaggcacccacttctcacttttgcgttcaactcgctgcaggtgtccttctcgtttgaggtggccatagaggttatgactgagcttgtcagccagcaccaagaattacctgaggcctttctgagtaagacaccttatataagggaggctcttcttctaccagctttagccaacagaaatgagaaaattattgctggtcttgcctgtttgatgtgtgaagttggccaggcggcacctgctttggttgcagaagggggtagccaagcacttgctctcaccgatggacttttgaggtgtagtttggcacatttcattcttggtattgatgtgaagtcagccaaaagaaatgtggtacaagagttgtttgtgcctgtgttttcttcgctgctggatgctcttttatttcgtgctcagatggacactgatgagcatggttctgatggagcaccttgtatacctgagagactaacacagttcaggatgaatttggaggagctcctcgttgatatttgtttgcttctgggtgcccctgcatatataaacaggctcttttctggtggatgggacttttcaagccaaacaattccttggaaggaggtagaagttagaatgtatgcactcagcatggttgctgacacgattttacaagatgaaggctcctttgatttttcaatcataatgcattttgtgaacattttgtccagtagaacacctgttgaactgaatggaaatttgtttttggtgtataaatcgttcggtgatgtcgttggctcgtactcaaagtggttatcgtcttctcaatgtaacattaagcccttactcctattttgcgcgtcaggaatttcaaaatccgtatcatcaaatgcttgctccttagcattgcgcaaactttgtgaggatgctccttcattcatccatgaaccacagaaccttgaaattcttttctggattggtgagggcatgaataaagggaacctgcagctagaggatgaggaagagataattagtgcaatcacacatgctttaagttctataagtgaaaaagagttgaagaaaagttcactggccaggttactttgttccagttactctgcagtggaaaagattattgacattgatagagatcaattgctaaggcaaaatccagctgcttatacgcaatcattggatcttgctgtccgtggtctctacaggatgagtgctttgtttcatcatttggcaacatcagtcacatctggtctggtcgatgatgatataattatagttcttcttggaatattctggccacttcttgaaagtcttttccgatcatctcatatggagaatgtgcatttatctgcagctatatgccgttctctttcttctgctatacattcttgcggacaccactttcatattttattacctaaagttatggagtgcttatctgcaaatttcttgctatttcaaaggcacgactgcttcttgaggacagctgccaatgttattgaagagtttggccacaaagaagaatatggggctttatgtgttaggacttttgaaattcttagctctgcatcttcaatatcagctctgaattcttcttatacctgtgatcaagaacctgacctagttgaagcatatacctactttacatctatgtttattcgctgctgtccaaaggaagccattgtggcatctagctccctgattgagttatcatttcaaaaggcagctatatgctctacagcaatgcaccgaggagctgcacttgcagcaatgtcatatatgtcgtgttttcttgagactgcccttgctgctgtgctagaatctcctgagtgcatccctaacgggtcacctggtgtggccctaatccaaatcttggcacgctgtggtgaaggtctattatctaatgtgctttatgctttacttggtgtatcagccttgtcaagggtccataaatctgccacaatattgcaacaactggcggcattgtgcagtttcagtgagggaacgacatggaaggctatccttagttggaattctctttgtgggtggctacaatcgacggtgaaatctttgccttctgagtatctaaagcaaggggaggctgaaataatagttccatcgtggctcaaggtgcttcaggatgcaggctcagactatcttcacagcaggactggtgataatataagaagccatcaaggttacatgcaagggaagggtggtagaactcttaaacgtataatcagagatttcgcagaaagccaccggaatgttccaatccccagtcctacatgatatggatgtgtcacgagtcttgcactctttactgatttgaggatgtccagtccctccagtagcttggagtctgactctagagagggggtccttgtggaactgatgtccgtcccgtctctgctggcatgctacatgttggttccatctatagttcagcaagaggaagaggctatttgattgttccggacatctggttcggacttggagagtcttctctgtatagcaaggaagtcgcaccattgttctgctgactaattgggggttgaatgcaaagtctgaagccgcatgtcatggttcgagatccaattttgttttgatagacatactgtgaaattcattgtgccggtaagctatatgaagacaaaatggggggatggaatgcaacctgtacataccattctttgctggttggggcaggcgatgtacgaacattcatatgcagcagtgttactgctcgaatctggagttaaacatgggcagtaatgctaggcatttatcaaacttctatcatgtcagtcgaaactttgaacaagtgtacataatcaaatatattatcagatatcataattttatggcatg

SEQ ID NO: 41252 - DNA, 1821 bp, Zea Mays
aatcccctccgtccggccgtcccctgcctccctcccggccgcttccaaatccacccgccatccgttccgccgtcgccgcgatggacgccgcggaggcctcggaggtgcaggcgcggctggccgcggccgtgcacgcgctcaaccacgacgcgcgtcccgaggcgcgcctcgccgctaaccaatggctcctcgcgctgcagcggtccccgcaggcgtgggcagtcgccacctccctcctggccaccccagacccgctcccgcccgccgatctcctcttcttcgccgcgcagatgctccgccggaagatccagtctccgggccccgcgctcctcgggctcggcctggcgtcgcagctcctcgatgcgctgctcctggccgcgcggcggttctgcgccgccccggcaccgcgccagctgctcacgcagatctgcctggcgctcgccgcgttggcgctccgcgccgagggcggcgtcgacggcctcttcgcgcgtatgccgcacctgccgccccccgccgtgctggagctgctcaccgtgctccccgaggaggctgcgcaggaccagggcggcgacacgggggttgacgccgccgcgcggtgccggtttacgcgcgagctgctcgcgcacgcgccatcggtgcttgagttcctccaccggcaatccgagaaggcacccgccgatgacgacggggttcccctcgacgagcgcaaccgcagaatcctccggtgcctactgagctgggtccgcgtgaggtgcttctcagagacgccggcagcctcgcttgccaggcacccacttctcacttttgcgttcaactcgctgcaggtgtccttctcgtttgaggtggccatagaggttatgactgagcttgtcagccagcaccaagaattacctgaggcctttctgagtaagacaccttatataagggaggctcttcttctaccagctttagccaacagaaatgagaaaattattgctggtcttgcctgtttgatgtgtgaagttggccaggcggcacctgctttggttgcagaagggggtagccaagcacttgctctcaccgatggacttttgagatgtgtagcttttaccagtgaagattgggaaattgcagagtcaaccctgcaattttggtgtagtttggcacatttcattcttggtattgatgtgaagtcagccaaaagaaatgtggtacaagagttgtttgtgcctgtgttttcttcgctgctggatgctcttttatttcgtgctcagatggacactgatgagcatggttctgatggagcaccttgtatacctgagagactaacacagttcaggatgaatttggaggagctcctcgttgatatttgtttgcttctgggtgcccctgcatatataaacaggctcttttctggtggatgggacttttcaagccaaacaattccttggaaggaggtagaagttagaatgtatgcactcagcatggttgctgacacgattttacaagatgaaggctcctttgatttttcaatcataatgcattttgtgaacattttgtccagtagaacacctgttgaactgaatggaaatttgtttttggtgtataaatcgttcggtgatgtcgttggctcgtactcaaagtggttatcgtcttctcaatgtaacattaagcccttactcctattttgcgcgtcaggaatttcaaaatccgtatcatcaaatgcttgctccttagcattgcgcaaactttgtgaggatgctccttcattcatccatgaaccacagaaccttgaaattcttttctggattggtgagtatttaaaatacagtgttcttacag

SEQ ID NO: 41253 - DNA, 3698 bp, Zea Mays
aatcccctccgtccggccgtcccctgcctccctcccggccgcttccaaatccacccgccatccgttccgccgtcgccgcgatggacgccgcggaggcctcggaggtgcaggcgcggctggccgcggccgtgcacgcgctcaaccacgacgcgcgtcccgaggcgcgcctcgccgctaaccaatggctcctcgcgctgcagcggtccccgcaggcgtgggcagtcgccacctccctcctggccaccccagacccgctcccgcccgccgatctcctcttcttcgccgcgcagatgctccgccggaagatccagtctccgggccccgcgctcctcgggctcggcctggcgtcgcagctcctcgatgcgctgctcctggccgcgcggcggttctgcgccgccccggcaccgcgccagctgctcacgcagatctgcctggcgctcgccgcgttggcgctccgcgccgagggcggcgtcgacggcctcttcgcgcgtatgccgcacctgccgccccccgccgtgctggagctgctcaccgtgctccccgaggaggctgcgcaggaccagggcggcgacacgggggttgacgccgccgcgcggtgccggtttacgcgcgagctgctcgcgcacgcgccatcggtgcttgagttcctccaccggcaatccgagaaggcacccgccgatgacgacggggttcccctcgacgagcgcaaccgcagaatcctccggtgcctactgagctgggtccgcgtgaggtgcttctcagagacgccggcagcctcgcttgccaggcacccacttctcacttttgcgttcaactcgctgcaggtgtccttctcgtttgaggtggccatagaggttatgactgagcttgtcagccagcaccaagaattacctgaggcctttctgagtaagacaccttatataagggaggctcttcttctaccagctttagccaacagaaatgagaaaattattgctggtcttgcctgtttgatgtgtgaagttggccaggcggcacctgctttggttgcagaagggggtagccaagcacttgctctcaccgatggacttttgagatgtgtagcttttaccagtgaagattgggaaattgcagagtcaaccctgcaattttggtgtagtttggcacatttcattcttggtattgatgtgaagtcagccaaaagaaatgtggtacaagagttgtttgtgcctgtgttttcttcgctgctggatgctcttttatttcgtgctcagatggacactgatgagcatggttctgatggagcaccttgtatacctgagagactaacacagttcaggatgaatttggaggagctcctcgttgatatttgtttgcttctgggtgcccctgcatatataaacaggctcttttctggtggatgggacttttcaagccaaacaattccttggaaggaggtagaagttagaatgtatgcactcagcatggttgctgacacgattttacaagatgaaggctcctttgatttttcaatcataatgcattttgtgaacattttgtccagtagaacacctgttgaactgaatggaaatttgtttttggtgtataaatcgttcggtgatgtcgttggctcgtactcaaagtggttatcgtcttctcaatgtaacattaagcccttactcctattttgcgcgtcaggaatttcaaaatccgtatcatcaaatgcttgctccttagcattgcgcaaactttgtgaggatgctccttcattcatccatgaaccacagaaccttgaaattcttttctggattggtgagggcatgaataaagggaacctgcagctagaggatgaggaagagataattagtgcaatcacacatgctttaagttctataagtgaaaaagagttgaagaaaagttcactggccaggttactttgttccagttactctgcagtggaaaagattattgacattgatagagatcaattgctaaggcaaaatccagctgcttatacgcaatcattggatcttgctgtccgtggtctctacaggatgagtgctttgtttcatcatttggcaacatcagtcacatctggtctggtcgatgatgatataattatagttcttcttggaatattctggccacttcttgaaagtcttttccgatcatctcatatggagaatgtgcatttatctgcagctatatgccgttctctttcttctgctatacattcttgcggacaccactttcatattttattacctaaagttatggagtgcttatctgcaaatttcttgctatttcaaaggcacgactgcttcttgaggacagctgccaatgttattgaagagtttggccacaaagaagaatatggggctttatgtgttaggacttttgaaattcttagctctgcatcttcaatatcagctctgaattcttcttatacctgtgatcaagaacctgacctagttgaagcatatacctactttacatctatgtttattcgctgctgtccaaaggaagccattgtggcatctagctccctgattgagttatcatttcaaaaggcagctatatgctctacagcaatgcaccgaggagctgcacttgcagcaatgtcatatatgtcgtgttttcttgagactgcccttgctgctgtgctagaatctcctgagtgcatccctaacgggtcacctggtgtggccctaatccaaatcttggcacgctgtggtgaaggtctattatctaatgtgctttatgctttacttggtgtatcagccttgtcaagggtccataaatctgccacaatattgcaacaactggcggcattgtgcagtttcagtgagggaacgacatggaaggctatccttagttggaattctctttgtgggtggctacaatcgacggtgaaatctttgccttctgagtatctaaagcaaggggaggctgaaataatagttccatcgtggctcaaggtgcttcaggatgcaggctcagactatcttcacagcaggactggtgataatataagaagccatcaaggttacatgcaagggaagggtggtagaactcttaaacgtataatcagagatttcgcagaaagccaccggaatgttccaatccccagtcctacatgatatggatgtgtcacgagtcttgcactctttactgatttgaggatgtccagtccctccagtagcttggagtctgactctagagagggggtccttgtggaactgatgtccgtcccgtctctgctggcatgctacatgttggttccatctatagttcagcaagaggaagaggctatttgattgttccggacatctggttcggacttggagagtcttctctgtatagcaaggaagtcgcaccattgttctgctgactaattgggggttgaatgcaaagtctgaagccgcatgtcatggttcgagatccaattttgttttgatagacatactgtgaaattcattgtgccggtaagctatatgaagacaaaatggggggatggaatgcaacctgtacataccattctttgctggttggggcaggcgatgtacgaacattcatatgcagcagtgttactgctcgaatctggagttaaacatgggcagtaatgctaggcatttatcaaacttctatcatgtcagtcgaaactttgaacaagtgtacataatcaaatatattatcagatatcataattttatggcatg

SEQ ID NO: 41254 - DNA, 2868 bp, Zea Mays
atggtagcagcagtgagggtcgacgccaggggctggtacaccggtcctggtatggttgtccctggcgtcgtcagccatgcaactggtgatgaagatggcgcaacacaactggaattacctgaggcctttctgagtaagacaccttatataagggaggctcttcttctaccagctttagccaacagaaatgagaaaattattgctggtcttgcctgtttgatgtgtgaagttggccaggcggcacctgctttggttgcagaagggggtagccaagcacttgctctcaccgatggacttttgaggtgtagtttggcacatttcattcttggtattgatgtgaagtcagccaaaagaaatgtggtacaagagttgtttgtgcctgtgttttcttcgctgctggatgctcttttatttcgtgctcagatggacactgatgagcatggttctgatggagcaccttgtatacctgagagactaacacagttcaggatgaatttggaggagctcctcgttgatatttgtttgcttctgggtgcccctgcatatataaacaggctcttttctggtggatgggacttttcaagccaaacaattccttggaaggaggtagaagttagaatgtatgcactcagcatggttgctgacacgattttacaagatgaaggctcctttgatttttcaatcataatgcattttgtgaacattttgtccagtagaacacctgttgaactgaatggaaatttgtttttggtgtataaatcgttcggtgatgtcgttggctcgtactcaaagtggttatcgtcttctcaatgtaacattaagcccttactcctattttgcgcgtcaggaatttcaaaatccgtatcatcaaatgcttgctccttagcattgcgcaaactttgtgaggatgctccttcattcatccatgaaccacagaaccttgaaattcttttctggattggtgagggcatgaataaagggaacctgcagctagaggatgaggaagagataattagtgcaatcacacatgctttaagttctataagtgaaaaagagttgaagaaaagttcactggccaggttactttgttccagttactctgcagtggaaaagattattgacattgatagagatcaattgctaaggcaaaatccagctgcttatacgcaatcattggatcttgctgtccgtggtctctacaggatgagtgctttgtttcatcatttggcaacatcagtcacatctggtctggtcgatgatgatataattatagttcttcttggaatattctggccacttcttgaaagtcttttccgatcatctcatatggagaatgtgcatttatctgcagctatatgccgttctctttcttctgctatacattcttgcggacaccactttcatattttattacctaaagttatggagtgcttatctgcaaatttcttgctatttcaaaggcacgactgcttcttgaggacagctgccaatgttattgaagagtttggccacaaagaagaatatggggctttatgtgttaggacttttgaaattcttagctctgcatcttcaatatcagctctgaattcttcttatacctgtgatcaagaacctgacctagttgaagcatatacctactttacatctatgtttattcgctgctgtccaaaggaagccattgtggcatctagctccctgattgagttatcatttcaaaaggcagctatatgctctacagcaatgcaccgaggagctgcacttgcagcaatgtcatatatgtcgtgttttcttgagactgcccttgctgctgtgctagaatctcctgagtgcatccctaacgggtcacctggtgtggccctaatccaaatcttggcacgctgtggtgaaggtctattatctaatgtgctttatgctttacttggtgtatcagccttgtcaagggtccataaatctgccacaatattgcaacaactggcggcattgtgcagtttcagtgagggaacgacatggaaggctatccttagttggaattctctttgtgggtggctacaatcgacggtgaaatctttgccttctgagtatctaaagcaaggggaggctgaaataatagttccatcgtggctcaaggtgcttcaggatgcaggctcagactatcttcacagcaggactggtgataatataagaagccatcaaggttacatgcaagggaagggtggtagaactcttaaacgtataatcagagatttcgcagaaagccaccggaatgttccaatccccagtcctacatgatatggatgtgtcacgagtcttgcactctttactgatttgaggatgtccagtccctccagtagcttggagtctgactctagagagggggtccttgtggaactgatgtccgtcccgtctctgctggcatgctacatgttggttccatctatagttcagcaagaggaagaggctatttgattgttccggacatctggttcggacttggagagtcttctctgtatagcaaggaagtcgcaccattgttctgctgactaattgggggttgaatgcaaagtctgaagccgcatgtcatggttcgagatccaattttgttttgatagacatactgtgaaattcattgtgccggtaagctatatgaagacaaaatggggggatggaatgcaacctgtacataccattctttgctggttggggcaggcgatgtacgaacattcatatgcagcagtgttactgctcgaatctggagttaaacatgggcagtaatgctaggcatttatcaaacttctatcatgtcagtcgaaactttgaacaagtgtacataatcaaatatattatcagatatcataattttatggcatg

SEQ ID NO: 41255 - DNA, 2969 bp, Zea Mays
atggtagcagcagtgagggtcgacgccaggggctggtacaccggtcctggtatggttgtccctggcgtcgtcagccatgcaactggtgatgaagatggcgcaacacaactggaattacctgaggcctttctgagtaagacaccttatataagggaggctcttcttctaccagctttagccaacagaaatgagaaaattattgctggtcttgcctgtttgatgtgtgaagttggccaggcggcacctgctttggttgcagaagggggtagccaagcacttgctctcaccgatggacttttgagtttatttttaccacattatgtgaagtgctccacctcaactgcagatgtgtagcttttaccagtgaagattgggaaattgcagagtcaaccctgcaattttggtgtagtttggcacatttcattcttggtattgatgtgaagtcagccaaaagaaatgtggtacaagagttgtttgtgcctgtgttttcttcgctgctggatgctcttttatttcgtgctcagatggacactgatgagcatggttctgatggagcaccttgtatacctgagagactaacacagttcaggatgaatttggaggagctcctcgttgatatttgtttgcttctgggtgcccctgcatatataaacaggctcttttctggtggatgggacttttcaagccaaacaattccttggaaggaggtagaagttagaatgtatgcactcagcatggttgctgacacgattttacaagatgaaggctcctttgatttttcaatcataatgcattttgtgaacattttgtccagtagaacacctgttgaactgaatggaaatttgtttttggtgtataaatcgttcggtgatgtcgttggctcgtactcaaagtggttatcgtcttctcaatgtaacattaagcccttactcctattttgcgcgtcaggaatttcaaaatccgtatcatcaaatgcttgctccttagcattgcgcaaactttgtgaggatgctccttcattcatccatgaaccacagaaccttgaaattcttttctggattggtgagggcatgaataaagggaacctgcagctagaggatgaggaagagataattagtgcaatcacacatgctttaagttctataagtgaaaaagagttgaagaaaagttcactggccaggttactttgttccagttactctgcagtggaaaagattattgacattgatagagatcaattgctaaggcaaaatccagctgcttatacgcaatcattggatcttgctgtccgtggtctctacaggatgagtgctttgtttcatcatttggcaacatcagtcacatctggtctggtcgatgatgatataattatagttcttcttggaatattctggccacttcttgaaagtcttttccgatcatctcatatggagaatgtgcatttatctgcagctatatgccgttctctttcttctgctatacattcttgcggacaccactttcatattttattacctaaagttatggagtgcttatctgcaaatttcttgctatttcaaaggcacgactgcttcttgaggacagctgccaatgttattgaagagtttggccacaaagaagaatatggggctttatgtgttaggacttttgaaattcttagctctgcatcttcaatatcagctctgaattcttcttatacctgtgatcaagaacctgacctagttgaagcatatacctactttacatctatgtttattcgctgctgtccaaaggaagccattgtggcatctagctccctgattgagttatcatttcaaaaggcagctatatgctctacagcaatgcaccgaggagctgcacttgcagcaatgtcatatatgtcgtgttttcttgagactgcccttgctgctgtgctagaatctcctgagtgcatccctaacgggtcacctggtgtggccctaatccaaatcttggcacgctgtggtgaaggtctattatctaatgtgctttatgctttacttggtgtatcagccttgtcaagggtccataaatctgccacaatattgcaacaactggcggcattgtgcagtttcagtgagggaacgacatggaaggctatccttagttggaattctctttgtgggtggctacaatcgacggtgaaatctttgccttctgagtatctaaagcaaggggaggctgaaataatagttccatcgtggctcaaggtgcttcaggatgcaggctcagactatcttcacagcaggactggtgataatataagaagccatcaaggttacatgcaagggaagggtggtagaactcttaaacgtataatcagagatttcgcagaaagccaccggaatgttccaatccccagtcctacatgatatggatgtgtcacgagtcttgcactctttactgatttgaggatgtccagtccctccagtagcttggagtctgactctagagagggggtccttgtggaactgatgtccgtcccgtctctgctggcatgctacatgttggttccatctatagttcagcaagaggaagaggctatttgattgttccggacatctggttcggacttggagagtcttctctgtatagcaaggaagtcgcaccattgttctgctgactaattgggggttgaatgcaaagtctgaagccgcatgtcatggttcgagatccaattttgttttgatagacatactgtgaaattcattgtgccggtaagctatatgaagacaaaatggggggatggaatgcaacctgtacataccattctttgctggttggggcaggcgatgtacgaacattcatatgcagcagtgttactgctcgaatctggagttaaacatgggcagtaatgctaggcatttatcaaacttctatcatgtcagtcgaaactttgaacaagtgtacataatcaaatatattatcagatatcataattttatggcatg

SEQ ID NO: 41256 - DNA, 2925 bp, Zea Mays
atggtagcagcagtgagggtcgacgccaggggctggtacaccggtcctggtatggttgtccctggcgtcgtcagccatgcaactggtgatgaagatggcgcaacacaactggaattacctgaggcctttctgagtaagacaccttatataagggaggctcttcttctaccagctttagccaacagaaatgagaaaattattgctggtcttgcctgtttgatgtgtgaagttggccaggcggcacctgctttggttgcagaagggggtagccaagcacttgctctcaccgatggacttttgagatgtgtagcttttaccagtgaagattgggaaattgcagagtcaaccctgcaattttggtgtagtttggcacatttcattcttggtattgatgtgaagtcagccaaaagaaatgtggtacaagagttgtttgtgcctgtgttttcttcgctgctggatgctcttttatttcgtgctcagatggacactgatgagcatggttctgatggagcaccttgtatacctgagagactaacacagttcaggatgaatttggaggagctcctcgttgatatttgtttgcttctgggtgcccctgcatatataaacaggctcttttctggtggatgggacttttcaagccaaacaattccttggaaggaggtagaagttagaatgtatgcactcagcatggttgctgacacgattttacaagatgaaggctcctttgatttttcaatcataatgcattttgtgaacattttgtccagtagaacacctgttgaactgaatggaaatttgtttttggtgtataaatcgttcggtgatgtcgttggctcgtactcaaagtggttatcgtcttctcaatgtaacattaagcccttactcctattttgcgcgtcaggaatttcaaaatccgtatcatcaaatgcttgctccttagcattgcgcaaactttgtgaggatgctccttcattcatccatgaaccacagaaccttgaaattcttttctggattggtgagggcatgaataaagggaacctgcagctagaggatgaggaagagataattagtgcaatcacacatgctttaagttctataagtgaaaaagagttgaagaaaagttcactggccaggttactttgttccagttactctgcagtggaaaagattattgacattgatagagatcaattgctaaggcaaaatccagctgcttatacgcaatcattggatcttgctgtccgtggtctctacaggatgagtgctttgtttcatcatttggcaacatcagtcacatctggtctggtcgatgatgatataattatagttcttcttggaatattctggccacttcttgaaagtcttttccgatcatctcatatggagaatgtgcatttatctgcagctatatgccgttctctttcttctgctatacattcttgcggacaccactttcatattttattacctaaagttatggagtgcttatctgcaaatttcttgctatttcaaaggcacgactgcttcttgaggacagctgccaatgttattgaagagtttggccacaaagaagaatatggggctttatgtgttaggacttttgaaattcttagctctgcatcttcaatatcagctctgaattcttcttatacctgtgatcaagaacctgacctagttgaagcatatacctactttacatctatgtttattcgctgctgtccaaaggaagccattgtggcatctagctccctgattgagttatcatttcaaaaggcagctatatgctctacagcaatgcaccgaggagctgcacttgcagcaatgtcatatatgtcgtgttttcttgagactgcccttgctgctgtgctagaatctcctgagtgcatccctaacgggtcacctggtgtggccctaatccaaatcttggcacgctgtggtgaaggtctattatctaatgtgctttatgctttacttggtgtatcagccttgtcaagggtccataaatctgccacaatattgcaacaactggcggcattgtgcagtttcagtgagggaacgacatggaaggctatccttagttggaattctctttgtgggtggctacaatcgacggtgaaatctttgccttctgagtatctaaagcaaggggaggctgaaataatagttccatcgtggctcaaggtgcttcaggatgcaggctcagactatcttcacagcaggactggtgataatataagaagccatcaaggttacatgcaagggaagggtggtagaactcttaaacgtataatcagagatttcgcagaaagccaccggaatgttccaatccccagtcctacatgatatggatgtgtcacgagtcttgcactctttactgatttgaggatgtccagtccctccagtagcttggagtctgactctagagagggggtccttgtggaactgatgtccgtcccgtctctgctggcatgctacatgttggttccatctatagttcagcaagaggaagaggctatttgattgttccggacatctggttcggacttggagagtcttctctgtatagcaaggaagtcgcaccattgttctgctgactaattgggggttgaatgcaaagtctgaagccgcatgtcatggttcgagatccaattttgttttgatagacatactgtgaaattcattgtgccggtaagctatatgaagacaaaatggggggatggaatgcaacctgtacataccattctttgctggttggggcaggcgatgtacgaacattcatatgcagcagtgttactgctcgaatctggagttaaacatgggcagtaatgctaggcatttatcaaacttctatcatgtcagtcgaaactttgaacaagtgtacataatcaaatatattatcagatatcataattttatggcatg

SEQ ID NO: 41257 - DNA, 2787 bp, Zea Mays
atggtagcagcagtgagggtcgacgccaggggctggtacaccggtcctggtatggttgtccctggcgtcgtcagccatgcaactggtgatgaagatggcgcaacacaactggaattacctgaggcctttctgagtaagacaccttatataagggaggctcttcttctaccagctttagccaacagaaatgagaaaattattgctggtcttgcctgtttgatgtgtgaagttggccaggcggcacctgctttggttgcagaagggggtagccaagcacttgctctcaccgatggacttttgaggtgtagtttggcacatttcattcttggtattgatgtgaagtcagccaaaagaaatgtggtacaagagttgtttgtgcctgtgttttcttcgctgctggatgctcttttatttcgtgctcagatggacactgatgagcatggttctgatggagcaccttgtatacctgagagactaacacagttcaggatgaatttggaggagctcctcgttgatatttgtttgcttctgggtgcccctgcatatataaacagggttgctgacacgattttacaagatgaaggctcctttgatttttcaatcataatgcattttgtgaacattttgtccagtagaacacctgttgaactgaatggaaatttgtttttggtgtataaatcgttcggtgatgtcgttggctcgtactcaaagtggttatcgtcttctcaatgtaacattaagcccttactcctattttgcgcgtcaggaatttcaaaatccgtatcatcaaatgcttgctccttagcattgcgcaaactttgtgaggatgctccttcattcatccatgaaccacagaaccttgaaattcttttctggattggtgagggcatgaataaagggaacctgcagctagaggatgaggaagagataattagtgcaatcacacatgctttaagttctataagtgaaaaagagttgaagaaaagttcactggccaggttactttgttccagttactctgcagtggaaaagattattgacattgatagagatcaattgctaaggcaaaatccagctgcttatacgcaatcattggatcttgctgtccgtggtctctacaggatgagtgctttgtttcatcatttggcaacatcagtcacatctggtctggtcgatgatgatataattatagttcttcttggaatattctggccacttcttgaaagtcttttccgatcatctcatatggagaatgtgcatttatctgcagctatatgccgttctctttcttctgctatacattcttgcggacaccactttcatattttattacctaaagttatggagtgcttatctgcaaatttcttgctatttcaaaggcacgactgcttcttgaggacagctgccaatgttattgaagagtttggccacaaagaagaatatggggctttatgtgttaggacttttgaaattcttagctctgcatcttcaatatcagctctgaattcttcttatacctgtgatcaagaacctgacctagttgaagcatatacctactttacatctatgtttattcgctgctgtccaaaggaagccattgtggcatctagctccctgattgagttatcatttcaaaaggcagctatatgctctacagcaatgcaccgaggagctgcacttgcagcaatgtcatatatgtcgtgttttcttgagactgcccttgctgctgtgctagaatctcctgagtgcatccctaacgggtcacctggtgtggccctaatccaaatcttggcacgctgtggtgaaggtctattatctaatgtgctttatgctttacttggtgtatcagccttgtcaagggtccataaatctgccacaatattgcaacaactggcggcattgtgcagtttcagtgagggaacgacatggaaggctatccttagttggaattctctttgtgggtggctacaatcgacggtgaaatctttgccttctgagtatctaaagcaaggggaggctgaaataatagttccatcgtggctcaaggtgcttcaggatgcaggctcagactatcttcacagcaggactggtgataatataagaagccatcaaggttacatgcaagggaagggtggtagaactcttaaacgtataatcagagatttcgcagaaagccaccggaatgttccaatccccagtcctacatgatatggatgtgtcacgagtcttgcactctttactgatttgaggatgtccagtccctccagtagcttggagtctgactctagagagggggtccttgtggaactgatgtccgtcccgtctctgctggcatgctacatgttggttccatctatagttcagcaagaggaagaggctatttgattgttccggacatctggttcggacttggagagtcttctctgtatagcaaggaagtcgcaccattgttctgctgactaattgggggttgaatgcaaagtctgaagccgcatgtcatggttcgagatccaattttgttttgatagacatactgtgaaattcattgtgccggtaagctatatgaagacaaaatggggggatggaatgcaacctgtacataccattctttgctggttggggcaggcgatgtacgaacattcatatgcagcagtgttactgctcgaatctggagttaaacatgggcagtaatgctaggcatttatcaaacttctatcatgtcagtcgaaactttgaacaagtgtacataatcaaatatattatcagatatcataattttatggcatg

SEQ ID NO: 41258 - DNA, 2906 bp, Zea Mays
atggtagcagcagtgagggtcgacgccaggggctggtacaccggtcctggtatggttgtccctggcgtcgtcagccatgcaactggtgatgaagatggcgcaacacaactggaattacctgaggcctttctgagtaagacaccttatataagggaggctcttcttctaccagctttagccaacagaaatgagaaaattattgctggtcttgcctgtttgatgtgtgaagttggccaggcgaagggggtagccaagcacttgctctcaccgatggacttttgagatgtgtagcttttaccagtgaagattgggaaattgcagagtcaaccctgcaattttggtgtagtttggcacatttcattcttggtattgatgtgaagtcagccaaaagaaatgtggtacaagagttgtttgtgcctgtgttttcttcgctgctggatgctcttttatttcgtgctcagatggacactgatgagcatggttctgatggagcaccttgtatacctgagagactaacacagttcaggatgaatttggaggagctcctcgttgatatttgtttgcttctgggtgcccctgcatatataaacaggctcttttctggtggatgggacttttcaagccaaacaattccttggaaggaggtagaagttagaatgtatgcactcagcatggttgctgacacgattttacaagatgaaggctcctttgatttttcaatcataatgcattttgtgaacattttgtccagtagaacacctgttgaactgaatggaaatttgtttttggtgtataaatcgttcggtgatgtcgttggctcgtactcaaagtggttatcgtcttctcaatgtaacattaagcccttactcctattttgcgcgtcaggaatttcaaaatccgtatcatcaaatgcttgctccttagcattgcgcaaactttgtgaggatgctccttcattcatccatgaaccacagaaccttgaaattcttttctggattggtgagggcatgaataaagggaacctgcagctagaggatgaggaagagataattagtgcaatcacacatgctttaagttctataagtgaaaaagagttgaagaaaagttcactggccaggttactttgttccagttactctgcagtggaaaagattattgacattgatagagatcaattgctaaggcaaaatccagctgcttatacgcaatcattggatcttgctgtccgtggtctctacaggatgagtgctttgtttcatcatttggcaacatcagtcacatctggtctggtcgatgatgatataattatagttcttcttggaatattctggccacttcttgaaagtcttttccgatcatctcatatggagaatgtgcatttatctgcagctatatgccgttctctttcttctgctatacattcttgcggacaccactttcatattttattacctaaagttatggagtgcttatctgcaaatttcttgctatttcaaaggcacgactgcttcttgaggacagctgccaatgttattgaagagtttggccacaaagaagaatatggggctttatgtgttaggacttttgaaattcttagctctgcatcttcaatatcagctctgaattcttcttatacctgtgatcaagaacctgacctagttgaagcatatacctactttacatctatgtttattcgctgctgtccaaaggaagccattgtggcatctagctccctgattgagttatcatttcaaaaggcagctatatgctctacagcaatgcaccgaggagctgcacttgcagcaatgtcatatatgtcgtgttttcttgagactgcccttgctgctgtgctagaatctcctgagtgcatccctaacgggtcacctggtgtggccctaatccaaatcttggcacgctgtggtgaaggtctattatctaatgtgctttatgctttacttggtgtatcagccttgtcaagggtccataaatctgccacaatattgcaacaactggcggcattgtgcagtttcagtgagggaacgacatggaaggctatccttagttggaattctctttgtgggtggctacaatcgacggtgaaatctttgccttctgagtatctaaagcaaggggaggctgaaataatagttccatcgtggctcaaggtgcttcaggatgcaggctcagactatcttcacagcaggactggtgataatataagaagccatcaaggttacatgcaagggaagggtggtagaactcttaaacgtataatcagagatttcgcagaaagccaccggaatgttccaatccccagtcctacatgatatggatgtgtcacgagtcttgcactctttactgatttgaggatgtccagtccctccagtagcttggagtctgactctagagagggggtccttgtggaactgatgtccgtcccgtctctgctggcatgctacatgttggttccatctatagttcagcaagaggaagaggctatttgattgttccggacatctggttcggacttggagagtcttctctgtatagcaaggaagtcgcaccattgttctgctgactaattgggggttgaatgcaaagtctgaagccgcatgtcatggttcgagatccaattttgttttgatagacatactgtgaaattcattgtgccggtaagctatatgaagacaaaatggggggatggaatgcaacctgtacataccattctttgctggttggggcaggcgatgtacgaacattcatatgcagcagtgttactgctcgaatctggagttaaacatgggcagtaatgctaggcatttatcaaacttctatcatgtcagtcgaaactttgaacaagtgtacataatcaaatatattatcagatatcataattttatggcatg

SEQ ID NO: 41259 - DNA, 1543 bp, Zea Mays
cggaactcaaagtttggagatgaactattcagaattgagatcatcaatgagtaaagggagaagatgtagaaaataatactacctccgttctcgaatatttgtcgcacgctagttcatttttgaactaaaccgcgacaaaaaaagtacggagggagtagttagtataatgagttgaaacaatatacaagctcagagtagtgaaattcagtaacagtcaactacatctccaatcatatacctcttttctcaacaaatggatttgctttatgagagaaaacaaagggctccaaaccaagactgcatccagttgcaacgatgttgcatgcgtatatgacccaactaacataaccatttatattgcaaattttcaattgaaaacgatactactacagtacccccttagggcttgttcggttctaccccaatccatatggattgagggggattgaaggggtttcaatccctactaagtcaaaatctttttcaatccatatcaatccccaccaatgcatatggattcaaaataatcgaacaagcccttaatgtttgttctcccaaagatacctacttcatggttttgtatgatcacaaattttacctgtgaatgaatataggttggctgggatgaatcaactgctggtgagcgacagccaagggtgtcactttgggagattgaacccctgacaactttcccaatgtatccgtctccttttccgctcaggctcaagcgtccatggccaacaggcttgccttctctgcatggtgggaaggatgatgacctggctaactctctcatgtggcttcgagataccgcaactcctggatttcagtcgttaaattttggtggacttggtatgagcccttggatgcagccaaggttggatgctaccttacttggcctgcaacctgacatgtatcaggcgatggccacagctgctttctaggatacaacaaagcaggcatcgcccacaatgctgcagttccagcagccccagaacatagctggtcgggctgccccgcttatttcaagtcagattttgcagcaagcacatcctcaatttcagcagcaatcgtaccttcaaaacatctctgagagcacaatccaagcacagggtcagtctgagttcctcaagcagcagatccaacgcagccagtcattcaatgagcagaagccctagatgcaaccccagcaagaaccacagcagcagcaaccacagtgtctgccagtcccccaacatcagcaaatgcaacaacagaatatgaccaactaccagtctatatctaatgcattatcaccgttttctcagttgtcgccagtttctcagtcttcacctatggcgttgcagactatattaccgttctcgtaggcacagagcttcacagacacgaatgtaggttcattgtctccatccaatggcaacaccatgcaaaacacactgaggtcgttctcatcagaagcagtttctcacctcagtatgccgaggcccactgcgatacatgtcgcagacccatggtcgtcgaagcgtgtcgcggtggagtctct

SEQ ID NO: 41260 - DNA, 267 bp, Zea Mays
cacgcaggcaataggccgttcatggattagggcaacagccacgaagggcacgccgcatgcgcacggcaactgtggcacggagaccggattcctcacgcctgctggcgtcgatctcctccggaggctgcttctcaccgcttatccctgcaccagtttgagttggagaagacgaacttccaccgtcttgggaccctatatcctctcctttagataacagagttgtgttggaaggagggttcatcggagagtggccactaacatattctg

SEQ ID NO: 41261 - DNA, 4983 bp, Zea Mays
agcacaccacacctctgttcccagtttcccacaacaacctcgccccattccgtcccgtccccaccacactgctcggcggcggcggcgccagcgccagcgacgacgactagtaaaacgtaacgcgcgccctgacccagtcccgatacgggctataaagctcaccgcccctccgtcccctcctcgcaaacgcaacgtccgtccctgggcctcccgttccccgttcctcctccctgactccctcccacgctgcaccggcccccctccgcacaagcgtttcgttcgttccttcgtaacctccgtatcagcagctgacgcaaagagctagagctgccggtgtgccggtcgccatgcataaccccaggccgggcggcggggacatcgtcgagatgtcgtcgtccgccaccgccgaggggcgggtgatcccgcacagcggcccgctgagcaagaagtcgggcgcccggaagagcgcgcggttcgcggagtccgtgtcggcgccgctgtccgcgccgccgccgcgcgcctccgccaacaacaacaacaacaacgacgacgacgactacgtggagatcaccctcgacgtgcgcgacgactcggtggcggtgcacagcgtcaagcccgcccacggcggcggcgccggcgccggcgccggcgcgggcggcgacgacccggacgtgacgctgctggcgcgcacgctcgagagccggcgctcctcgtcctacggccactccgtcatccggaacgcctcgtcgcggatcaagcaggtgtcgcaggagctccgccgcatcgcctccatcaaccgccgcggcgccgcggggccccggatcgaccgctccaagtccgccgccgcgcacgcgctcaaggggctcaagttcatcagcaaggccgagggcgccgccggatgggaggccgtcgagaggcgcttcgacaagctcgccgagaacggcctcctccaccggtccaagttcggccagtgcatcgggatgaaggagccggagttcgccggcgagctgttcgacgcgctgtcgcggcgccgcaacatctccggcgacagcatcagcaaggcggagctgctcgagttctgggaccaaatctccgacaccagcttcgacggccggctgcagacgttcttcgacatggtggacaaggacgccgacggaaggatcaccgaggaggaggtcaaagagatcatcacgctgagcgcgtcggcgaacaagctttcgaagatcacggatcaggcggaggagtacgcccggctgatcatggaggagctggacccgggcaacctgggctacatcgagctgtacaacctggagatgctgctcctgcaggcgccgagccagtcggtgcgcatcggcacgaccaacagccggaacctgagccagatgctgagccagagcctccgtccgacggcggagccgaaccctctccggcggtggtaccggcgcgcgcagtacttcctggaggacaactggcggcgcgtgtgggtgatgcttctgtggctgtgcatctgcgcggggctgttcgcctggaagttcatccagtaccggcagcgctacgtgttccaggtgatggggtactgcgtgtgcgtggccaagggcggcgcggagacgctcaagttcaacatggcgctgatcctgctcccggtgtgccggaacaccatcacctggatccgcaaccgcaccgccggcgtggggcgcgtggtgcccttcgacgacaacctcaacttccacaaggtggtggcggtgggcatcgcggtcggggccgggctgcacatcatctcccacctgacgtgcgacttcccgcggctgctccacgccacggacgccgagtacgcgccgctggggcagtacttcggggtgccccgcccgcccaactactggtggttcgtgcgcggcacggaggggtggacggggctggtgatgctggtgctcatggccgtggcgttcaccctggcgacgccgtggttccggcggggccgcatcgcgctgcctggcccgctgcggcggctgacggggttcaacgcgttctggtactcgcaccactgcttcgtggtggtgtacgcgctgctgatcgtgcacgggcactacctgtacctgacgcacaagtggtacaagaagtcgacgtggatgtacctggccgtgcccatggtgctgtacgcgtgcgagcgcctcaccagggcgctgcgctccagcgtcaggcccgtcaggatcctcaaggtggccgtgtacccgggcaacgtcctctcgctccacttctccaagccgcagggcttccgctacaagagcgggcagtacatcttcgtcaactgcgccgccgtgtcgccgttccagtggcacccgttctccatcacgtcggccccgcaggacgactacgtgagcgtccacatcaggacgctgggcgactggacccgcgagctcaagaacgtcttctcaagggtgtgccggccgccgacggagggcaagagcgggctgctccgcgccgagtacgaccgcgacggcagcgccgtggccaacccgaggtgagaaatctgtcccttgaccgatggaatgcgctggcgtacgtctccatgacaaaaacgtggcggtggcgtcgtagttgggtgggaggtcggagcaagaagatgcctatgcaggcaggcaggggttcttcttcttcttccgtgtggtagcatttgttgaccttgacccctgtgcggaatttctgccaccaaatactactagtacttagtggcacggtaggtggctagctgacttattattgcgttcagtttggccgttgggcatgatgagctcggcgaaccaaccacaaccaacggcggtgaccgctggccggtgatattcccggcggcggatcggaacacgagctgcgactgttggtcctggtttttatccgtgggccacggccggccatgcatgtctgcacgacgacggacagacagtggctgcgactgtacgggggaagctattgaccattattattagttcggactaaataactaaaccacctgtcgtgtgtcgtgtgcagcttccccaaggtgctgatcgacgggccgtacggcgcgccggcgcaggactacaagcagtacgacatcgtgctgctggtggggctaggcatcggcgccacgcccatgatctccatcatcaaggacatcatcaacaacatgaggcagctggacggcggcggcgacctggaggcctcggacgcgtcggcgtcgtcgtcgtcgatggcctcgttccgcacccggcgtgcctacttctactgggtgacccgggagcaggggtccttcgagtggttccgcggcgtgatggacgaggtggcggagacggacaggaagggcgtcatcgagctgcacaactactgcaccagcgtgtacgaggaaggggacgcccggtccgcgctcatcgccatgctccagtcgctcaaccacgccaagcacggcgtcgacgtggtgtccggcacccgcgtcaagacccacttcgccaggcctaactggcgcaacgtctacaagcgcatcgcgctcaaccaccagaaccagcgcgtcggtgagttgttgttgttgttgttcttcttcttcttctttgttgtgcattcctcgaccggtcgccattctacttcggtccattcgtcgaacacgtggcatgcattactacttgcttctctcatgacccggcggtgaaagaagctttctaccaaacccgatatgcatgacaggccggtggtggacaggtgtgatgcgcgtgcggggagtagcagtagtagtgcaatgcggctggcctaactttcgttatagaagacagacagacacatgcattagaggatatagctaatcattgttgctgagacttgatattaattaattaattgcaggagtgttctactgcggcgccccggtgctgaccaaggagctgcgcgagctggcgcaggacttctcgcggaagaccaacaccaagttcgagttccacaaggagaacttctagctctctctctctctatatatatgtaaggatatggatgggtgtagagaggggatcggagtagcgcaaagtaggtatttgcttgaccagttgggttgggtgggtcaaaacccccaacagtttttttttttaattattattattattcttcttcttcttcatttgctctagagaagaactaatgatcgaaatgccattatttgtacagatcctctctctctctcacttagactatagctaggcagttcgatgagcatgcatgcaagcagagttgagggtttgatggccttagtcagatcagatcaaaagcgtcaaaatgcatgtctctggtcgttctcagccacagccagcagtgcgtgcatcacgcaaagaaagcgcacgcatcttgtgtggctgccatagctgaggtgctctaggccacacattctcctactctcatcatcatccctgatacacgtacggtgggcaacaaccatgcatgaacggcctcacccaatgaatgacatgtttcagggttctagagggcgatgagcatgcatgattgcatacgcatgactggcccacatagcaacccagcgtagtcggggttttttttgttttgttttgttgtcggtatatatgtatatattagctcttcgtttgtttattaattagtatgtgccttctgattgctttatcgcattgtacatacatcgatggtgcggagcaagaagagcactacataaagcacacaaaaaaaaaacttgtgcaatggtgggtggaggtcatgcacactcttgaataacaaaatgaggtgttccttcttccccatgtgcggttgcagtttctcttttcagtctctctttctctacaacctgaacatgcttcccagcatatatgacccagttaggagccaatttctaacacaataccttgatgatgatgatacttgaattctggaaaggcatgtaactaaatcttcctctgagtgtgacttcaaggagcatgagcttgtttaccaataagactg

SEQ ID NO: 41262 - DNA, 3613 bp, Zea Mays
ctctgttcccagtttcccacaacaacctcgccccattccgtcccgtccccaccacactgctcggcggcggcggcgccagcgccagcgacgacgactagtaaaacgtaacgcgcgccctgacccagtcccgatacgggctataaagctcaccgcccctccgtcccctcctcgcaaacgcaacgtccgtccctgggcctcccgttccccgttcctcctccctgactccctcccacgctgcaccggcccccctccgcacaagcgtttcgttcgttccttcgtaacctccgtatcagcagctgacgcaaagagctagagctgccggtgtgccggtcgccatgcataaccccaggccgggcggcggggacatcgtcgagatgtcgtcgtccgccaccgccgaggggcgggtgatcccgcacagcggcccgctgagcaagaagtcgggcgcccggaagagcgcgcggttcgcggagtccgtgtcggcgccgctgtccgcgccgccgccgcgcgcctccgccaacaacaacaacaacaacgacgacgacgactacgtggagatcaccctcgacgtgcgcgacgactcggtggcggtgcacagcgtcaagcccgcccacggcggcggcgccggcgccggcgccggcgcgggcggcgacgacccggacgtgacgctgctggcgcgcacgctcgagagccggcgctcctcgtcctacggccactccgtcatccggaacgcctcgtcgcggatcaagcaggtgtcgcaggagctccgccgcatcgcctccatcaaccgccgcggcgccgcggggccccggatcgaccgctccaagtccgccgccgcgcacgcgctcaaggggctcaagttcatcagcaaggccgagggcgccgccggatgggaggccgtcgagaggcgcttcgacaagctcgccgagaacggcctcctccaccggtccaagttcggccagtgcatcgggatgaaggagccggagttcgccggcgagctgttcgacgcgctgtcgcggcgccgcaacatctccggcgacagcatcagcaaggcggagctgctcgagttctgggaccaaatctccgacaccagcttcgacggccggctgcagacgttcttcgacatggtggacaaggacgccgacggaaggatcaccgaggaggaggtcaaagagatcatcacgctgagcgcgtcggcgaacaagctttcgaagatcacggatcaggcggaggagtacgcccggctgatcatggaggagctggacccgggcaacctgggctacatcgagctgtacgcgtgcgagcgcctcaccagggcgctgcgctccagcgtcaggcccgtcaggatcctcaaggtggccgtgtacccgggcaacgtcctctcgctccacttctccaagccgcagggcttccgctacaagagcgggcagtacatcttcgtcaactgcgccgccgtgtcgccgttccagtggcacccgttctccatcacgtcggccccgcaggacgactacgtgagcgtccacatcaggacgctgggcgactggacccgcgagctcaagaacgtcttctcaagggtgtgccggccgccgacggagggcaagagcgggctgctccgcgccgagtacgaccgcgacggcagcgccgtggccaacccgagcttccccaaggtgctgatcgacgggccgtacggcgcgccggcgcaggactacaagcagtacgacatcgtgctgctggtggggctaggcatcggcgccacgcccatgatctccatcatcaaggacatcatcaacaacatgaggcagctggacggcggcggcgacctggaggcctcggacgcgtcggcgtcgtcgtcgtcgatggcctcgttccgcacccggcgtgcctacttctactgggtgacccgggagcaggggtccttcgagtggttccgcggcgtgatggacgaggtggcggagacggacaggaagggcgtcatcgagctgcacaactactgcaccagcgtgtacgaggaaggggacgcccggtccgcgctcatcgccatgctccagtcgctcaaccacgccaagcacggcgtcgacgtggtgtccggcacccgcgtcaagacccacttcgccaggcctaactggcgcaacgtctacaagcgcatcgcgctcaaccaccagaaccagcgcgtcggtgagttgttgttgttgttgttcttcttcttcttctttgttgtgcattcctcgaccggtcgccattctacttcggtccattcgtcgaacacgtggcatgcattactacttgcttctctcatgacccggcggtgaaagaagctttctaccaaacccgatatgcatgacaggccggtggtggacaggtgtgatgcgcgtgcggggagtagcagtagtagtgcaatgcggctggcctaactttcgttatagaagacagacagacacatgcattagaggatatagctaatcattgttgctgagacttgatattaattaattaattgcaggagtgttctactgcggcgccccggtgctgaccaaggagctgcgcgagctggcgcaggacttctcgcggaagaccaacaccaagttcgagttccacaaggagaacttctagctctctctctctctatatatatgtaaggatatggatgggtgtagagaggggatcggagtagcgcaaagtaggtatttgcttgaccagttgggttgggtgggtcaaaacccccaacagtttttttttttaattattattattattcttcttcttcttcatttgctctagagaagaactaatgatcgaaatgccattatttgtacagatcctctctctctctcacttagactatagctaggcagttcgatgagcatgcatgcaagcagagttgagggtttgatggccttagtcagatcagatcaaaagcgtcaaaatgcatgtctctggtcgttctcagccacagccagcagtgcgtgcatcacgcaaagaaagcgcacgcatcttgtgtggctgccatagctgaggtgctctaggccacacattctcctactctcatcatcatccctgatacacgtacggtgggcaacaaccatgcatgaacggcctcacccaatgaatgacatgtttcagggttctagagggcgatgagcatgcatgattgcatacgcatgactggcccacatagcaacccagcgtagtcggggttttttttgttttgttttgttgtcggtatatatgtatatattagctcttcgtttgtttattaattagtatgtgccttctgattgctttatcgcattgtacatacatcgatggtgcggagcaagaagagcactacataaagcacacaaaaaaaaaacttgtgcaatggtgggtggaggtcatgcacactcttgaataacaaaatgaggtgttccttcttccccatgtgcggttgcagtttctcttttcagtctctctttctctacaacctgaacatgcttcccagcatatatgacccagttaggagccaatttctaacacaataccttgatgatgatgatacttgaattctggaaaggcatgtaactaaatcttcctctgagtgtgacttcaaggagcatgagcttgtttaccaataagactg

SEQ ID NO: 41263 - DNA, 3624 bp, Zea Mays
gcaaacgcaacgtccgtccctgggcctcccgttccccgttcctcctccctgactccctcccacgctgcaccggcccccctccgcacaagcgtttcgttcgttccttcgtaacctccgtatcagcagctgacgcaaagagctagagctgccggtgtgccggtcgccatgcataaccccaggccgggcggcggggacatcgtcgagatgtcgtcgtccgccaccgccgaggggcgggtgatcccgcacagcggcccgctgagcaagaagtcgggcgcccggaagagcgcgcggttcgcggagtccgtgtcggcgccgctgtccgcgccgccgccgcgcgcctccgccaacaacaacaacaacaacgacgacgacgactacgtggagatcaccctcgacgtgcgcgacgactcggtggcggtgcacagcgtcaagcccgcccacggcggcggcgccggcgccggcgccggcgcgggcggcgacgacccggacgtgacgctgctggcgcgcacgctcgagagccggcgctcctcgtcctacggccactccgtcatccggaacgcctcgtcgcggatcaagcaggtgtcgcaggagctccgccgcatcgcctccatcaaccgccgcggcgccgcggggccccggatcgaccgctccaagtccgccgccgcgcacgcgctcaaggggctcaagttcatcagcaaggccgagggcgccgccggatgggaggccgtcgagaggcgcttcgacaagctcgccgagaacggcctcctccaccggtccaagttcggccagtgcatcgggatgaaggagccggagttcgccggcgagctgttcgacgcgctgtcgcggcgccgcaacatctccggcgacagcatcagcaaggcggagctgctcgagttctgggaccaaatctccgacaccagcttcgacggccggctgcagacgttcttcgacatggtggacaaggacgccgacggaaggatcaccgaggaggaggtcaaagagatcatcacgctgagcgcgtcggcgaacaagctttcgaagatcacggatcaggcggaggagtacgcccggctgatcatggaggagctggacccgggcaacctgggctacatcgagctgtacgcgtgcgagcgcctcaccagggcgctgcgctccagcgtcaggcccgtcaggatcctcaaggtggccgtgtacccgggcaacgtcctctcgctccacttctccaagccgcagggcttccgctacaagagcgggcagtacatcttcgtcaactgcgccgccgtgtcgccgttccagtggcacccgttctccatcacgtcggccccgcaggacgactacgtgagcgtccacatcaggacgctgggcgactggacccgcgagctcaagaacgtcttctcaagggtgtgccggccgccgacggagggcaagagcgggctgctccgcgccgagtacgaccgcgacggcagcgccgtggccaacccgaggtgagaaatctgtcccttgaccgatggaatgcgctggcgtacgtctccatgacaaaaacgtggcggtggcgtcgtagttgggtgggaggtcggagcaagaagatgcctatgcaggcaggcaggggttcttcttcttcttccgtgtggtagcatttgttgaccttgacccctgtgcggaatttctgccaccaaatactactagtacttagtggcacggtaggtggctagctgacttattattgcgttcagtttggccgttgggcatgatgagctcggcgaaccaaccacaaccaacggcggtgaccgctggccggtgatattcccggcggcggatcggaacacgagctgcgactgttggtcctggtttttatccgtgggccacggccggccatgcatgtctgcacgacgacggacagacagtggctgcgactgtacgggggaagctattgaccattattattagttcggactaaataactaaaccacctgtcgtgtgtcgtgtgcagcttccccaaggtgctgatcgacgggccgtacggcgcgccggcgcaggactacaagcagtacgacatcgtgctgctggtggggctaggcatcggcgccacgcccatgatctccatcatcaaggacatcatcaacaacatgaggcagctggacggcggcggcgacctggaggcctcggacgcgtcggcgtcgtcgtcgtcgatggcctcgttccgcacccggcgtgcctacttctactgggtgacccgggagcaggggtccttcgagtggttccgcggcgtgatggacgaggtggcggagacggacaggaagggcgtcatcgagctgcacaactactgcaccagcgtgtacgaggaaggggacgcccggtccgcgctcatcgccatgctccagtcgctcaaccacgccaagcacggcgtcgacgtggtgtccggcacccgcgtcaagacccacttcgccaggcctaactggcgcaacgtctacaagcgcatcgcgctcaaccaccagaaccagcgcgtcggagtgttctactgcggcgccccggtgctgaccaaggagctgcgcgagctggcgcaggacttctcgcggaagaccaacaccaagttcgagttccacaaggagaacttctagctctctctctctctatatatatgtaaggatatggatgggtgtagagaggggatcggagtagcgcaaagtaggtatttgcttgaccagttgggttgggtgggtcaaaacccccaacagtttttttttttaattattattattattcttcttcttcttcatttgctctagagaagaactaatgatcgaaatgccattatttgtacagatcctctctctctctcacttagactatagctaggcagttcgatgagcatgcatgcaagcagagttgagggtttgatggccttagtcagatcagatcaaaagcgtcaaaatgcatgtctctggtcgttctcagccacagccagcagtgcgtgcatcacgcaaagaaagcgcacgcatcttgtgtggctgccatagctgaggtgctctaggccacacattctcctactctcatcatcatccctgatacacgtacggtgggcaacaaccatgcatgaacggcctcacccaatgaatgacatgtttcagggttctagagggcgatgagcatgcatgattgcatacgcatgactggcccacatagcaacccagcgtagtcggggttttttttgttttgttttgttgtcggtatatatgtatatattagctcttcgtttgtttattaattagtatgtgccttctgattgctttatcgcattgtacatacatcgatggtgcggagcaagaagagcactacataaagcacacaaaaaaaaaacttgtgcaatggtgggtggaggtcatgcacactcttgaataacaaaatgaggtgttccttcttccccatgtgcggttgcagtttctcttttcagtctctctttctctacaacctgaacatgcttcccagcatatatgacccagttaggagccaatttctaacacaataccttgatgatgatgatacttgaattctggaaaggcatgtaactaaatcttcctctgagtgtgacttcaaggagcatgagcttgtttaccaataagactg

SEQ ID NO: 41264 - DNA, 2959 bp, Zea Mays
ataaaacaaacccatacccagtgtcacacatcattcttttaaaaagaaacaaattttaattctctaggcagggctaagcctcattaattctttttataaaaacaggtatcaaggaggataatcaaattccaaggaatggcaatgcatcaactgtttcatcactcaactcctatcacctaatgcagcatataagcgataaaagttttaaaacaacaaggaggtggcaaatgcaccggggcttgcctgggataacactaggttagtgtggttagatgacgtccgcttggtgagcatcaacaatcctgacacttgatcaagtcgtccctatagagatgggttcatcaaagccaccttgtgatccatcctgatccatgccctccaattcacataatcatctagcgtacctattgaagatgcatagtgcatatgagcatgagcaagaacacaaaatagataatctatactaaagaggataaatacttaaaacaagtcatcacaattcctatgagcacactatacgtgaagatattactaaataccacaaacgcatttttacacttaaatatatctaactcaaacatcgaacaatcataagactacacacaagtcttaagctcatggactagagcacactgccaacggactaacactattattagcactaatgaacaacccattatttataattataaggacacaagaacactggtaaagctaattctatgttgtaagtatcatgaccgatgggttatcaataattgagttacatgatcatgcctataaaaacaaaaccagtcaactacagtcaccattctattctacagcaaagaagacaataaacctaattgagaacatgcccaaggtagtcaacacaaccaaacacttataacccattgatgatttttgttacactatattagccaatacaattagctcaatccactacaaccataataggtgcagatctgaaaattagccgcccaacttcatttatcaagacaagaactaactaaatctaggtatccatacaaaagaaactccaagtaatcattttaatacttgctgattttggatagcaaaacagcagctatttgtttagctcaactcacaaaatattcatcctaaaatgataaagtaggactttctggaaagcttataaagacctctacacctttggtattatcatcacaataagattcgacagtttaaaaggtcaaacagtgctaaactttaattctgtccagatttggacagaattcgactacttatttcaaaaattcataactggagttttagaaatccaaatcaggtgatcctagactttttagaaagctaatagaattatctacaattcatttataaacatctcagggtaattcaatgtgtatcaaagtcagttaatacaaacaagcattgctgtccagatttggacagattcagactctatagttcaaacagctgtaacttggtctctagaccaccaaaaaggtgctccaaaatctgttggaaagcttaagaaaagtactacaattcttctataattactaagggctgattttcagtttagcttagccaaacagtccaattttcgaaacctgtacataatttggacagattctgaaactggacttggaaaaatcataactcctaaactagtaagcctatggtcatgaaattttaacacaaccaagataacgaagttatctaaaacttttatatataatcctttaacgaaaaacatgatttacttcactaaactagctatgtacttaaaattgtttatgcagccctagatagcaggaatcctaattcagctcctatttagcttctacaattatcatgttcttgacgcttactaaagcaaggcattaatgttacgacacaattgaaattcatacaaacaatactaatagctcttatcggcaaagtgctagaagtattaaatattttctttacattattaatttaatcatacctcaccaattcgtctatctaaacacttcacgtacatgctttccaactcaattacacttgacatacacatctatcgatatattatgcgcgtaatctgcagttcaatcctaagcttcactttcaaaataaatacgacgcaatgaagcagcatatctgtacaataacgaatctagatatcatcgcatagtgcacctgtcgaagtactaaagccttacccataacgaatgagtataggatttataacaagacttgctgagatcagaacacaaaagcggctgaaaatttggatatgcttgctaaacgataggcataaatatggacaatagttccggcaaaacatcgtatggtagcaagatatattatcattagaaatcctaacctggttggaacagtcatgcataaatagacaaggattgacatgtttgtaaactgtgtagaaacaagaaatctggttgaccttccaaagcatagagagtgcatgaaaataccaacttaaaatggagcccaaacagaagtttggagtaataaggataatgcatagggcttccaagtattggacatttcagcagacagtggattttggagacagggactgtgcataatggtttggaattatggtgtagaaatttttaccgaacactgacgtgcatggtgcccctaataactgaatcaaaactgaacaagagtatatacccaaagggaagaacctgcagactgaaggaaactgctcatagtacataggtgctcagaggggttgtaggtgtgctcgacgtcaacaaaatcatggcacacaaccaagacattttatcatacatcgaacaccattatagcaataattatctaaccaattcatttattaactaagtagtcggagaaatgacttggctcaccacatcatgccccgactcgatttcagcaagagcgaagacggccaccagttcttgcatatcatcgaacacctaaggagcgttgaacttaaccttct

SEQ ID NO: 41265 - DNA, 2528 bp, Zea Mays
ccgggggccaatattcctccacggaccacggccaagcggcagcagctgcagctctgagccccgggccctgcccctgcccctgccgcttcctcccctgtacggtcccctcctctttcacctccgactgcgcccacgcgcggccccgggcgcggacgacaggtgtccggcatgctgccgccacgtccaccccgaccgacgccccttccctcctcccgccccttccacttcctcgttgtcgtctccgtcctctgtttcgcagccatcctgacgccagcccccgccgctgtagcagcagcagcatcaggggacgcggacggaggaggaggagaaggcggcgtcatcaggatcaggactgccgctgtcgccaggacacgaagccatttatttctgcaaaagatgccctgaagaaagaaccaattagcgatgtgattgctttaaaggattccatgaagtactttgatgctgagttcttcaatgattcaaaactacgtgagatggaagatggtgcaaaggaattcaatgtacccgcattcagagaaaatcggaaattggttgcgacggagaatggtgggttgcacaacccttctgttttactcttcaaatcatcatggagtagtggcagtatgacaagtgagactagaagtttcgagtaccctcgtgcgtcttctgtacatcgtccaactaatgatgaagatattgcatttatgtcggtaatcgagcttggagagcttattaggacaaagcaaataacatcacgtgaacttacagatatatttctgaggagattaaagaggtacaatcctgttctagaagctgttattacatatactgaagatttagcatacaaacaagccaaggaggcagatgacttgctggcacaaggaaaatatcttggtcctttgcatggcattccatatggcctcaaagatataattgcggtaccacactataagaccacttggggctcaaggacgtttaaaaaccaagtccttgatagtgaagcttatgtgtacagaagattgaagtccgctggagcagtcctggtagcaaagcttgtcacgggctcacttgcctatgatgacatatggtttgggggaaggacacgaaacccctggaacatcgaggaattctctactggctcatcggcaggtccagcggctagcacctctgcaggaatggttccatttgcaattggttcagaaactgcaggatccatagcatacccagccgctagatgtggagtaactgcattgcgcccaacatttggaacagttgcacgaaccgatgtcatgagcatttctgagagtttggataagcttggtcctttctgtagaagcgcagtagattgtgctgttgtattagacacaattcgcggaacggatgccggtgatccatcatcgcgtgaggttgctttgggtgatccatttcatgttgacatcaccaaactcactgtaggctacctcgatgacgctgagatggaggttgtcgatgttctttcctctaaaggtgtcaagctggtccccttcaagctgaactacactgtggaatcagtccagtccatcctgaacataacgatggacactgatatgcttgcgcacttcgataactggcagcgggaaggacatgatgatgactatgaggcgcaagaccagtggccggtagagcttcgtcgtgcacggttaatcccagcggtagattatatacaggcgcagcgagcacggggcaagttgatcagagaaatcaaagatagcttcactgttgatgcgtttgttggcaacgtgactgactgggagcgtgtctgtctcgggaaccttgttgggatgcctgtggtcgtggtgccgacaggcttgaagagcatcgagaacccgcctaaaggcggtacgaagagaagaacaacagtgacgacaggcatctacgctcctcctgaccacgaccatattgctctggcgctggcaatggcgtaccagtccgtcactgatcacaacaaacagcggccgccgatcgatgatctggggccgaatgatgtcatacaaagatagttcaacctgctcatggaccgcgatgatccggtgatggtagcacgagggtcgttatggttatggaagctgaagttgaagacgatcagtgagccagaatggctggccacctggcagaagacatcagctgtggaagtatcaagtaccaatccacatatgggcttcttcatcagctcaaataactcagcactttttttttctgaagcaggcagcattgtatcaccttaacatacgttacaaaggaggttctggatttcatctggggcctcatcagaccaaaccgagccaaagaactgatcagctagcctagtcattacatgagctgcaacttctctgggagggtatttggtttctatggactagtccatctattttattctaaaaatttttattctattttagttaataaattgtaaaatacgatgagttttcgtatttaataatttagggactaaaaccgaataaataaaagaattaaaaattactctctag

SEQ ID NO: 41266 - DNA, 2481 bp, Zea Mays
ggccaatattcctccacggaccacggccaagcggcagcagctgcagctctgagccccgggccctgcccctgcccctgccgcttcctcccctgtacggtcccctcctctttcacctccgactgcgcccacgcgcggccccgggcgcggacgacaggtgtccggcatgctgccgccacgtccaccccgaccgacgccccttccctcctcccgccccttccacttcctcgttgtcgtctccgtcctctgtttcgcagccatcctgacgccagcccccgccgctgtagcagcagcagcatcaggggacgcggacggaggaggaggagaaggcggcgtcatcaggatcaggactgccgctgtcgccaggacacgaagccatttatttctgcaaaagatgccctgaagaaagaaccaattagcgatgtgattgctttaaaggattccatgaagtactttgatgctgagttcttcaatgattcaaaactacgtgagatggaagatggtgcaaaggaattcaatgtacccgcattcagagaaaatcggaaattggttgcgacggagaatggtgggttgcacaacccttctgttttactcttcaaatcatcatggagtagtggcagtatgacaagtgagactagaagtttcgagtaccctcgtgcgtcttctgtacatcgtccaactaatgatgaagatattgcatttatgtcggtaatcgagcttggagagcttattaggacaaagcaaataacatcacgtgaacttacagatatatttctgaggagattaaagaggtacaatcctgttctagaagctgttattacatatactgaagatttagcatacaaacaagccaaggaggcagatgacttgctggcacaaggaaaatatcttggtcctttgcatggcattccatatggcctcaaagatataattgcggtaccacactataagaccacttggggctcaaggacgtttaaaaaccaagtccttgatagtgaagcttatgtgtacagaagattgaagtccgctggagcagtcctggtagcaaagcttgtcacgggctcacttgcctatgatgacatatggtttgggggaaggacacgaaacccctggaacatcgaggaattctctactggctcatcggcaggtccagcggctagcacctctgcagaaactgcaggatccatagcatacccagccgctagatgtggagtaactgcattgcgcccaacatttggaacagttgcacgaaccgatgtcatgagcatttctgagagtttggataagcttggtcctttctgtagaagcgcagtagattgtgctgttgtattagacacaattcgcggaacggatgccggtgatccatcatcgcgtgaggttgctttgggtgatccatttcatgttgacatcaccaaactcactgtaggctacctcgatgacgctgagatggaggttgtcgatgttctttcctctaaaggtgtcaagctggtccccttcaagctgaactacactgtggaatcagtccagtccatcctgaacataacgatggacactgatatgcttgcgcacttcgataactggcagcgggaaggacatgatgatgactatgaggcgcaagaccagtggccggtagagcttcgtcgtgcacggttaatcccagcggcgcagcgagcacggggcaagttgatcagagaaatcaaagatagcttcactgttgatgcgtttgttggcaacgtgactgactgggagcgtgtctgtctcgggaaccttgttgggatgcctgtggtcgtggtgccgacaggcttgaagagcatcgagaacccgcctaaaggcggtacgaagagaagaacaacagtgacgacaggcatctacgctcctcctgaccacgaccatattgctctggcgctggcaatggcgtaccagtccgtcactgatcacaacaaacagcggccgccgatcgatgatctggggccgaatgatgtcatacaaagatagttcaacctgctcatggaccgcgatgatccggtgatggtagcacgagggtcgttatggttatggaagctgaagttgaagacgatcagtgagccagaatggctggccacctggcagaagacatcagctgtggaagtatcaagtaccaatccacatatgggcttcttcatcagctcaaataactcagcactttttttttctgaagcaggcagcattgtatcaccttaacatacgttacaaaggaggttctggatttcatctggggcctcatcagaccaaaccgagccaaagaactgatcagctagcctagtcattacatgagctgcaacttctctgggagggtatttggtttctatggactagtccatctattttattctaaaaatttttattctattttagttaataaattgtaaaatacgatgagttttcgtatttaataatttagggactaaaaccgaataaataaaagaattaaaaattactctctag

SEQ ID NO: 41267 - DNA, 2616 bp, Zea Mays
ggccaatattcctccacggaccacggccaagcggcagcagctgcagctctgagccccgggccctgcccctgcccctgccgcttcctcccctgtacggtcccctcctctttcacctccgactgcgcccacgcgcggccccgggcgcggacgacaggtgtccggcatgctgccgccacgtccaccccgaccgacgccccttccctcctcccgccccttccacttcctcgttgtcgtctccgtcctctgtttcgcagccatcctgacgccagcccccgccgctgtagcagcagcagcatcaggggacgcggacggaggaggaggagaaggcggcgtcatcaggatcaggactgccgctgtcgccaggcatggccatcaaaatgtaaatggttgcccttacagaacagtgggaggtgtctttcgtatactcatgtttgcaaataccacaagatttggaaggacacgaagccatttatttctgcaaaagatgccctgaagaaagaaccaattagcgatgtgattgctttaaaggattccatgaagtactttgatgctgagttcttcaatgattcaaaactacgtgagatggaagatggtgcaaaggaattcaatgtacccgcattcagagaaaatcggaaattggttgcgacggagaatggtgggttgcacaacccttctgttttactcttcaaatcatcatggagtagtggcagtatgacaagtgagactagaagtttcgagtaccctcgtgcgtcttctgtacatcgtccaactaatgatgaagatattgcatttatgtcggtaatcgagcttggagagcttattaggacaaagcaaataacatcacgtgaacttacagatatatttctgaggagattaaagaggtacaatcctgttctagaagctgttattacatatactgaagatttagcatacaaacaagccaaggaggcagatgacttgctggcacaaggaaaatatcttggtcctttgcatggcattccatatggcctcaaagatataattgcggtaccacactataagaccacttggggctcaaggacgtttaaaaaccaagtccttgatagtgaagcttatgtgtacagaagattgaagtccgctggagcagtcctggtagcaaagcttgtcacgggctcacttgcctatgatgacatatggtttgggggaaggacacgaaacccctggaacatcgaggaattctctactggctcatcggcaggtccagcggctagcacctctgcaggaatggttccatttgcaattggttcagaaactgcaggatccatagcatacccagccgctagatgtggagtaactgcattgcgcccaacatttggaacagttgcacgaaccgatgtcatgagcatttctgagagtttggataagcttggtcctttctgtagaagcgcagtagattgtgctgttgtattagacacaattcgcggaacggatgccggtgatccatcatcgcgtgaggttgctttgggtgatccatttcatgttgacatcaccaaactcactgtaggctacctcgatgacgctgagatggaggttgtcgatgttctttcctctaaaggtgtcaagctggtccccttcaagctgaactacactgtggaatcagtccagtccatcctgaacataacgatggacactgatatgcttgcgcacttcgataactggcagcgggaaggacatgatgatgactatgaggcgcaagaccagtggccggtagagcttcgtcgtgcacggttaatcccagcggtagattatatacaggcgcagcgagcacggggcaagttgatcagagaaatcaaagatagcttcactgttgatgcgtttgttggcaacgtgactgactgggagcgtgtctgtctcgggaaccttgttgggatgcctgtggtcgtggtgccgacaggcttgaagagcatcgagaacccgcctaaaggcggtacgaagagaagaacaacagtgacgacaggcatctacgctcctcctgaccacgaccatattgctctggcgctggcaatggcgtaccagtccgtcactgatcacaacaaacagcggccgccgatcgatgatctggggccgaatgatgtcatacaaagatagttcaacctgctcatggaccgcgatgatccggtgatggtagcacgagggtcgttatggttatggaagctgaagttgaagacgatcagtgagccagaatggctggccacctggcagaagacatcagctgtggaagtatcaagtaccaatccacatatgggcttcttcatcagctcaaataactcagcactttttttttctgaagcaggcagcattgtatcaccttaacatacgttacaaaggaggttctggatttcatctggggcctcatcagaccaaaccgagccaaagaactgatcagctagcctagtcattacatgagctgcaacttctctgggagggtatttggtttctatggactagtccatctattttattctaaaaatttttattctattttagttaataaattgtaaaatacgatgagttttcgtatttaataatttagggactaaaaccgaataaataaaagaattaaaaattactctctag

SEQ ID NO: 41268 - DNA, 2419 bp, Zea Mays
ctccacggaccacggccaagcggcagcagctgcagctctgagccccgggccctgcccctgcccctgccgcttcctcccctcagcagcatcaggggacgcggacggaggaggaggagaaggcggcgtcatcaggatcaggactgccgctgtcgccaggtccgccatggcatggccatcaaaatgtaaatggttgcccttacagaacagtgggaggtgtctttcgtatactcatgtttgcaaataccacaagatttggaaggacacgaagccatttatttctgcaaaagatgccctgaagaaagaaccaattagcgatgtgattgctttaaaggattccatgaagtactttgatgctgagttcttcaatgattcaaaactacgtgagatggaagatggtgcaaaggaattcaatgtacccgcattcagagaaaatcggaaattggttgcgacggagaatggtgggttgcacaacccttctgttttactcttcaaatcatcatggagtagtggcagtatgacaagtgagactagaagtttcgagtaccctcgtgcgtcttctgtacatcgtccaactaatgatgaagatattgcatttatgtcggtaatcgagcttggagagcttattaggacaaagcaaataacatcacgtgaacttacagatatatttctgaggagattaaagaggtacaatcctgttctagaagctgttattacatatactgaagatttagcatacaaacaagccaaggaggcagatgacttgctggcacaaggaaaatatcttggtcctttgcatggcattccatatggcctcaaagatataattgcggtaccacactataagaccacttggggctcaaggacgtttaaaaaccaagtccttgatagtgaagcttatgtgtacagaagattgaagtccgctggagcagtcctggtagcaaagcttgtcacgggctcacttgcctatgatgacatatggtttgggggaaggacacgaaacccctggaacatcgaggaattctctactggctcatcggcaggtccagcggctagcacctctgcaggaatggttccatttgcaattggttcagaaactgcaggatccatagcatacccagccgctagatgtggagtaactgcattgcgcccaacatttggaacagttgcacgaaccgatgtcatgagcatttctgagagtttggataagcttggtcctttctgtagaagcgcagtagattgtgctgttgtattagacacaattcgcggaacggatgccggtgatccatcatcgcgtgaggttgctttgggtgatccatttcatgttgacatcaccaaactcactgtaggctacctcgatgacgctgagatggaggttgtcgatgttctttcctctaaaggtgtcaagctggtccccttcaagctgaactacactgtggaatcagtccagtccatcctgaacataacgatggacactgatatgcttgcgcacttcgataactggcagcgggaaggacatgatgatgactatgaggcgcaagaccagtggccggtagagcttcgtcgtgcacggttaatcccagcggtagattatatacaggcgcagcgagcacggggcaagttgatcagagaaatcaaagatagcttcactgttgatgcgtttgttggcaacgtgactgactgggagcgtgtctgtctcgggaaccttgttgggatgcctgtggtcgtggtgccgacaggcttgaagagcatcgagaacccgcctaaaggcggtacgaagagaagaacaacagtgacgacaggcatctacgctcctcctgaccacgaccatattgctctggcgctggcaatggcgtaccagtccgtcactgatcacaacaaacagcggccgccgatcgatgatctggggccgaatgatgtcatacaaagatagttcaacctgctcatggaccgcgatgatccggtgatggtagcacgagggtcgttatggttatggaagctgaagttgaagacgatcagtgagccagaatggctggccacctggcagaagacatcagctgtggaagtatcaagtaccaatccacatatgggcttcttcatcagctcaaataactcagcactttttttttctgaagcaggcagcattgtatcaccttaacatacgttacaaaggaggttctggatttcatctggggcctcatcagaccaaaccgagccaaagaactgatcagctagcctagtcattacatgagctgcaacttctctgggagggtatttggtttctatggactagtccatctattttattctaaaaatttttattctattttagttaataaattgtaaaatacgatgagttttcgtatttaataatttagggactaaaaccgaataaataaaagaattaaaaattactctctag

SEQ ID NO: 41269 - DNA, 2100 bp, Zea Mays
ctccacggaccacggccaagcggcagcagctgcagctctgagccccgggccctgcccctgcccctgccgcttcctcccctcagcagcatcaggggacgcggacggaggaggaggagaaggcggcgtcatcaggatcaggactgccgctgtcgccaggtccgccatggacacgaagccatttatttctgcaaaagatgccctgaagaaagaaccaattagcgatgtgattgctttaaaggattccatgaagtactttgatgctgagttcttcaatgattcaaaactacgtgagatggaagatggtgcaaaggaattcaatgtacccgcattcagagaaaatcggaaattggttgcgacggagaatggtacaatcctgttctagaagctgttattacatatactgaagatttagcatacaaacaagccaaggaggcagatgacttgctggcacaaggaaaatatcttggtcctttgcatggcattccatatggcctcaaagatataattgcggtaccacactataagaccacttggggctcaaggacgtttaaaaaccaagtccttgatagtgaagcttatgtgtacagaagattgaagtccgctggagcagtcctggtagcaaagcttgtcacgggctcacttgcctatgatgacatatggtttgggggaaggacacgaaacccctggaacatcgaggaattctctactggctcatcggcaggtccagcggctagcacctctgcaggaatggttccatttgcaattggttcagaaactgcaggatccatagcatacccagccgctagatgtggagtaactgcattgcgcccaacatttggaacagttgcacgaaccgatgtcatgagcatttctgagagtttggataagcttggtcctttctgtagaagcgcagtagattgtgctgttgtattagacacaattcgcggaacggatgccggtgatccatcatcgcgtgaggttgctttgggtgatccatttcatgttgacatcaccaaactcactgtaggctacctcgatgacgctgagatggaggttgtcgatgttctttcctctaaaggtgtcaagctggtccccttcaagctgaactacactgtggaatcagtccagtccatcctgaacataacgatggacactgatatgcttgcgcacttcgataactggcagcgggaaggacatgatgatgactatgaggcgcaagaccagtggccggtagagcttcgtcgtgcacggttaatcccagcggtagattatatacaggcgcagcgagcacggggcaagttgatcagagaaatcaaagatagcttcactgttgatgcgtttgttggcaacgtgactgactgggagcgtgtctgtctcgggaaccttgttgggatgcctgtggtcgtggtgccgacaggcttgaagagcatcgagaacccgcctaaaggcggtacgaagagaagaacaacagtgacgacaggcatctacgctcctcctgaccacgaccatattgctctggcgctggcaatggcgtaccagtccgtcactgatcacaacaaacagcggccgccgatcgatgatctggggccgaatgatgtcatacaaagatagttcaacctgctcatggaccgcgatgatccggtgatggtagcacgagggtcgttatggttatggaagctgaagttgaagacgatcagtgagccagaatggctggccacctggcagaagacatcagctgtggaagtatcaagtaccaatccacatatgggcttcttcatcagctcaaataactcagcactttttttttctgaagcaggcagcattgtatcaccttaacatacgttacaaaggaggttctggatttcatctggggcctcatcagaccaaaccgagccaaagaactgatcagctagcctagtcattacatgagctgcaacttctctgggagggtatttggtttctatggactagtccatctattttattctaaaaatttttattctattttagttaataaattgtaaaatacgatgagttttcgtatttaataatttagggactaaaaccgaataaataaaagaattaaaaattactctctag

SEQ ID NO: 41270 - DNA, 2471 bp, Zea Mays
ctccacggaccacggccaagcggcagcagctgcagctctgagccccgggccctgcccctgcccctgccgcttcctcccctgtacggtcccctcctctttcacctccgactgcgcccacgcgcggccccgggcgcggacgacaggtgtccggcatgctgccgccacgtccaccccgaccgacgccccttccctcctcccgccccttccacttcctcgttgtcgtctccgtcctctgtttcgcagccatcctgacgccagcccccgccgctgtagcagcagcagcatcaggggacgcggacggaggaggaggagaaggcggcgtcatcaggatcaggactgccgctgtcgccaggtccgccatggacacgaagccatttatttctgcaaaagatgccctgaagaaagaaccaattagcgatgtgattgctttaaaggattccatgaagtactttgatgctgagttcttcaatgattcaaaactacgtgagatggaagatggtgcaaaggaattcaatgtacccgcattcagagaaaatcggaaattggttgcgacggagaatggtgggttgcacaacccttctgttttactcttcaaatcatcatggagtagtggcagtatgacaagtgagactagaagtttcgagtaccctcgtgcgtcttctgtacatcgtccaactaatgatgaagatattgcatttatgtcggtaatcgagcttggagagcttattaggacaaagcaaataacatcacgtgaacttacagatatatttctgaggagattaaagaggtacaatcctgttctagaagctgttattacatatactgaagatttagcatacaaacaagccaaggaggcagatgacttgctggcacaaggaaaatatcttggtcctttgcatggcattccatatggcctcaaagatataattgcggtaccacactataagaccacttggggctcaaggacgtttaaaaaccaagtccttgatagtgaagcttatgtgtacagaagattgaagtccgctggagcagtcctggtagcaaagcttgtcacgggctcacttgcctatgatgacatatggtttgggggaaggacacgaaacccctggaacatcgaggaattctctactggctcatcggcaggtccagcggctagcacctctgcagaaactgcaggatccatagcatacccagccgctagatgtggagtaactgcattgcgcccaacatttggaacagttgcacgaaccgatgataagcttggtcctttctgtagaagcgcagtagattgtgctgttgtattagacacaattcgcggaacggatgccggtgatccatcatcgcgtgaggttgctttgggtgatccatttcatgttgacatcaccaaactcactgtaggctacctcgatgacgctgagatggaggttgtcgatgttctttcctctaaaggtgtcaagctggtccccttcaagctgaactacactgtggaatcagtccagtccatcctgaacataacgatggacactgatatgcttgcgcacttcgataactggcagcgggaaggacatgatgatgactatgaggcgcaagaccagtggccggtagagcttcgtcgtgcacggttaatcccagcggtagattatatacaggcgcagcgagcacggggcaagttgatcagagaaatcaaagatagcttcactgttgatgcgtttgttggcaacgtgactgactgggagcgtgtctgtctcgggaaccttgttgggatgcctgtggtcgtggtgccgacaggcttgaagagcatcgagaacccgcctaaaggcggtacgaagagaagaacaacagtgacgacaggcatctacgctcctcctgaccacgaccatattgctctggcgctggcaatggcgtaccagtccgtcactgatcacaacaaacagcggccgccgatcgatgatctggggccgaatgatgtcatacaaagatagttcaacctgctcatggaccgcgatgatccggtgatggtagcacgagggtcgttatggttatggaagctgaagttgaagacgatcagtgagccagaatggctggccacctggcagaagacatcagctgtggaagtatcaagtaccaatccacatatgggcttcttcatcagctcaaataactcagcactttttttttctgaagcaggcagcattgtatcaccttaacatacgttacaaaggaggttctggatttcatctggggcctcatcagaccaaaccgagccaaagaactgatcagctagcctagtcattacatgagctgcaacttctctgggagggtatttggtttctatggactagtccatctattttattctaaaaatttttattctattttagttaataaattgtaaaatacgatgagttttcgtatttaataatttagggactaaaaccgaataaataaaagaattaaaaattactctctag

SEQ ID NO: 41271 - DNA, 2383 bp, Zea Mays
ctccacggaccacggccaagcggcagcagctgcagctctgagccccgggccctgcccctgcccctgccgcttcctcccctcagcagcatcaggggacgcggacggaggaggaggagaaggcggcgtcatcaggatcaggactgccgctgtcgccaggtccgccatgaacagtgggaggtgtctttcgtatactcatgtttgcaaataccacaagatttggaaggacacgaagccatttatttctgcaaaagatgccctgaagaaagaaccaattagcgatgtgattgctttaaaggattccatgaagtactttgatgctgagttcttcaatgattcaaaactacgtgagatggaagatggtgcaaaggaattcaatgtacccgcattcagagaaaatcggaaattggttgcgacggagaatggtgggttgcacaacccttctgttttactcttcaaatcatcatggagtagtggcagtatgacaagtgagactagaagtttcgagtaccctcgtgcgtcttctgtacatcgtccaactaatgatgaagatattgcatttatgtcggtaatcgagcttggagagcttattaggacaaagcaaataacatcacgtgaacttacagatatatttctgaggagattaaagaggtacaatcctgttctagaagctgttattacatatactgaagatttagcatacaaacaagccaaggaggcagatgacttgctggcacaaggaaaatatcttggtcctttgcatggcattccatatggcctcaaagatataattgcggtaccacactataagaccacttggggctcaaggacgtttaaaaaccaagtccttgatagtgaagcttatgtgtacagaagattgaagtccgctggagcagtcctggtagcaaagcttgtcacgggctcacttgcctatgatgacatatggtttgggggaaggacacgaaacccctggaacatcgaggaattctctactggctcatcggcaggtccagcggctagcacctctgcaggaatggttccatttgcaattggttcagaaactgcaggatccatagcatacccagccgctagatgtggagtaactgcattgcgcccaacatttggaacagttgcacgaaccgatgtcatgagcatttctgagagtttggataagcttggtcctttctgtagaagcgcagtagattgtgctgttgtattagacacaattcgcggaacggatgccggtgatccatcatcgcgtgaggttgctttgggtgatccatttcatgttgacatcaccaaactcactgtaggctacctcgatgacgctgagatggaggttgtcgatgttctttcctctaaaggtgtcaagctggtccccttcaagctgaactacactgtggaatcagtccagtccatcctgaacataacgatggacactgatatgcttgcgcacttcgataactggcagcgggaaggacatgatgatgactatgaggcgcaagaccagtggccggtagagcttcgtcgtgcacggttaatcccagcggtagattatatacaggcgcagcgagcacggggcaagttgatcagagaaatcaaagatagcttcactgttgatgcgtttgttggcaacgtgactgactgggagcgtgtctgtctcgggaaccttgttgggatgcctgtggtcgtggtgccgacaggcttgaagagcatcgagaacccgcctaaaggcggtacgaagagaagaacaacagtgacgacaggcatctacgctcctcctgaccacgaccatattgctctggcgctggcaatggcgtaccagtccgtcactgatcacaacaaacagcggccgccgatcgatgatctggggccgaatgatgtcatacaaagatagttcaacctgctcatggaccgcgatgatccggtgatggtagcacgagggtcgttatggttatggaagctgaagttgaagacgatcagtgagccagaatggctggccacctggcagaagacatcagctgtggaagtatcaagtaccaatccacatatgggcttcttcatcagctcaaataactcagcactttttttttctgaagcaggcagcattgtatcaccttaacatacgttacaaaggaggttctggatttcatctggggcctcatcagaccaaaccgagccaaagaactgatcagctagcctagtcattacatgagctgcaacttctctgggagggtatttggtttctatggactagtccatctattttattctaaaaatttttattctattttagttaataaattgtaaaatacgatgagttttcgtatttaataatttagggactaaaaccgaataaataaaagaattaaaaattactctctag

SEQ ID NO: 41272 - DNA, 2564 bp, Zea Mays
ctccacggaccacggccaagcggcagcagctgcagctctgagccccgggccctgcccctgcccctgccgcttcctcccctgtacggtcccctcctctttcacctccgactgcgcccacgcgcggccccgggcgcggacgacaggtgtccggcatgctgccgccacgtccaccccgaccgacgccccttccctcctcccgccccttccacttcctcgttgtcgtctccgtcctctgtttcgcagccatcctgacgccagcccccgccgctgtagcagcagcagcatcaggggacgcggacggaggaggaggagaaggcggcgtcatcaggatcaggactgccgctgtcgccaggtccgccatggcatggccatcaaaatgtaaatggttgcccttacagaacagtgggaggtgtctttcgtatactcatgtttgcaaataccacaagatttggaaggacacgaagccatttatttctgcaaaagatgccctgaagaaagaaccaattagcgatgtgattgctttaaaggattccatgaagtactttgatgctgagttcttcaatgattcaaaactacgtgagatggaagatggtgcaaaggaattcaatgtacccgcattcagagaaaatcggaaattggttgcgacggagaatggtgggttgcacaacccttctgttttactcttcaaatcatcatggagtagtggcagtatgacaagtgagactagaagtttcgagtaccctcgtgcgtcttctgtacatcgtccaactaatgatgaagatattgcatttatgtcggtaatcgagcttggagagcttattaggacaaagcaaataacatcacgtgaacttacagatatatttctgaggagattaaagaggtacaatcctgttctagaagctgttattacatatactgaagatttagcatacaaacaagccaaggaggcagatgacttgctggcacaaggaaaatatcttggtcctttgcatggcattccatatggcctcaaagatataattgcggtaccacactataagaccacttggggctcaaggacgtttaaaaaccaagtccttgatagtgaagcttatgtgtacagaagattgaagtccgctggagcagtcctggtagcaaagcttgtcacgggctcacttgcctatgatgacatatggtttgggggaaggacacgaaacccctggaacatcgaggaattctctactggctcatcggcaggtccagcggctagcacctctgcagaaactgcaggatccatagcatacccagccgctagatgtggagtaactgcattgcgcccaacatttggaacagttgcacgaaccgatgataagcttggtcctttctgtagaagcgcagtagattgtgctgttgtattagacacaattcgcggaacggatgccggtgatccatcatcgcgtgaggttgctttgggtgatccatttcatgttgacatcaccaaactcactgtaggctacctcgatgacgctgagatggaggttgtcgatgttctttcctctaaaggtgtcaagctggtccccttcaagctgaactacactgtggaatcagtccagtccatcctgaacataacgatggacactgatatgcttgcgcacttcgataactggcagcgggaaggacatgatgatgactatgaggcgcaagaccagtggccggtagagcttcgtcgtgcacggttaatcccagcggtagattatatacaggcgcagcgagcacggggcaagttgatcagagaaatcaaagatagcttcactgttgatgcgtttgttggcaacgtgactgactgggagcgtgtctgtctcgggaaccttgttgggatgcctgtggtcgtggtgccgacaggcttgaagagcatcgagaacccgcctaaaggcggtacgaagagaagaacaacagtgacgacaggcatctacgctcctcctgaccacgaccatattgctctggcgctggcaatggcgtaccagtccgtcactgatcacaacaaacagcggccgccgatcgatgatctggggccgaatgatgtcatacaaagatagttcaacctgctcatggaccgcgatgatccggtgatggtagcacgagggtcgttatggttatggaagctgaagttgaagacgatcagtgagccagaatggctggccacctggcagaagacatcagctgtggaagtatcaagtaccaatccacatatgggcttcttcatcagctcaaataactcagcactttttttttctgaagcaggcagcattgtatcaccttaacatacgttacaaaggaggttctggatttcatctggggcctcatcagaccaaaccgagccaaagaactgatcagctagcctagtcattacatgagctgcaacttctctgggagggtatttggtttctatggactagtccatctattttattctaaaaatttttattctattttagttaataaattgtaaaatacgatgagttttcgtatttaataatttagggactaaaaccgaataaataaaagaattaaaaattactctctag

SEQ ID NO: 41273 - DNA, 2437 bp, Zea Mays
ctccacggaccacggccaagcggcagcagctgcagctctgagccccgggccctgcccctgcccctgccgcttcctcccctgtacggtcccctcctctttcacctccgactgcgcccacgcgcggccccgggcgcggacgacaggtgtccggcatgctgccgccacgtccaccccgaccgacgccccttccctcctcccgccccttccacttcctcgttgtcgtctccgtcctctgtttcgcagccatcctgacgccagcccccgccgctgtagcagcagcagcatcaggggacgcggacggaggaggaggagaaggcggcgtcatcaggatcaggactgccgctgtcgccaggacacgaagccatttatttctgcaaaagatgccctgaagaaagaaccaattagcgatgtgattgctttaaaggattccatgaagtactttgatgctgagttcttcaatgattcaaaactacgtgagatggaagatggtgcaaaggaattcaatgtacccgcattcagagaaaatcggaaattggttgcgacggagaatggtgggttgcacaacccttctgttttactcttcaaatcatcatggagtagtggcagtatgacaagtgagactagaagtttcgagtaccctcgtgcgtcttctgtacatcgtccaactaatgatgaagatattgcatttatgtcggtaatcgagcttggagagcttattaggacaaagcaaataacatcacgtgaacttacagatatatttctgaggagattaaagaggtacaatcctgttctagaagctgttattacatatactgaagatttagcatacaaacaagccaaggaggcagatgacttgctggcacaaggaaaatatcttggtcctttgcatggcattccatatggcctcaaagatataattgcggtaccacactataagaccacttggggctcaaggacgtttaaaaaccaagtccttgatagtgaagcttatgtgtacagaagattgaagtccgctggagcagtcctggtagcaaagcttgtcacgggctcacttgcctatgatgacatatggtttgggggaaggacacgaaacccctggaacatcgaggaattctctactggctcatcggcaggtccagcggctagcacctctgcagaaactgcaggatccatagcatacccagccgctagatgtggagtaactgcattgcgcccaacatttggaacagttgcacgaaccgatgtcatgagcatttctgagagtttggataagcttggtcctttctgtagaagcgcagtagattgtgctgttgtattagacacaattcgcggaacggatgccggtgatccatcatcgcgtgaggttgctttgggtgatccatttcatgttgacatcaccaaactcactgtaggctacctcgatgacgctgagatggaggttgtcgatgttctttcctctaaaggtgtcaagctggtccccttcaagctgaactacactgtggaatcagtccagtccatcctgaacataacgatggacactgatatgcttgcgcacttcgataactggcagcgggaaggacatgatgatgactatgaggcgcaagaccagtggccggcgcagcgagcacggggcaagttgatcagagaaatcaaagatagcttcactgttgatgcgtttgttggcaacgtgactgactgggagcgtgtctgtctcgggaaccttgttgggatgcctgtggtcgtggtgccgacaggcttgaagagcatcgagaacccgcctaaaggcggtacgaagagaagaacaacagtgacgacaggcatctacgctcctcctgaccacgaccatattgctctggcgctggcaatggcgtaccagtccgtcactgatcacaacaaacagcggccgccgatcgatgatctggggccgaatgatgtcatacaaagatagttcaacctgctcatggaccgcgatgatccggtgatggtagcacgagggtcgttatggttatggaagctgaagttgaagacgatcagtgagccagaatggctggccacctggcagaagacatcagctgtggaagtatcaagtaccaatccacatatgggcttcttcatcagctcaaataactcagcactttttttttctgaagcaggcagcattgtatcaccttaacatacgttacaaaggaggttctggatttcatctggggcctcatcagaccaaaccgagccaaagaactgatcagctagcctagtcattacatgagctgcaacttctctgggagggtatttggtttctatggactagtccatctattttattctaaaaatttttattctattttagttaataaattgtaaaatacgatgagttttcgtatttaataatttagggactaaaaccgaataaataaaagaattaaaaattactctctag

SEQ ID NO: 41274 - DNA, 2073 bp, Zea Mays
ctccacggaccacggccaagcggcagcagctgcagctctgagccccgggccctgcccctgcccctgccgcttcctcccctcagcagcatcaggggacgcggacggaggaggaggagaaggcggcgtcatcaggatcaggactgccgctgtcgccaggtccgccatggacacgaagccatttatttctgcaaaagatgccctgaagaaagaaccaattagcgatgtgattgctttaaaggattccatgaagtactttgatgctgagttcttcaatgattcaaaactacgtgagatggaagatggtgcaaaggaattcaatgtacccgcattcagagaaaatcggaaattggttgcgacggagaatggtacaatcctgttctagaagctgttattacatatactgaagatttagcatacaaacaagccaaggaggcagatgacttgctggcacaaggaaaatatcttggtcctttgcatggcattccatatggcctcaaagatataattgcggtaccacactataagaccacttggggctcaaggacgtttaaaaaccaagtccttgatagtgaagcttatgtgtacagaagattgaagtccgctggagcagtcctggtagcaaagcttgtcacgggctcacttgcctatgatgacatatggtttgggggaaggacacgaaacccctggaacatcgaggaattctctactggctcatcggcaggtccagcggctagcacctctgcagaaactgcaggatccatagcatacccagccgctagatgtggagtaactgcattgcgcccaacatttggaacagttgcacgaaccgatgtcatgagcatttctgagagtttggataagcttggtcctttctgtagaagcgcagtagattgtgctgttgtattagacacaattcgcggaacggatgccggtgatccatcatcgcgtgaggttgctttgggtgatccatttcatgttgacatcaccaaactcactgtaggctacctcgatgacgctgagatggaggttgtcgatgttctttcctctaaaggtgtcaagctggtccccttcaagctgaactacactgtggaatcagtccagtccatcctgaacataacgatggacactgatatgcttgcgcacttcgataactggcagcgggaaggacatgatgatgactatgaggcgcaagaccagtggccggtagagcttcgtcgtgcacggttaatcccagcggtagattatatacaggcgcagcgagcacggggcaagttgatcagagaaatcaaagatagcttcactgttgatgcgtttgttggcaacgtgactgactgggagcgtgtctgtctcgggaaccttgttgggatgcctgtggtcgtggtgccgacaggcttgaagagcatcgagaacccgcctaaaggcggtacgaagagaagaacaacagtgacgacaggcatctacgctcctcctgaccacgaccatattgctctggcgctggcaatggcgtaccagtccgtcactgatcacaacaaacagcggccgccgatcgatgatctggggccgaatgatgtcatacaaagatagttcaacctgctcatggaccgcgatgatccggtgatggtagcacgagggtcgttatggttatggaagctgaagttgaagacgatcagtgagccagaatggctggccacctggcagaagacatcagctgtggaagtatcaagtaccaatccacatatgggcttcttcatcagctcaaataactcagcactttttttttctgaagcaggcagcattgtatcaccttaacatacgttacaaaggaggttctggatttcatctggggcctcatcagaccaaaccgagccaaagaactgatcagctagcctagtcattacatgagctgcaacttctctgggagggtatttggtttctatggactagtccatctattttattctaaaaatttttattctattttagttaataaattgtaaaatacgatgagttttcgtatttaataatttagggactaaaaccgaataaataaaagaattaaaaattactctctag

SEQ ID NO: 41275 - DNA, 1856 bp, Zea Mays
ggtaaatatattgctaatcaggctgatcctctaaggcattatcgccactattggcagtacttgcaccttttccctcagcttcatttagaattatgtctggtatacatagcttctcattacaaactgattctcatttggggtgctatctgagttcaggtccacttgaagtttgtgctcatatgactaatatactgactgcctgagaattcttggtgtcaatgttgactagtgtattttttttctctttgagtcctttgcatggcattccatatggcctcaaagatataattgcggtaccacactataagaccacttggggctcaaggacgtttaaaaaccaagtccttgatagtgaagcttatgtgtacagaagattgaagtccgctggagcagtcctggtagcaaagcttgtcacgggctcacttgcctatgatgacatatggtttgggggaaggacacgaaacccctggaacatcgaggaattctctactggctcatcggcaggtccagcggctagcacctctgcagaaactgcaggatccatagcatacccagccgctagatgtggagtaactgcattgcgcccaacatttggaacagttgcacgaaccgatgtcatgagcatttctgagagtttggataagcttggtcctttctgtagaagcgcagtagattgtgctgttgtattagacacaattcgcggaacggatgccggtgatccatcatcgcgtgaggttgctttgggtgatccatttcatgttgacatcaccaaactcactgtaggctacctcgatgacgctgagatggaggttgtcgatgttctttcctctaaaggtgtcaagctggtccccttcaagctgaactacactgtggaatcagtccagtccatcctgaacataacgatggacactgatatgcttgcgcacttcgataactggcagcgggaaggacatgatgatgactatgaggcgcaagaccagtggccggtagagcttcgtcgtgcacggttaatcccagcggtagattatatacaggcgcagcgagcacggggcaagttgatcagagaaatcaaagatagcttcactgttgatgcgtttgttggcaacgtgactgactgggagcgtgtctgtctcgggaaccttgttgggatgcctgtggtcgtggtgccgacaggcttgaagagcatcgagaacccgcctaaaggcggtacgaagagaagaacaacagtgacgacaggcatctacgctcctcctgaccacgaccatattgctctggcgctggcaatggcgtaccagtccgtcactgatcacaacaaacagcggccgccgatcgatgatctggggccgaatgatgtcatacaaagatagttcaacctgctcatggaccgcgatgatccggtgatggtagcacgagggtcgttatggttatggaagctgaagttgaagacgatcagtgagccagaatggctggccacctggcagaagacatcagctgtggaagtatcaagtaccaatccacatatgggcttcttcatcagctcaaataactcagcactttttttttctgaagcaggcagcattgtatcaccttaacatacgttacaaaggaggttctggatttcatctggggcctcatcagaccaaaccgagccaaagaactgatcagctagcctagtcattacatgagctgcaacttctctgggagggtatttggtttctatggactagtccatctattttattctaaaaatttttattctattttagttaataaattgtaaaatacgatgagttttcgtatttaataatttagggactaaaaccgaataaataaaagaattaaaaattactctctag

SEQ ID NO: 41276 - DNA, 1856 bp, Zea Mays
cctctaaggcattatcgccactattggcagtacttgcaccttttccctcagcttcatttagaattatgtctggtatacatagcttctcattacaaactgattctcatttggggtgctatctgagttcaggtccacttgaagtttgtgctcatatgactaatatactgactgcctgagaattcttggtgtcaatgttgactagtgtattttttttctctttgagtcctttgcatggcattccatatggcctcaaagatataattgcggtaccacactataagaccacttggggctcaaggacgtttaaaaaccaagtccttgatagtgaagcttatgtgtacagaagattgaagtccgctggagcagtcctggtagcaaagcttgtcacgggctcacttgcctatgatgacatatggtttgggggaaggacacgaaacccctggaacatcgaggaattctctactggctcatcggcaggtccagcggctagcacctctgcaggaatggttccatttgcaattggttcagaaactgcaggatccatagcatacccagccgctagatgtggagtaactgcattgcgcccaacatttggaacagttgcacgaaccgatgtcatgagcatttctgagagtttggataagcttggtcctttctgtagaagcgcagtagattgtgctgttgtattagacacaattcgcggaacggatgccggtgatccatcatcgcgtgaggttgctttgggtgatccatttcatgttgacatcaccaaactcactgtaggctacctcgatgacgctgagatggaggttgtcgatgttctttcctctaaaggtgtcaagctggtccccttcaagctgaactacactgtggaatcagtccagtccatcctgaacataacgatggacactgatatgcttgcgcacttcgataactggcagcgggaaggacatgatgatgactatgaggcgcaagaccagtggccggtagagcttcgtcgtgcacggttaatcccagcggtagattatatacaggcgcagcgagcacggggcaagttgatcagagaaatcaaagatagcttcactgttgatgcgtttgttggcaacgtgactgactgggagcgtgtctgtctcgggaaccttgttgggatgcctgtggtcgtggtgccgacaggcttgaagagcatcgagaacccgcctaaaggcggtacgaagagaagaacaacagtgacgacaggcatctacgctcctcctgaccacgaccatattgctctggcgctggcaatggcgtaccagtccgtcactgatcacaacaaacagcggccgccgatcgatgatctggggccgaatgatgtcatacaaagatagttcaacctgctcatggaccgcgatgatccggtgatggtagcacgagggtcgttatggttatggaagctgaagttgaagacgatcagtgagccagaatggctggccacctggcagaagacatcagctgtggaagtatcaagtaccaatccacatatgggcttcttcatcagctcaaataactcagcactttttttttctgaagcaggcagcattgtatcaccttaacatacgttacaaaggaggttctggatttcatctggggcctcatcagaccaaaccgagccaaagaactgatcagctagcctagtcattacatgagctgcaacttctctgggagggtatttggtttctatggactagtccatctattttattctaaaaatttttattctattttagttaataaattgtaaaatacgatgagttttcgtatttaataatttagggactaaaaccgaataaataaaagaattaaaaattactctctag

SEQ ID NO: 41277 - DNA, 4549 bp, Zea Mays
ctgattgttgtttaattcggacaaggagttggacctcgtgagagcgttggatccgtctccgtgcctccgtgcctccgtgggcctgttccgacgtcatcgtccgcatcgcacggccgtttattgaggaacaattcgtttttattctcacgttcattccgcgggcgcagggttctctctcgtggcgatcgctgaccgtagcggccaccctccgccaggtggccaggttttcgtgtggccctccgccatgtcttcgcaggaccctccgccggcgacgagcacccaaaagaagcaatcggagagtttggtaaacctactggcagaggcaagcaggttctaccgcaaagcatataatgaactgttctcaggtttaattactgagtgggagcctgaatcatctactaatactcctgactatatgctttttgggtggcatctcttcttaacgcttcgttcgagatcaccagaattgttcaaggacctggtgtcctgcatccatggattagttgctgtattggccatactattggttcacgtgccagctaaattcaggaccttcacgattgaaggctcttctcacttaatcaaacaaactgagaaaggcgtggatcttattgcttctttatgtcataattatcatacctctgaagaatgtttgaaagaaatgatggacaagtctcacaaggcaatagaagaagttttcagtatgaaagcactaagtgcttcagagtgcaaaacagagaatttggataagatagacacagatcgcctgatgtatttcaaaggtctcattgatatggagtgtttccagtcaaatctggaaaaaatggagaaactatgtaattctaataactgtgaagcggagcttgattttaaattaattttgaccaataatgattatattccctgtgccgagaatttgtcgagggattccactaatttaggatgttcaaagtgtgcctttgaaacattggcatctcccacaaagacaataaagaacatgttgactgttcctagttcccctttgtcacccaccaacggtggttcagtcaagattgtgcaaatgacaccaataacttctgccatgacgacagctaagtggcttcgtgaggtgatatcttcattgccagagaagccttcatctaagcttcagcagttgatgtcatcatgcgatagagatttgacaaatgccgtcacagaaagggtcagcatagttctggaagcaatttttccaaccaagtcttctgctgatcggggtggctcattaggcctcaattgtgcaaatgcctttgatactctatgggcagatgccagaaaaatggaggcttccaagttgtactatagggtattagaggcaatctgcagagctgagttacaaaacagcaatgtaaacaatctaactccattgctgtcaaatgagcgttttcaccgatgtttgattgcatgttcagcggagctagtattggcgacacataagacggtcatcatgatgtttcctgctgttcttgagagtactggtctaacctcatttgatttgagcaaaataattgagaactttgtgagacatgaagagaccctcccaagagaattgaaaagacacctaaattccttagaagaacaaattttggaaagcatggcatgggagaaaggttcatcattgtataactcactgattgttgccaggccatctgttgcttcagaaattaatcgctttggtcttctggctgaatcaatgccatctcttgatgacttagtggcaaggcagaatattcatattgagggcttgcctgctacaccatctaaaaaacgtgctgctggtcgagacgacaatgctgatcctcgatcaccaaagagaccatgcaatgaatctaggagcacagtagtagaacacaatttgcagacacctccacccaagcaatgccacatggtgttgactagtttgaaagcaaaatgccatccactccagtccacatttgcaagtccaactgtcagtaatcctgttggtgggaacgaaaaatgtgctgacgtgacaattcagatattcttttccaaaattctgaagttagctgctattagaataagaaacttgtgtgaaaggattcaatatatggaacagacagagcgtgtctataatgtcttcaagcagattcttgatcaacagacaacattattttttaatagacacatcgatcaacttattctttgctgtctttatggtgttgcaaaggtttgccaattagaactctcattcagggagatactcaacaattacaaaaaagaagcacaatgcaaaccagaagtttttttaagcatctatattggaagtaggaatcataatggggtattaatatcacgccatgttgatatcattactttttacaatgaggtctttgttccagcagccaagcctttcctggtgtcattaatatcatctggtactcgtccagaagacaagaagaatgctagtggccaagttcctggatcaccgaagctatctcctttcccaaatttaccagatatgtccccaaagaaagtttcagcttctcataatgtatatgtgtctcctttgcggcaaaccaagatggatttactgctgtcaccaagttccaggagtttttatgcatgcattggtgaaggcacccatgcttatcagagcccatctaaagatttggctgctataaatagccgcctaaattataatggtcggagagtaaacagtcgattaaactttgacatggtgagcgactcagtggtagctggtagtctaggccagccaaatggtggttctacttccttggatcctgcagctgcatttagccccctttcaaagagaaagccagatacttgatcaaatataaatggcgatctctctcgtatatagctcacagctccatagcagtctattcttctgaataagtgggttgactggagtgatttaactgtacatgtatgtgttagtgagaaccagcagtttataggcagcaaactgttttaaattagctttgaggttttatcaccatttccctgctgattgaacatattttagattgtaacatctgctttgtagaatgctaatgaatctttagttttcagtgggttgacattaaaaatccttatcctagttggctggttgttgggagacattcatcaaggttatatttggtcgtcaaatagtactgtacttgattcatatctttcatatttttcactagcgttggcaaccgtaaattgctttcctgactaggaacatattcttcacaagtatggcaactctaaactatttgaccttttatattctcatttttaagtactttctctatttctgctacttttgtactgtgtatttccagcttctccaccagactgattgttagagtgtatgctcctatattatccatgtatgtgtaaaatgggctgctagcccattagggttagggttcccctgggtctatatatgtaaccaccctctatgcaatagaagttgaatatcagtttctatcactaatgattccatattcagtgggctgcaagtgatttgacatacgtgccttatccttcaggtatgtctcatgttgactttgcttttgtaatggtactgttggcttcattgctggaatgctggttataatcaacctttactgctctatattgttctttttttggtttgcacaaccagggtggttggttttctgaatcaatcaatccatttcctcggacacaagataatttttgtatgttacacttcccaaaattgcaattaattcagaagtctgcctactttcattcagcgagataaggaaaatctgaaatgctatcaccatttaaaacattggctcctggaagttcagcaactgctccttcgttcagcgcttctcatttctgattgtattgaccgagagcatccacctttccttctggtatcaactgaatgagttgccgacaccgacccatctgcgcataatggcaggttaggtgttgctgtagaatgagatggttaccatctttacaagctcaggctatatgatttcagcagcactgtaacctggggtgcaaatgttaaggccctgcaagcactttccaggccacaccaattctgcttggttcttgaagatacattcttcctatggtgccccctatataaaagccatttctggttgttatgtttatccttgacatgtcaacagattagtgttgggttgcagtcatgcggtccttaagtctcggagaaggcgagaagtcattgctgctagcattgtgatcgtcggccacgaaagtaatcaaaaagtgagagctacttgttcctagcaaatggagaagggcgatatataggtttatgatcaaattcagtgtatgcaagcagcatattttgtttagagttagcttttgaggttcatcatttcatttcacagctgattctctatgttgtaactccttagtcgtgtagaaattagaatgctatctgcttaatttttagtgaataatttgctagtatattttttaatgtaattgcagtagctctgcctcttcattaaggaattgaccccgttttaag

SEQ ID NO: 41278 - DNA, 4394 bp, Zea Mays
ctgattgttgtttaattcggacaaggagttggacctcgtgagagcgttggatccgtctccgtgcctccgtgcctccgtgggcctgttccgacgtcatcgtccgcatcgcacggccgtttattgaggaacaattcgtttttattctcacgttcattccgcgggcgcagggttctctctcgtggcgatcgctgaccgtagcggccaccctccgccaggtggccaggttttcgtgtggccctccgccatgtcttcgcaggaccctccgccggcgacgagcacccaaaagaagcaatcggagagtttggtaaacctactggcagaggcaagcaggttctaccgcaaagcatataatgaactgttctcaggtttaattactgagtgggagcctgaatcatctactaatactcctgactatatgctttttgggtggcatctcttcttaacgcttcgttcgagatcaccagaattgttcaaggacctggtgtcctgcatccatggattagttgctgtattggccatactattggttcacgtgccagctaaattcaggaccttcacgattgaaggctcttctcacttaatcaaacaaactgagaaaggcgtggatcttattgcttctttatgtcataattatcatacctctgaagaatgtttgaaagaaatgatggacaagtctcacaaggcaatagaagaagttttcagtatgaaagcactaagtgcttcagagtgcaaaacagagaatttggataagatagacacagatcgcctgatgtatttcaaaggtctcattgatatggagtgtttccagtcaaatctggaaaaaatggagaaactatgtaattctaataactgtgaagcggagcttgattttaaattaattttgaccaataatgattatattccctgtgccgagaatttgtcgagggattccactaatttaggatgttcaaagtgtgcctttgaaacattggcatctcccacaaagacaataaagaacatgttgactgttcctagttcccctttgtcacccaccaacggtggttcagtcaagattgtgcaaatgacaccaataacttctgccatgacgacagctaagtggcttcgtgaggtgatatcttcattgccagagaagccttcatctaagcttcagcagttgatgtcatcatgcgatagagatttgacaaatgccgtcacagaaagggtcagcatagttctggaagcaatttttccaaccaagtcttctgctgatcggggtggctcattaggcctcaattgtgcaaatgcctttgatactctatgggcagatgccagaaaaatggaggcttccaagttgtactatagggtattagaggcaatctgcagagctgagttacaaaacagcaatgtaaacaatctaactccattgctgtcaaatgagcgttttcaccgatgtttgattgcatgttcagcggagctagtattggcgacacataagacggtcatcatgatgtttcctgctgttcttgagagtactggtctaacctcatttgatttgagcaaaataattgagaactttgtgagacatgaagagaccctcccaagagaattgaaaagacacctaaattccttagaagaacaaattttggaaagcatggcatgggagaaaggttcatcattgtataactcactgattgttgccaggccatctgttgcttcagaaattaatcgctttggtcttctggctgaatcaatgccatctcttgatgacttagtggcaaggcagaatattcatattgagggcttgcctgctacaccatctaaaaaacgtgctgctggtcgagacgacaatgctgatcctcgatcaccaaagagaccatgcaatgaatctaggagcacagtagtagaacacaatttgcagacacctccacccaagcaatgccacatggtgttgactagtttgaaagcaaaatgccatccactccagtccacatttgcaagtccaactgtcagtaatcctgttggtgggaacgaaaaatgtgctgacgtgacaattcagatattcttttccaaaattctgaagttagctgctattagaataagaaacttgtgtgaaaggattcaatatatggaacagacagagcgtgtctataatgtcttcaagcagattcttgatcaacagacaacattattttttaatagacacatcgatcaacttattctttgctgtctttatggtgttgcaaaggtttgccaattagaactctcattcagggagatactcaacaattacaaaaaagaagcacaatgcaaaccagaagtttttttaagcatctatattggaagtaggaatcataatggggtattaatatcacgccatgttgatatcattactttttacaatgaggtctttgttccagcagccaagcctttcctggtgtcattaatatcatctggtactcgtccagaagacaagaagaatgctagtggccaagttcctggatcaccgaagctatctcctttcccaaatttaccagatatgtccccaaagaaagtttcagcttctcataatgtatatgtgtctcctttgcggcaaaccaagatggatttactgctgtcaccaagttccaggagtttttatgcatgcattggtgaaggcacccatgcttatcagagcccatctaaagatttggctgctataaatagccgcctaaattataatggtcggagagtaaacagtcgattaaactttgacatggtgagcgactcagtggtagctggtagtctaggccagccaaatggtggttctacttccttggatcctgcagctgcatttagccccctttcaaagagaaagccagatacttgatcaaatataaatggcgatctctctcgtatatagctcacagctccatagcagtctattcttctgaataagtgggttgactggagtgatttaactgtacatgtatgtgttagtgagaaccagcagtttataggcagcaaactgttttaaattagctttgaggttttatcaccatttccctgctgattgaacatattttagattgtaacatctgctttgtagaatgctaatgaatctttagttttcagtgggttgacattaaaaatccttatcctagttggctggttgttgggagacattcatcaaggttatatttggtcgtcaaatagtactgtacttgattcatatctttcatatttttcactagcgttggcaaccgtaaattgctttcctgactaggaacatattcttcacaagtatggcaactctaaactatttgaccttttatattctcatttttaagtactttctctatttctgctacttttgtactgtgtatttccagcttctccaccagactgattgttagagtgtatgctcctatattatccatgtatgtgtaaaatgggctgctagcccattagggttagggttcccctgggtctatatatgtaaccaccctctatgcaatagaagttgaatatcagtttctatcactaatgattccatattcagtgggctgcaagtgatttgacatacgtgccttatccttcagggtggttggttttctgaatcaatcaatccatttcctcggacacaagataatttttgcgagataaggaaaatctgaaatgctatcaccatttaaaacattggctcctggaagttcaggagtcgttcttaaacagcaactgctccttcgttcagcgcttctcatttctgattgtattgaccgagagcatccacctttccttctggtatcaactgaatgagttgccgacaccgacccatctgcgcataatggcaggttaggtgttgctgtagaatgagatggttaccatctttacaagctcaggctatatgatttcagcagcactgtaacctggggtgcaaatgttaaggccctgcaagcactttccaggccacaccaattctgcttggttcttgaagatacattcttcctatggtgccccctatataaaagccatttctggttgttatgtttatccttgacatgtcaacagattagtgttgggttgcagtcatgcggtccttaagtctcggagaaggcgagaagtcattgctgctagcattgtgatcgtcggccacgaaagtaatcaaaaagtgagagctacttgttcctagcaaatggagaagggcgatatataggtttatgatcaaattcagtgtatgcaagcagcatattttgtttagagttagcttttgaggttcatcatttcatttcacagctgattctctatgttgtaactccttagtcgtgtagaaattagaatgctatctgcttaatttttagtgaataatttgctagtatattttttaatgtaattgcagtagctctgcctcttcattaaggaattgaccccgttttaag

SEQ ID NO: 41279 - DNA, 4282 bp, Zea Mays
ctgattgttgtttaattcggacaaggagttggacctcgtgagagcgttggatccgtctccgtgcctccgtgcctccgtgggcctgttccgacgtcatcgtccgcatcgcacggccgtttattgaggaacaattcgtttttattctcacgttcattccgcgggcgcagggttctctctcgtggcgatcgctgaccgtagcggccaccctccgccaggtggccaggttttcgtgtggccctccgccatgtcttcgcaggaccctccgccggcgacgagcacccaaaagaagcaatcggagagtttggtaaacctactggcagaggcaagcaggttctaccgcaaagcatataatgaactgttctcaggtttaattactgagtgggagcctgaatcatctactaatactcctgactatatgctttttgggtggcatctcttcttaacgcttcgttcgagatcaccagaattgttcaaggacctggtgtcctgcatccatggattagttgctgtattggccatactattggttcacgtgccagctaaattcaggaccttcacgattgaaggctcttctcacttaatcaaacaaactgagaaaggcgtggatcttattgcttctttatgtcataattatcatacctctgaagaatgtttgaaagaaatgatggacaagtctcacaaggcaatagaagaagttttcagtatgaaagcactaagtgcttcagagtgcaaaacagagaatttggataagatagacacagatcgcctgatgtatttcaaaggtctcattgatatggagtgtttccagtcaaatctggaaaaaatggagaaactatgtaattctaataactgtgaagcggagcttgattttaaattaattttgaccaataatgattatattccctgtgccgagaatttgtcgagggattccactaatttaggatgttcaaagtgtgcctttgaaacattggcatctcccacaaagacaataaagaacatgttgactgttcctagttcccctttgtcacccaccaacggtggttcagtcaagattgtgcaaatgacaccaataacttctgccatgacgacagctaagtggcttcgtgaggtgatatcttcattgccagagaagccttcatctaagcttcagcagttgatgtcatcatgcgatagagatttgacaaatgccgtcacagaaagggtcagcatagttctggaagcaatttttccaaccaagtcttctgctgatcggggtggctcattaggcctcaattgtgcaaatgcctttgatactctatgggcagatgccagaaaaatggaggcttccaagttgtactatagggtattagaggcaatctgcagagctgagttacaaaacagcaatgtaaacaatctaactccattgctgtcaaatgagcgttttcaccgatgtttgattgcatgttcagcggagctagtattggcgacacataagacggtcatcatgatgtttcctgctgttcttgagagtactggtctaacctcatttgatttgagcaaaataattgagaactttgtgagacatgaagagaccctcccaagagaattgaaaagacacctaaattccttagaagaacaaattttggaaagcatggcatgggagaaaggttcatcattgtataactcactgattgttgccaggccatctgttgcttcagaaattaatcgctttggtcttctggctgaatcaatgccatctcttgatgacttagtggcaaggcagaatattcatattgagggcttgcctgctacaccatctaaaaaacgtgctgctggtcgagacgacaatgctgatcctcgatcaccaaagagaccatgcaatgaatctaggagcacagtagtagaacacaatttgcagacacctccacccaagcaatgccacatggtgttgactagtttgaaagcaaaatgccatccactccagtccacatttgcaagtccaactgtcagtaatcctgttggtgggaacgaaaaatgtgctgacgtgacaattcagatattcttttccaaaattctgaagttagctgctattagaataagaaacttgtgtgaaaggattcaatatatggaacagacagagcgtgtctataatgtcttcaagcagattcttgatcaacagacaacattattttttaatagacacatcgatcaacttattctttgctgtctttatggtgttgcaaaggtttgccaattagaactctcattcagggagatactcaacaattacaaaaaagaagcacaatgcaaaccagaagtttttttaagcatctatattggaagtaggaatcataatggggtattaatatcacgccatgttgatatcattactttttacaatgaggtctttgttccagcagccaagcctttcctggtgtcattaatatcatctggtactcgtccagaagacaagaagaatgctagtggccaagttcctggatcaccgaagctatctcctttcccaaatttaccagatatgtccccaaagaaagtttcagcttctcataatgtatatgtgtctcctttgcggcaaaccaagatggatttactgctgtcaccaagttccaggagtttttatgcatgcattggtgaaggcacccatgcttatcagagcccatctaaagatttggctgctataaatagccgcctaaattataatggtcggagagtaaacagtcgattaaactttgacatggtgagcgactcagtggtagctggtagtctaggccagccaaatggtggttctacttccttggatcctgcagctgcatttagccccctttcaaagagaaagccagatacttgatcaaatataaatggcgatctctctcgtatatagctcacagctccatagcagtctattcttctgaataagtgggttgactggagtgatttaactgtacatgtatgtgttagtgagaaccagcagtttataggcagcaaactgttttaaattagctttgaggttttatcaccatttccctgctgattgaacatattttagattgtaacatctgctttgtagaatgctaatgaatctttagttttcagtgggttgacattaaaaatccttatcctagttggctggttgttgggagacattcatcaaggttatatttggtcgtcaaatagtactgtacttgattcatatctttcatatttttcactagcgttggcaaccgtaaattgctttcctgactaggaacatattcttcacaagtatggcaactctaaactatttgaccttttatattctcatttttaagtactttctctatttctgctacttttgtactgtgtatttccagcttctccaccagactgattgttagagtgtatgctcctatattatccatgtatgtgtaaaatgggctgctagcccattagggttagggttcccctgggtctatatatgtaaccaccctctatgcaatagaagttgaatatcagtttctatcactaatgattccatattcagtgggctgcaagtgatttgacatacgtgccttatccttcagggtggttggttttctgaatcaatcaatccatttcctcggacacaagataatttttgcgagataaggaaaatctgaaatgctatcaccatttaaaacattggctcctggaagttcagcgcttctcatttctgattgtattgaccgagagcatccacctttccttctggtatcaactgaatgagttgccgacaccgacccatctgcgcataatggcaggttaggtgttgctgtagaatgagatggttaccatctttacaagctcaggctatatgatttcagcagcactgtaacctggggtgcaaatgttaaggccctgcaagcactttccaggccacaccaattctgcttggttcttgaagatacattcttcctatgtcatgcggtccttaagtctcggagaaggcgagaagtcattgctgctagcattgtgatcgtcggccacgaaagtaatcaaaaagtgagagctacttgttcctagcaaatggagaagggcgatatataggtttatgatcaaattcagtgtatgcaagcagcatattttgtttagagttagcttttgaggttcatcatttcatttcacagctgattctctatgttgtaactccttagtcgtgtagaaattagaatgctatctgcttaatttttagtgaataatttgctagtatattttttaatgtaattgcagtagctctgcctcttcattaaggaattgaccccgttttaag

SEQ ID NO: 41280 - DNA, 4327 bp, Zea Mays
ctcgtgagagcgttggatccgtctccgtgcctccgtgcctccgtgggcctgttccgacgtcatcggttctctctcgtggcgatcgctgaccgtagcggccaccctccgccaggtggccaggttttcgtgtggccctccgccatgtcttcgcaggaccctccgccggcgacgagcacccaaaagaagcaatcggagagtttggtaaacctactggcagaggcaagcaggttctaccgcaaagcatataatgaactgttctcaggtttaattactgagtgggagcctgaatcatctactaatactcctgactatatgctttttgggtggcatctcttcttaacgcttcgttcgagatcaccagaattgttcaaggacctggtgtcctgcatccatggattagttgctgtattggccatactattggttcacgtgccagctaaattcaggaccttcacgattgaaggctcttctcacttaatcaaacaaactgagaaaggcgtggatcttattgcttctttatgtcataattatcatacctctgaagaatgtttgaaagaaatgatggacaagtctcacaaggcaatagaagaagttttcagtatgaaagcactaagtgcttcagagtgcaaaacagagaatttggataagatagacacagatcgcctgatgtatttcaaaggtctcattgatatggagtgtttccagtcaaatctggaaaaaatggagaaactatgtaattctaataactgtgaagcggagcttgattttaaattaattttgaccaataatgattatattccctgtgccgagaatttgtcgagggattccactaatttaggatgttcaaagtgtgcctttgaaacattggcatctcccacaaagacaataaagaacatgttgactgttcctagttcccctttgtcacccaccaacggtggttcagtcaagattgtgcaaatgacaccaataacttctgccatgacgacagctaagtggcttcgtgaggtgatatcttcattgccagagaagccttcatctaagcttcagcagttgatgtcatcatgcgatagagatttgacaaatgccgtcacagaaagggtcagcatagttctggaagcaatttttccaaccaagtcttctgctgatcggggtggctcattaggcctcaattgtgcaaatgcctttgatactctatgggcagatgccagaaaaatggaggcttccaagttgtactatagggtattagaggcaatctgcagagctgagttacaaaacagcaatgtaaacaatctaactccattgctgtcaaatgagcgttttcaccgatgtttgattgcatgttcagcggagctagtattggcgacacataagacggtcatcatgatgtttcctgctgttcttgagagtactggtctaacctcatttgatttgagcaaaataattgagaactttgtgagacatgaagagaccctcccaagagaattgaaaagacacctaaattccttagaagaacaaattttggaaagcatggcatgggagaaaggttcatcattgtataactcactgattgttgccaggccatctgttgcttcagaaattaatcgctttggtcttctggctgaatcaatgccatctcttgatgacttagtggcaaggcagaatattcatattgagggcttgcctgctacaccatctaaaaaacgtgctgctggtcgagacgacaatgctgatcctcgatcaccaaagagaccatgcaatgaatctaggagcacagtagtagaacacaatttgcagacacctccacccaagcaatgccacatggtgttgactagtttgaaagcaaaatgccatccactccagtccacatttgcaagtccaactgtcagtaatcctgttggtgggaacgaaaaatgtgctgacgtgacaattcagatattcttttccaaaattctgaagttagctgctattagaataagaaacttgtgtgaaaggattcaatatatggaacagacagagcgtgtctataatgtcttcaagcagattcttgatcaacagacaacattattttttaatagacacatcgatcaacttattctttgctgtctttatggtgttgcaaaggtttgccaattagaactctcattcagggagatactcaacaattacaaaaaagaagcacaatgcaaaccagaagtttttttaagcatctatattggaagtaggaatcataatggggtattaatatcacgccatgttgatatcattactttttacaatgaggtctttgttccagcagccaagcctttcctggtgtcattaatatcatctggtactcgtccagaagacaagaagaatgctagtggccaagttcctggatcaccgaagctatctcctttcccaaatttaccagatatgtccccaaagaaagtttcagcttctcataatgtatatgtgtctcctttgcggcaaaccaagatggatttactgctgtcaccaagttccaggagtttttatgcatgcattggtgaaggcacccatgcttatcagagcccatctaaagatttggctgctataaatagccgcctaaattataatggtcggagagtaaacagtcgattaaactttgacatggtgagcgactcagtggtagctggtagtctaggccagccaaatggtggttctacttccttggatcctgcagctgcatttagccccctttcaaagagaaagccagatacttgatcaaatataaatggcgatctctctcgtatatagctcacagctccatagcagtctattcttctgaataagtgggttgactggagtgatttaactgtacatgtatgtgttagtgagaaccagcagtttataggcagcaaactgttttaaattagctttgaggttttatcaccatttccctgctgattgaacatattttagattgtaacatctgctttgtagaatgctaatgaatctttagttttcagtgggttgacattaaaaatccttatcctagttggctggttgttgggagacattcatcaaggttatatttggtcgtcaaatagtactgtacttgattcatatctttcatatttttcactagcgttggcaaccgtaaattgctttcctgactaggaacatattcttcacaagtatggcaactctaaactatttgaccttttatattctcatttttaagtactttctctatttctgctacttttgtactgtgtatttccagcttctccaccagactgattgttagagtgtatgctcctatattatccatgtatgtgtaaaatgggctgctagcccattagggttagggttcccctgggtctatatatgtaaccaccctctatgcaatagaagttgaatatcagtttctatcactaatgattccatattcagtgggctgcaagtgatttgacatacgtgccttatccttcaggtatgtctcatgttgactttgcttttgtaatggtactgttggcttcattgctggaatgctggttataatcaacctttactgctctatattgttctttttttggtttgcacaaccagggtggttggttttctgaatcaatcaatccatttcctcggacacaagataatttttgtatgttacacttcccaaaattgcaattaattcagaagtctgcctactttcattcagcgagataaggaaaatctgaaatgctatcaccatttaaaacattggctcctggaagttcaggttaggtgttgctgtagaatgagatggttaccatctttacaagctcaggctatatgatttcagcagcactgtaacctggggtgcaaatgttaaggccctgcaagcactttccaggccacaccaattctgcttggttcttgaagatacattcttcctatggtgccccctatataaaagccatttctggttgttatgtttatccttgacatgtcaacagattagtgttgggttgcagtcatgcggtccttaagtctcggagaaggcgagaagtcattgctgctagcattgtgatcgtcggccacgaaagtaatcaaaaagtgagagctacttgttcctagcaaatggagaagggcgatatataggtttatgatcaaattcagtgtatgcaagcagcatattttgtttagagttagcttttgaggttcatcatttcatttcacagctgattctctatgttgtaactccttagtcgtgtagaaattagaatgctatctgcttaatttttagtgaataatttgctagtatattttttaatgtaattgcagtagctctgcctcttcattaaggaattgaccccgttttaag

SEQ ID NO: 41281 - DNA, 4318 bp, Zea Mays
ctccgtgcctccgtgcctccgtgggcctgttccgacgtcatcgtccgcatcgcacggccgtttattgaggaacaattcgtttttattctcacgttcattccgcgggcgcagggttctctctcgtggcgatcgctgaccgtagcggccaccctccgccaggtggccaggttttcgtgtggccctccgccatgtcttcgcaggaccctccgccggcgacgagcacccaaaagaagcaatcggagagtttggtaaacctactggcagaggcaagcaggttctaccgcaaagcatataatgaactgttctcaggtttaattactgagtgggagcctgaatcatctactaatactcctgactatatgctttttgggtggcatctcttcttaacgcttcgttcgagatcaccagaattgttcaaggacctggtgtcctgcatccatggattagttgctgtattggccatactattggttcacgtgccagctaaattcaggaccttcacgattgaaggctcttctcacttaatcaaacaaactgagaaaggcgtggatcttattgcttctttatgtcataattatcatacctctgaagaatgtttgaaagaaatgatggacaagtctcacaaggcaatagaagaagttttcagtatgaaagcactaagtgcttcagagtgcaaaacagagaatttggataagatagacacagatcgcctgatgtatttcaaaggtctcattgatatggagtgtttccagtcaaatctggaaaaaatggagaaactatgtaattctaataactgtgaagcggagcttgattttaaattaattttgaccaataatgattatattccctgtgccgagaatttgtcgagggattccactaatttaggatgttcaaagtgtgcctttgaaacattggcatctcccacaaagacaataaagaacatgttgactgttcctagttcccctttgtcacccaccaacggtggttcagtcaagattgtgcaaatgacaccaataacttctgccatgacgacagctaagtggcttcgtgaggtgatatcttcattgccagagaagccttcatctaagcttcagcagttgatgtcatcatgcgatagagatttgacaaatgccgtcacagaaagggtcagcatagttctggaagcaatttttccaaccaagtcttctgctgatcggggtggctcattaggcctcaattgtgcaaatgcctttgatactctatgggcagatgccagaaaaatggaggcttccaagttgtactatagggtattagaggcaatctgcagagctgagttacaaaacagcaatgtaaacaatctaactccattgctgtcaaatgagcgttttcaccgatgtttgattgcatgttcagcggagctagtattggcgacacataagacggtcatcatgatgtttcctgctgttcttgagagtactggtctaacctcatttgatttgagcaaaataattgagaactttgtgagacatgaagagaccctcccaagagaattgaaaagacacctaaattccttagaagaacaaattttggaaagcatggcatgggagaaaggttcatcattgtataactcactgattgttgccaggccatctgttgcttcagaaattaatcgctttggtcttctggctgaatcaatgccatctcttgatgacttagtggcaaggcagaatattcatattgagggcttgcctgctacaccatctaaaaaacgtgctgctggtcgagacgacaatgctgatcctcgatcaccaaagagaccatgcaatgaatctaggagcacagtagtagaacacaatttgcagacacctccacccaagcaatgccacatggtgttgactagtttgaaagcaaaatgccatccactccagtccacatttgcaagtccaactgtcagtaatcctgttggtgggaacgaaaaatgtgctgacgtgacaattcagatattcttttccaaaattctgaagttagctgctattagaataagaaacttgtgtgaaaggattcaatatatggaacagacagagcgtgtctataatgtcttcaagcagattcttgatcaacagacaacattattttttaatagacacatcgatcaacttattctttgctgtctttatggtgttgcaaaggtttgccaattagaactctcattcagggagatactcaacaattacaaaaaagaagcacaatgcaaaccagaagtttttttaagcatctatattggaagtaggaatcataatggggtattaatatcacgccatgttgatatcattactttttacaatgaggtctttgttccagcagccaagcctttcctggtgtcattaatatcatctggtactcgtccagaagacaagaagaatgctagtggccaagttcctggatcaccgaagctatctcctttcccaaatttaccagatatgtccccaaagaaagtttcagcttctcataatgtatatgtgtctcctttgcggcaaaccaagatggatttactgctgtcaccaagttccaggagtttttatgcatgcattggtgaaggcacccatgcttatcagagcccatctaaagatttggctgctataaatagccgcctaaattataatggtcggagagtaaacagtcgattaaactttgacatggtgagcgactcagtggtagctggtagtctaggccagccaaatggtggttctacttccttggatcctgcagctgcatttagccccctttcaaagagaaagccagatacttgatcaaatataaatggcgatctctctcgtatatagctcacagctccatagcagtctattcttctgaataagtgggttgactggagtgatttaactgtacatgtatgtgttagtgagaaccagcagtttataggcagcaaactgttttaaattagctttgaggttttatcaccatttccctgctgattgaacatattttagattgtaacatctgctttgtagaatgctaatgaatctttagttttcagtgggttgacattaaaaatccttatcctagttggctggttgttgggagacattcatcaaggttatatttggtcgtcaaatagtactgtacttgattcatatctttcatatttttcactagcgttggcaaccgtaaattgctttcctgactaggaacatattcttcacaagtatggcaactctaaactatttgaccttttatattctcatttttaagtactttctctatttctgctacttttgtactgtgtatttccagcttctccaccagactgattgttagagtgtatgctcctatattatccatgtatgtgtaaaatgggctgctagcccattagggttagggttcccctgggtctatatatgtaaccaccctctatgcaatagaagttgaatatcagtttctatcactaatgattccatattcagtgggctgcaagtgatttgacatacgtgccttatccttcaggtatgtctcatgttgactttgcttttgtaatggtactgttggcttcattgctggaatgctggttataatcaacctttactgctctatattgttctttttttggtttgcacaaccagggtggttggttttctgaatcaatcaatccatttcctcggacacaagataatttttgcgagataaggaaaatctgaaatgctatcaccatttaaaacattggctcctggaagttcaggttaggtgttgctgtagaatgagatggttaccatctttacaagctcaggctatatgatttcagcagcactgtaacctggggtgcaaatgttaaggccctgcaagcactttccaggccacaccaattctgcttggttcttgaagatacattcttcctatggtgccccctatataaaagccatttctggttgttatgtttatccttgacatgtcaacagattagtgttgggttgcagtcatgcggtccttaagtctcggagaaggcgagaagtcattgctgctagcattgtgatcgtcggccacgaaagtaatcaaaaagtgagagctacttgttcctagcaaatggagaagggcgatatataggtttatgatcaaattcagtgtatgcaagcagcatattttgtttagagttagcttttgaggttcatcatttcatttcacagctgattctctatgttgtaactccttagtcgtgtagaaattagaatgctatctgcttaatttttagtgaataatttgctagtatattttttaatgtaattgcagtagctctgcctcttcattaaggaattgaccccgttttaag

SEQ ID NO: 41282 - DNA, 3533 bp, Zea Mays
ctccgtgcctccgtgcctccgtgggcctgttccgacgtcatcgtccgcatcgcacggccgtttattgaggaacaattcgtttttattctcacgttcattccgcgggcgcagggttctctctcgtggcgatcgctgaccgtagcggccaccctccgccaggtggccaggttttcgtgtggccctccgccatgtcttcgcaggaccctccgccggcgacgagcacccaaaagaagcaatcggagagtttggtaaacctactggcagaggcaagcaggttctaccgcaaagcatataatgaactgttctcaggtttaattactgagtgggagcctgaatcatctactaatactcctgactatatgctttttgggtggcatctcttcttaacgcttcgttcgagatcaccagaattgttcaaggacctggtgtcctgcatccatggattagttgctgtattggccatactattggttcacgtgccagctaaattcaggaccttcacgattgaaggctcttctcacttaatcaaacaaactgagaaaggcgtggatcttattgcttctttatgtcataattatcatacctctgaagaatgtttgaaagaaatgatggacaagtctcacaaggcaatagaagaagttttcagtatgaaagcactaagtgcttcagagtgcaaaacagagaatttggataagatagacacagatcgcctgatgtatttcaaaggtctcattgatatggagtgtttccagtcaaatctggaaaaaatggagaaactatgtaattctaataactgtgaagcggagcttgattttaaattaattttgaccaataatgattatattccctgtgccgagaatttgtcgagggattccactaatttaggatgttcaaagtgtgcctttgaaacattggcatctcccacaaagacaataaagaacatgttgactgttcctagttcccctttgtcacccaccaacggtggttcagtcaagattgtgcaaatgacaccaataacttctgccatgacgacagctaagtggcttcgtgaggtgatatcttcattgccagagaagccttcatctaagcttcagcagttgatgtcatcatgcgatagagatttgacaaatgccgtcacagaaagggtcagcatagttctggaagcaatttttccaaccaagtcttctgctgatcggggtggctcattaggcctcaattgtgcaaatgcctttgatactctatgggcagatgccagaaaaatggaggcttccaagttgtactatagggtattagaggcaatctgcagagctgagttacaaaacagcaatgtaaacaatctaactccattgctgtcaaatgagcgttttcaccgatgtttgattgcatgttcagcggagctagtattggcgacacataagacggtcatcatgatgtttcctgctgttcttgagagtactggtctaacctcatttgatttgagcaaaataattgagaactttgtgagacatgaagagaccctcccaagagaattgaaaagacacctaaattccttagaagaacaaattttggaaagcatggcatgggagaaaggttcatcattgtataactcactgattgttgccaggccatctgttgcttcagaaattaatcgctttggtcttctggctgaatcaatgccatctcttgatgacttagtggcaaggcagaatattcatattgagggcttgcctgctacaccatctaaaaaacgtgctgctggtcgagacgacaatgctgatcctcgatcaccaaagagaccatgcaatgaatctaggagcacagtagtagaacacaatttgcagacacctccacccaagcaatgccacatggtgttgactagtttgaaagcaaaatgccatccactccagtccacatttgcaagtccaactgtcagtaatcctgttggtgggaacgaaaaatgtgctgacgtgacaattcagatattcttttccaaaattctgaagttagctgctattagaataagaaacttgtgtgaaaggattcaatatatggaacagacagagcgtgtctataatgtcttcaagcagattcttgatcaacagacaacattattttttaatagacacatcgatcaacttattctttgctgtctttatggtgttgcaaaggtttgccaattagaactctcattcagggagatactcaacaattacaaaaaagaagcacaatgcaaaccagaagtttttttaagcatctatattggaagtaggaatcataatggggtattaatatcacgccatgttgatatcattactttttacaatgaggtctttgttccagcagccaagcctttcctggtgtcattaatatcatctggtactcgtccagaagacaagaagaatgctagtggccaagttcctggatcaccgaagctatctcctttcccaaatttaccagatatgtccccaaagaaagtttcagcttctcataatgtatatgtgtctcctttgcggcaaaccaagatggatttactgctgtcaccaagttccaggagtttttatgcatgcattggtgaaggcacccatgcttatcagagcccatctaaagatttggctgctataaatagccgcctaaattataatggtcggagagtaaacagtcgattaaactttgacatgggtggttggttttctgaatcaatcaatccatttcctcggacacaagataatttttgtatgttacacttcccaaaattgcaattaattcagaagtctgcctactttcattcagttagttctcagcaacactgaaaggatatgaatcagtcaacccgatagatgtttatctggttattccaaacaatctgacatcacatctgtttctgcaggcgagataaggaaaatctgaaatgctatcaccatttaaaacattggctcctggaagttcaggttaggtgttgctgtagaatgagatggttaccatctttacaagctcaggctatatgatttcagcagcactgtaacctggggtgcaaatgttaaggccctgcaagcactttccaggccacaccaattctgcttggttcttgaagatacattcttcctatggtgccccctatataaaagccatttctggttgttatgtttatccttgacatgtcaacagattagtgttgggttgcagtcatgcggtccttaagtctcggagaaggcgagaagtcattgctgctagcattgtgatcgtcggccacgaaagtaatcaaaaagtgagagctacttgttcctagcaaatggagaagggcgatatataggtttatgatcaaattcagtgtatgcaagcagcatattttgtttagagttagcttttgaggttcatcatttcatttcacagctgattctctatgttgtaactccttagtcgtgtagaaattagaatgctatctgcttaatttttagtgaataatttgctagtatattttttaatgtaattgcagtagctctgcctcttcattaaggaattgaccccgttttaag

SEQ ID NO: 41283 - DNA, 4316 bp, Zea Mays
gcctccgtgggcctgttccgacgtcatcgtccgcatcgcacggccgtttattgaggaacaattcgtttttattctcacgttcattccgcgggcgcagggttctctctcgtggcgatcgctgaccgtagcggccaccctccgccaggtggccaggttttcgtgtggccctccgccatgtcttcgcaggaccctccgccggcgacgagcacccaaaagaagcaatcggagagtttggtaaacctactggcagagaattgttcaaggacctggtgtcctgcatccatggattagttgctgtattggccatactattggttcacgtgccagctaaattcaggaccttcacgattgaaggctcttctcacttaatcaaacaaactgagaaaggcgtggatcttattgcttctttatgtcataattatcatacctctgaagaatgtttgaaagaaatgatggacaagtctcacaaggcaatagaagaagttttcagtatgaaagcactaagtgcttcagagtgcaaaacagagaatttggataagatagacacagatcgcctgatgtatttcaaaggtctcattgatatggagtgtttccagtcaaatctggaaaaaatggagaaactatgtaattctaataactgtgaagcggagcttgattttaaattaattttgaccaataatgattatattccctgtgccgagaatttgtcgagggattccactaatttaggatgttcaaagtgtgcctttgaaacattggcatctcccacaaagacaataaagaacatgttgactgttcctagttcccctttgtcacccaccaacggtggttcagtcaagattgtgcaaatgacaccaataacttctgccatgacgacagctaagtggcttcgtgaggtgatatcttcattgccagagaagccttcatctaagcttcagcagttgatgtcatcatgcgatagagatttgacaaatgccgtcacagaaagggtcagcatagttctggaagcaatttttccaaccaagtcttctgctgatcggggtggctcattaggcctcaattgtgcaaatgcctttgatactctatgggcagatgccagaaaaatggaggcttccaagttgtactatagggtattagaggcaatctgcagagctgagttacaaaacagcaatgtaaacaatctaactccattgctgtcaaatgagcgttttcaccgatgtttgattgcatgttcagcggagctagtattggcgacacataagacggtcatcatgatgtttcctgctgttcttgagagtactggtctaacctcatttgatttgagcaaaataattgagaactttgtgagacatgaagagaccctcccaagagaattgaaaagacacctaaattccttagaagaacaaattttggaaagcatggcatgggagaaaggttcatcattgtataactcactgattgttgccaggccatctgttgcttcagaaattaatcgctttggtcttctggctgaatcaatgccatctcttgatgacttagtggcaaggcagaatattcatattgagggcttgcctgctacaccatctaaaaaacgtgctgctggtcgagacgacaatgctgatcctcgatcaccaaagagaccatgcaatgaatctaggagcacagtagtagaacacaatttgcagacacctccacccaagcaatgccacatggtgttgactagtttgaaagcaaaatgccatccactccagtccacatttgcaagtccaactgtcagtaatcctgttggtgggaacgaaaaatgtgctgacgtgacaattcagatattcttttccaaaattctgaagttagctgctattagaataagaaacttgtgtgaaaggattcaatatatggaacagacagagcgtgtctataatgtcttcaagcagattcttgatcaacagacaacattattttttaatagacacatcgatcaacttattctttgctgtctttatggtgttgcaaaggtttgccaattagaactctcattcagggagatactcaacaattacaaaaaagaagcacaatgcaaaccagaagtttttttaagcatctatattggaagtaggaatcataatggggtattaatatcacgccatgttgatatcattactttttacaatgaggtctttgttccagcagccaagcctttcctggtgtcattaatatcatctggtactcgtccagaagacaagaagaatgctagtggccaagttcctggatcaccgaagctatctcctttcccaaatttaccagatatgtccccaaagaaagtttcagcttctcataatgtatatgtgtctcctttgcggcaaaccaagatggatttactgctgtcaccaagttccaggagtttttatgcatgcattggtgaaggcacccatgcttatcagagcccatctaaagatttggctgctataaatagccgcctaaattataatggtcggagagtaaacagtcgattaaactttgacatggtgagcgactcagtggtagctggtagtctaggccagccaaatggtggttctacttccttggatcctgcagctgcatttagccccctttcaaagagaaagccagatacttgatcaaatataaatggcgatctctctcgtatatagctcacagctccatagcagtctattcttctgaataagtgggttgactggagtgatttaactgtacatgtatgtgttagtgagaaccagcagtttataggcagcaaactgttttaaattagctttgaggttttatcaccatttccctgctgattgaacatattttagattgtaacatctgctttgtagaatgctaatgaatctttagttttcagtgggttgacattaaaaatccttatcctagttggctggttgttgggagacattcatcaaggttatatttggtcgtcaaatagtactgtacttgattcatatctttcatatttttcactagcgttggcaaccgtaaattgctttcctgactaggaacatattcttcacaagtatggcaactctaaactatttgaccttttatattctcatttttaagtactttctctatttctgctacttttgtactgtgtatttccagcttctccaccagactgattgttagagtgtatgctcctatattatccatgtatgtgtaaaatgggctgctagcccattagggttagggttcccctgggtctatatatgtaaccaccctctatgcaatagaagttgaatatcagtttctatcactaatgattccatattcagtgggctgcaagtgatttgacatacgtgccttatccttcaggtatgtctcatgttgactttgcttttgtaatggtactgttggcttcattgctggaatgctggttataatcaacctttactgctctatattgttctttttttggtttgcacaaccagggtggttggttttctgaatcaatcaatccatttcctcggacacaagataatttttgtatgttacacttcccaaaattgcaattaattcagaagtctgcctactttcattcagttagttctcagcaacactgaaaggatatgaatcagtcaacccgatagatgtttatctggttattccaaacaatctgacatcacatctgtttctgcaggcgagataaggaaaatctgaaatgctatcaccatttaaaacattggctcctggaagttcaggttaggtgttgctgtagaatgagatggttaccatctttacaagctcaggctatatgatttcagcagcactgtaacctggggtgcaaatgttaaggccctgcaagcactttccaggccacaccaattctgcttggttcttgaagatacattcttcctatggtgccccctatataaaagccatttctggttgttatgtttatccttgacatgtcaacagattagtgttgggttgcagtcatgcggtccttaagtctcggagaaggcgagaagtcattgctgctagcattgtgatcgtcggccacgaaagtaatcaaaaagtgagagctacttgttcctagcaaatggagaagggcgatatataggtttatgatcaaattcagtgtatgcaagcagcatattttgtttagagttagcttttgaggttcatcatttcatttcacagctgattctctatgttgtaactccttagtcgtgtagaaattagaatgctatctgcttaatttttagtgaataatttgctagtatattttttaatgtaattgcagtagctctgcctcttcattaaggaattgaccccgttttaag

SEQ ID NO: 41284 - DNA, 4107 bp, Zea Mays
cctgttccgacgtcatcgtccgcatcgcacggccgtttattgaggaacaattcgtttttattctcacgttcattccgcgggcgcagggttctctctcgtggcgatcgctgaccgtagcggccaccctccgccaggtggccaggttttcgtgtggccctccgccatgtcttcgcaggaccctccgccggcgacgagcacccaaaagaagcaatcggagagtttggtaaacctactggcagaggcaagcaggttctaccgcaaagcatataatgaactgttctcaggtttaattactgagtgggagcctgaatcatctactaatactcctgactatatgctttttgggtggcatctcttcttaacgcttcgttcgagatcaccagaattgttcaaggacctggtgtcctgcatccatggattagttgctgtattggccatactattggttcacgtgccagctaaattcaggaccttcacgattgaaggctcttctcacttaatgtgcctttgaaacattggcatctcccacaaagacaataaagaacatgttgactgttcctagttcccctttgtcacccaccaacggtggttcagtcaagattgtgcaaatgacaccaataacttctgccatgacgacagctaagtggcttcgtgaggtgatatcttcattgccagagaagccttcatctaagcttcagcagttgatgtcatcatgcgatagagatttgacaaatgccgtcacagaaagggtcagcatagttctggaagcaatttttccaaccaagtcttctgctgatcggggtggctcattaggcctcaattgtgcaaatgcctttgatactctatgggcagatgccagaaaaatggaggcttccaagttgtactatagggtattagaggcaatctgcagagctgagttacaaaacagcaatgtaaacaatctaactccattgctgtcaaatgagcgttttcaccgatgtttgattgcatgttcagcggagctagtattggcgacacataagacggtcatcatgatgtttcctgctgttcttgagagtactggtctaacctcatttgatttgagcaaaataattgagaactttgtgagacatgaagagaccctcccaagagaattgaaaagacacctaaattccttagaagaacaaattttggaaagcatggcatgggagaaaggttcatcattgtataactcactgattgttgccaggccatctgttgcttcagaaattaatcgctttggtcttctggctgaatcaatgccatctcttgatgacttagtggcaaggcagaatattcatattgagggcttgcctgctacaccatctaaaaaacgtgctgctggtcgagacgacaatgctgatcctcgatcaccaaagagaccatgcaatgaatctaggagcacagtagtagaacacaatttgcagacacctccacccaagcaatgccacatggtgttgactagtttgaaagcaaaatgccatccactccagtccacatttgcaagtccaactgtcagtaatcctgttggtgggaacgaaaaatgtgctgacgtgacaattcagatattcttttccaaaattctgaagttagctgctattagaataagaaacttgtgtgaaaggattcaatatatggaacagacagagcgtgtctataatgtcttcaagcagattcttgatcaacagacaacattattttttaatagacacatcgatcaacttattctttgctgtctttatggtgttgcaaaggtttgccaattagaactctcattcagggagatactcaacaattacaaaaaagaagcacaatgcaaaccagaagtttttttaagcatctatattggaagtaggaatcataatggggtattaatatcacgccatgttgatatcattactttttacaatgaggtctttgttccagcagccaagcctttcctggtgtcattaatatcatctggtactcgtccagaagacaagaagaatgctagtggccaagttcctggatcaccgaagctatctcctttcccaaatttaccagatatgtccccaaagaaagtttcagcttctcataatgtatatgtgtctcctttgcggcaaaccaagatggatttactgctgtcaccaagttccaggagtttttatgcatgcattggtgaaggcacccatgcttatcagagcccatctaaagatttggctgctataaatagccgcctaaattataatggtcggagagtaaacagtcgattaaactttgacatggtgagcgactcagtggtagctggtagtctaggccagccaaatggtggttctacttccttggatcctgcagctgcatttagccccctttcaaagagaaagccagatacttgatcaaatataaatggcgatctctctcgtatatagctcacagctccatagcagtctattcttctgaataagtgggttgactggagtgatttaactgtacatgtatgtgttagtgagaaccagcagtttataggcagcaaactgttttaaattagctttgaggttttatcaccatttccctgctgattgaacatattttagattgtaacatctgctttgtagaatgctaatgaatctttagttttcagtgggttgacattaaaaatccttatcctagttggctggttgttgggagacattcatcaaggttatatttggtcgtcaaatagtactgtacttgattcatatctttcatatttttcactagcgttggcaaccgtaaattgctttcctgactaggaacatattcttcacaagtatggcaactctaaactatttgaccttttatattctcatttttaagtactttctctatttctgctacttttgtactgtgtatttccagcttctccaccagactgattgttagagtgtatgctcctatattatccatgtatgtgtaaaatgggctgctagcccattagggttagggttcccctgggtctatatatgtaaccaccctctatgcaatagaagttgaatatcagtttctatcactaatgattccatattcagtgggctgcaagtgatttgacatacgtgccttatccttcaggtatgtctcatgttgactttgcttttgtaatggtactgttggcttcattgctggaatgctggttataatcaacctttactgctctatattgttctttttttggtttgcacaaccagggtggttggttttctgaatcaatcaatccatttcctcggacacaagataatttttgtatgttacacttcccaaaattgcaattaattcagaagtctgcctactttcattcagcgagataaggaaaatctgaaatgctatcaccatttaaaacattggctcctggaagttcaggtgattaacaaacctccttcatctacatctgacattggcatgtatggtagagtccagcaactcttgtgatggcaggagtcgttcttaaacagcaactgctccttcgttcagcgcttctcatttctgattgttaggtgttgctgtagaatgagatggttaccatctttacaagctcaggctatatgatttcagcagcactgtaacctggggtgcaaatgttaaggccctgcaagcactttccaggccacaccaattctgcttggttcttgaagatacattcttcctatggtgccccctatataaaagccatttctggttgttatgtttatccttgacatgtcaacagattagtgttgggttgcagtcatgcggtccttaagtctcggagaaggcgagaagtcattgctgctagcattgtgatcgtcggccacgaaagtaatcaaaaagtgagagctacttgttcctagcaaatggagaagggcgatatataggtttatgatcaaattcagtgtatgcaagcagcatattttgtttagagttagcttttgaggttcatcatttcatttcacagctgattctctatgttgtaactccttagtcgtgtagaaattagaatgctatctgcttaatttttagtgaataatttgctagtatattttttaatgtaattgcagtagctctgcctcttcattaaggaattgaccccgttttaag

SEQ ID NO: 41285 - DNA, 3088 bp, Zea Mays
gtcatcgtccgcatcgcacggccgtttattgaggaacaattcgtttttattctcacgttcattccgcgggcgcagggttctctctcgtggcgatcgctgaccgtagcggccaccctccgccaggtggccaggttttcgtgtggccctccgccatgtcttcgcaggaccctccgccggcgacgagcacccaaaagaagcaatcggagagtttggtaaacctactggcagaggcaagcaggttctaccgcaaagcatataatgaactgttctcaggtttaattactgagtgggagcctgaatcatctactaatactcctgactatatgctttttgggtggcatctcttcttaacgcttcgttcgagatcaccagaattgttcaaggacctggtgtcctgcatccatggattagttgctgtattggccatactattggttcacgtgccagctaaattcaggaccttcacgattgaaggctcttctcacttaatgtgcctttgaaacattggcatctcccacaaagacaataaagaacatgttgactgttcctagttcccctttgtcacccaccaacggtggttcagtcaagattgtgcaaatgacaccaataacttctgccatgacgacagctaagtggcttcgtgaggtgatatcttcattgccagagaagccttcatctaagcttcagcagttgatgtcatcatgcgatagagatttgacaaatgccgtcacagaaagggtcagcatagttctggaagcaatttttccaaccaagtcttctgctgatcggggtggctcattaggcctcaattgtgcaaatgcctttgatactctatgggcagatgccagaaaaatggaggcttccaagttgtactatagggtattagaggcaatctgcagagctgagttacaaaacagcaatgtaaacaatctaactccattgctgtcaaatgagcgttttcaccgatgtttgattgcatgttcagcggagctagtattggcgacacataagacggtcatcatgatgtttcctgctgttcttgagagtactggtctaacctcatttgatttgagcaaaataattgagaactttgtgagacatgaagagaccctcccaagagaattgaaaagacacctaaattccttagaagaacaaattttggaaagcatggcatgggagaaaggttcatcattgtataactcactgattgttgccaggccatctgttgcttcagaaattaatcgctttggtcttctggctgaatcaatgccatctcttgatgacttagtggcaaggcagaatattcatattgagggcttgcctgctacaccatctaaaaaacgtgctgctggtcgagacgacaatgctgatcctcgatcaccaaagagaccatgcaatgaatctaggagcacagtagtagaacacaatttgcagacacctccacccaagcaatgccacatggtgttgactagtttgaaagcaaaatgccatccactccagtccacatttgcaagtccaactgtcagtaatcctgttggtgggaacgaaaaatgtgctgacgtgacaattcagatattcttttccaaaattctgaagttagctgctattagaataagaaacttgtgtgaaaggattcaatatatggaacagacagagcgtgtctataatgtcttcaagcagattcttgatcaacagacaacattattttttaatagacacatcgatcaacttattctttgctgtctttatggtgttgcaaaggtttgccaattagaactctcattcagggagatactcaacaattacaaaaaagaagcacaatgcaaaccagaagtttttttaagcatctatattggaagtaggaatcataatggggtattaatatcacgccatgttgatatcattactttttacaatgaggtctttgttccagcagccaagcctttcctggtgtcattaatatcatctggtactcgtccagaagacaagaagaatgctagtggccaagttcctggatcaccgaagctatctcctttcccaaatttaccagatatgtccccaaagaaagtttcagcttctcataatgtatatgtgtctcctttgcggcaaaccaagatggatttactgctgtcaccaagttccaggagtttttatgcatgcattggtgaaggcacccatgcttatcagagcccatctaaagatttggctgctataaatagccgcctaaattataatggtcggagagtaaacagtcgattaaactttgacatggtatgtctcatgttgactttgcttttgtaatggtactgttggcttcattgctggaatgctggttataatcaacctttactgctctatattgttctttttttggtttgcacaaccagggtggttggttttctgaatcaatcaatccatttcctcggacacaagataatttttgcgagataaggaaaatctgaaatgctatcaccatttaaaacattggctcctggaagttcaggttaggtgttgctgtagaatgagatggttaccatctttacaagctcaggctatatgatttcagcagcactgtaacctggggtgcaaatgttaaggccctgcaagcactttccaggccacaccaattctgcttggttcttgaagatacattcttcctatggtgccccctatataaaagccatttctggttgttatgtttatccttgacatgtcaacagattagtgttgggttgcagtcatgcggtccttaagtctcggagaaggcgagaagtcattgctgctagcattgtgatcgtcggccacgaaagtaatcaaaaagtgagagctacttgttcctagcaaatggagaagggcgatatataggtttatgatcaaattcagtgtatgcaagcagcatattttgtttagagttagcttttgaggttcatcatttcatttcacagctgattctctatgttgtaactccttagtcgtgtagaaattagaatgctatctgcttaatttttagtgaataatttgctagtatattttttaatgtaattgcagtagctctgcctcttcattaaggaattgaccccgttttaag

SEQ ID NO: 41286 - DNA, 4097 bp, Zea Mays
gtcatcgtccgcatcgcacggccgtttattgaggaacaattcgtttttattctcacgttcattccgcgggcgcagggttctctctcgtggcgatcgctgaccgtagcggccaccctccgccaggtggccaggttttcgtgtggccctccgccatgtcttcgcaggaccctccgccggcgacgagcacccaaaagcagaagcaatcggagagtttggtaaacctactggcagaggcaagcagaattgttcaaggacctggtgtcctgcatccatggattagttgctgtattggccatactattggttcacgtgccagctaaattcaggaccttcacgattgaaggctcttctcacttaatgtgcctttgaaacattggcatctcccacaaagacaataaagaacatgttgactgttcctagttcccctttgtcacccaccaacggtggttcagtcaagattgtgcaaatgacaccaataacttctgccatgacgacagctaagtggcttcgtgaggtgatatcttcattgccagagaagccttcatctaagcttcagcagttgatgtcatcatgcgatagagatttgacaaatgccgtcacagaaagggtcagcatagttctggaagcaatttttccaaccaagtcttctgctgatcggggtggctcattaggcctcaattgtgcaaatgcctttgatactctatgggcagatgccagaaaaatggaggcttccaagttgtactatagggtattagaggcaatctgcagagctgagttacaaaacagcaatgtaaacaatctaactccattgctgtcaaatgagcgttttcaccgatgtttgattgcatgttcagcggagctagtattggcgacacataagacggtcatcatgatgtttcctgctgttcttgagagtactggtctaacctcatttgatttgagcaaaataattgagaactttgtgagacatgaagagaccctcccaagagaattgaaaagacacctaaattccttagaagaacaaattttggaaagcatggcatgggagaaaggttcatcattgtataactcactgattgttgccaggccatctgttgcttcagaaattaatcgctttggtcttctggctgaatcaatgccatctcttgatgacttagtggcaaggcagaatattcatattgagggcttgcctgctacaccatctaaaaaacgtgctgctggtcgagacgacaatgctgatcctcgatcaccaaagagaccatgcaatgaatctaggagcacagtagtagaacacaatttgcagacacctccacccaagcaatgccacatggtgttgactagtttgaaagcaaaatgccatccactccagtccacatttgcaagtccaactgtcagtaatcctgttggtgggaacgaaaaatgtgctgacgtgacaattcagatattcttttccaaaattctgaagttagctgctattagaataagaaacttgtgtgaaaggattcaatatatggaacagacagagcgtgtctataatgtcttcaagcagattcttgatcaacagacaacattattttttaatagacacatcgatcaacttattctttgctgtctttatggtgttgcaaaggtttgccaattagaactctcattcagggagatactcaacaattacaaaaaagaagcacaatgcaaaccagaagtttttttaagcatctatattggaagtaggaatcataatggggtattaatatcacgccatgttgatatcattactttttacaatgaggtctttgttccagcagccaagcctttcctggtgtcattaatatcatctggtactcgtccagaagacaagaagaatgctagtgatatgtccccaaagaaagtttcagcttctcataatgtatatgtgtctcctttgcggcaaaccaagatggatttactgctgtcaccaagttccaggagtttttatgcatgcattggtgaaggcacccatgcttatcagagcccatctaaagatttggctgctataaatagccgcctaaattataatggtcggagagtaaacagtcgattaaactttgacatggtgagcgactcagtggtagctggtagtctaggccagccaaatggtggttctacttccttggatcctgcagctgcatttagccccctttcaaagagaaagccagatacttgatcaaatataaatggcgatctctctcgtatatagctcacagctccatagcagtctattcttctgaataagtgggttgactggagtgatttaactgtacatgtatgtgttagtgagaaccagcagtttataggcagcaaactgttttaaattagctttgaggttttatcaccatttccctgctgattgaacatattttagattgtaacatctgctttgtagaatgctaatgaatctttagttttcagtgggttgacattaaaaatccttatcctagttggctggttgttgggagacattcatcaaggttatatttggtcgtcaaatagtactgtacttgattcatatctttcatatttttcactagcgttggcaaccgtaaattgctttcctgactaggaacatattcttcacaagtatggcaactctaaactatttgaccttttatattctcatttttaagtactttctctatttctgctacttttgtactgtgtatttccagcttctccaccagactgattgttagagtgtatgctcctatattatccatgtatgtgtaaaatgggctgctagcccattagggttagggttcccctgggtctatatatgtaaccaccctctatgcaatagaagttgaatatcagtttctatcactaatgattccatattcagtgggctgcaagtgatttgacatacgtgccttatccttcaggtatgtctcatgttgactttgcttttgtaatggtactgttggcttcattgctggaatgctggttataatcaacctttactgctctatattgttctttttttggtttgcacaaccagggtggttggttttctgaatcaatcaatccatttcctcggacacaagataatttttgtatgttacacttcccaaaattgcaattaattcagaagtctgcctactttcattcagttagttctcagcaacactgaaaggatatgaatcagtcaacccgatagatgtttatctggttattccaaacaatctgacatcacatctgtttctgcaggcgagataaggaaaatctgaaatgctatcaccatttaaaacattggctcctggaagttcaggtgattaacaaacctccttcatctacatctgacattggcatgtatggtagagtccagcaactcttgtgatggcaggagtcgttcttaaacagcaactgctccttcgttcagcgcttctcatttctgattgtattgaccgagagcatccacctttccttctggtatcaactgaatgagttgccgacaccgacccatctgcgcataatggcaggttaggtgttgctgtagaatgagatggttaccatctttacaagctcaggctatatgatttcagcagcactgtaacctggggtgcaaatgttaaggccctgcaagcactttccaggccacaccaattctgcttggttcttgaagatacattcttcctatggtgccccctatataaaagccatttctggttgttatgtttatccttgacatgtcaacagattagtgttgggttgcagtcatgcggtccttaagtctcggagaaggcgagaagtcattgctgctagcattgtgatcgtcggccacgaaagtaatcaaaaagtgagagctacttgttcctagcaaatggagaagggcgatatataggtttatgatcaaattcagtgtatgcaagcagcatattttgtttagagttagcttttgaggttcatcatttcatttcacagctgattctctatgttgtaactccttagtcgtgtagaaattagaatgctatctgcttaatttttagtgaataatttgctagtatattttttaatgtaattgcagtagctctgcctcttcattaaggaattgaccccgttttaag

SEQ ID NO: 41287 - DNA, 4463 bp, Zea Mays
ctcacgttcattccgcgggcgcagggttctctctcgtggcgatcgctgaccgtagcggccaccctccgccaggtggccaggttttcgtgtggccctccgccatgtcttcgcaggaccctccgccggcgacgagcacccaaaagaagcaatcggagagtttggtaaacctactggcagaggcaagcagaattgttcaaggacctggtgtcctgcatccatggattagttgctgtattggccatactattggttcacgtgccagctaaattcaggaccttcacgattgaaggctcttctcacttaatcaaacaaactgagaaaggcgtggatcttattgcttctttatgtcataattatcatacctctgaagaatgtttgaaagaaatgatggacaagtctcacaaggcaatagaagaagttttcagtatgaaagcactaagtgcttcagagtgcaaaacagagaatttggataagatagacacaggcatggaacccttcctcgcatgtttgtgcatgcaaacctagttatggttatgctgcatactttaattagctgaattgttatgccaatattctgttccagatcgcctgatgtatttcaaaggtctcattgatatggagtgtttccagtcaaatctggaaaaaatggagaaactatgtaattctaataactgtgaagcggagcttgattttaaattaattttgaccaataatgattatattccctgtgccgagaatttgtcgagggattccactaatttaggatgttcaaagtgtgcctttgaaacattggcatctcccacaaagacaataaagaacatgttgactgttcctagttcccctttgtcacccaccaacggtggttcagtcaagattgtgcaaatgacaccaataacttctgccatgacgacagctaagtggcttcgtgaggtgatatcttcattgccagagaagccttcatctaagcttcagcagttgatgtcatcatgcgatagagatttgacaaatgccgtcacagaaagggtcagcatagttctggaagcaatttttccaaccaagtcttctgctgatcggggtggctcattaggcctcaattgtgcaaatgcctttgatactctatgggcagatgccagaaaaatggaggcttccaagttgtactatagggtattagaggcaatctgcagagctgagttacaaaacagcaatgtaaacaatctaactccattgctgtcaaatgagcgttttcaccgatgtttgattgcatgttcagcggagctagtattggcgacacataagacggtcatcatgatgtttcctgctgttcttgagagtactggtctaacctcatttgatttgagcaaaataattgagaactttgtgagacatgaagagaccctcccaagagaattgaaaagacacctaaattccttagaagaacaaattttggaaagcatggcatgggagaaaggttcatcattgtataactcactgattgttgccaggccatctgttgcttcagaaattaatcgctttggtcttctggctgaatcaatgccatctcttgatgacttagtggcaaggcagaatattcatattgagggcttgcctgctacaccatctaaaaaacgtgctgctggtcgagacgacaatgctgatcctcgatcaccaaagagaccatgcaatgaatctaggagcacagtagtagaacacaatttgcagacacctccacccaagcaatgccacatggtgttgactagtttgaaagcaaaatgccatccactccagtccacatttgcaagtccaactgtcagtaatcctgttggtgggaacgaaaaatgtgctgacgtgacaattcagatattcttttccaaaattctgaagttagctgctattagaataagaaacttgtgtgaaaggattcaatatatggaacagacagagcgtgtctataatgtcttcaagcagattcttgatcaacagacaacattattttttaatagacacatcgatcaacttattctttgctgtctttatggtgttgcaaaggtttgccaattagaactctcattcagggagatactcaacaattacaaaaaagaagcacaatgcaaaccagaagtttttttaagcatctatattggaagtaggaatcataatggggtattaatatcacgccatgttgatatcattactttttacaatgaggtctttgttccagcagccaagcctttcctggtgtcattaatatcatctggtactcgtccagaagacaagaagaatgctagtggccaagttcctggatcaccgaagctatctcctttcccaaatttaccagatatgtccccaaagaaagtttcagcttctcataatgtatatgtgtctcctttgcggcaaaccaagatggatttactgctgtcaccaagttccaggagtttttatgcatgcattggtgaaggcacccatgcttatcagagcccatctaaagatttggctgctataaatagccgcctaaattataatggtcggagagtaaacagtcgattaaactttgacatggtgagcgactcagtggtagctggtagtctaggccagccaaatggtggttctacttccttggatcctgcagctgcatttagccccctttcaaagagaaagccagatacttgatcaaatataaatggcgatctctctcgtatatagctcacagctccatagcagtctattcttctgaataagtgggttgactggagtgatttaactgtacatgtatgtgttagtgagaaccagcagtttataggcagcaaactgttttaaattagctttgaggttttatcaccatttccctgctgattgaacatattttagattgtaacatctgctttgtagaatgctaatgaatctttagttttcagtgggttgacattaaaaatccttatcctagttggctggttgttgggagacattcatcaaggttatatttggtcgtcaaatagtactgtacttgattcatatctttcatatttttcactagcgttggcaaccgtaaattgctttcctgactaggaacatattcttcacaagtatggcaactctaaactatttgaccttttatattctcatttttaagtactttctctatttctgctacttttgtactgtgtatttccagcttctccaccagactgattgttagagtgtatgctcctatattatccatgtatgtgtaaaatgggctgctagcccattagggttagggttcccctgggtctatatatgtaaccaccctctatgcaatagaagttgaatatcagtttctatcactaatgattccatattcagtgggctgcaagtgatttgacatacgtgccttatccttcaggtatgtctcatgttgactttgcttttgtaatggtactgttggcttcattgctggaatgctggttataatcaacctttactgctctatattgttctttttttggtttgcacaaccagggtggttggttttctgaatcaatcaatccatttcctcggacacaagataatttttgtatgttacacttcccaaaattgcaattaattcagaagtctgcctactttcattcagcgagataaggaaaatctgaaatgctatcaccatttaaaacattggctcctggaagttcaggtgattaacaaacctccttcatctacatctgacattggcatgtatggtagagtccagcaactcttgtgatggcaggagtcgttcttaaacagcaactgctccttcgttcagcgcttctcatttctgattgtattgaccgagagcatccacctttccttctggtatcaactgaatgagttgccgacaccgacccatctgcgcataatggcaggttaggtgttgctgtagaatgagatggttaccatctttacaagctcaggctatatgatttcagcagcactgtaacctggggtgcaaatgttaaggccctgcaagcactttccaggccacaccaattctgcttggttcttgaagatacattcttcctatggtgccccctatataaaagccatttctggttgttatgtttatccttgacatgtcaacagattagtgttgggttgcagtcatgcggtccttaagtctcggagaaggcgagaagtcattgctgctagcattgtgatcgtcggccacgaaagtaatcaaaaagtgagagctacttgttcctagcaaatggagaagggcgatatataggtttatgatcaaattcagtgtatgcaagcagcatattttgtttagagttagcttttgaggttcatcatttcatttcacagctgattctctatgttgtaactccttagtcgtgtagaaattagaatgctatctgcttaatttttagtgaataatttgctagtatattttttaatgtaattgcagtagctctgcctcttcattaaggaattgaccccgttttaag

SEQ ID NO: 41288 - DNA, 4196 bp, Zea Mays
ctcacgttcattccgcgggcgcagggttctctctcgtggcgatcgctgaccgtagcggccaccctccgccaggtggccaggttttcgtgtggccctccgccatgtcttcgcaggaccctccgccggcgacgagcacccaaaagaagcaatcggagagtttggtaaacctactggcagaggcaagcagaattgttcaaggacctggtgtcctgcatccatggattagttgctgtattggccatactattggttcacgtgccagctaaattcaggaccttcacgattgaaggctcttctcacttaatcaaacaaactgagaaaggcgtggatcttattgcttctttatgtcataattatcatacctctgaagaatgtttgaaagaaatgatggacaagtctcacaaggcaatagaagaagttttcagtatgaaagcactaagtgcttcagagtgcaaaacagagaatttggataagatagacacaggcatggaacccttcctcgcatgtttgtgcatgcaaacctagttatggttatgctgcatactttaattagctgaattgttatgccaatattctgttccagatcgcctgatgtatttcaaaggtctcattgatatggagtgtttccagtcaaatctggaaaaaatggagaaactatgtaattctaataactgtgaagcggagcttgattttaaattaattttgaccaataatgattatattccctgtgccgagaatttgtcgagggattccactaatttaggatgttcaaagtgtgcctttgaaacattggcatctcccacaaagacaataaagaacatgttgactgttcctagttcccctttgtcacccaccaacggtggttcagtcaagattgtgcaaatgacaccaataacttctgccatgacgacagctaagtggcttcgtgaggtgatatcttcattgccagagaagccttcatctaagcttcagcagttgatgtcatcatgcgatagagatttgacaaatgccgtcacagaaagggtcagcatagttctggaagcaatttttccaaccaagtcttctgctgatcggggtggctcattaggcctcaattgtgcaaatgcctttgatactctatgggcagatgccagaaaaatggaggcttccaagttgtactatagggtattagaggcaatctgcagagctgagttacaaaacagcaatgtaaacaatctaactccattgctgtcaaatgagcgttttcaccgatgtttgattgcatgttcagcggagctagtattggcgacacataagacggtcatcatgatgtttcctgctgttcttgagagtactggtctaacctcatttgatttgagcaaaataattgagaactttgtgagacatgaagagaccctcccaagagaattgaaaagacacctaaattccttagaagaacaaattttggaaagcatggcatgggagaaaggttcatcattgtataactcactgattgttgccaggccatctgttgcttcagaaattaatcgctttggtcttctggctgaatcaatgccatctcttgatgacttagtggcaaggcagaatattcatattgagggcttgcctgctacaccatctaaaaaacgtgctgctggtcgagacgacaatgctgatcctcgatcaccaaagagaccatgcaatgaatctaggagcacagtagtagaacacaatttgcagacacctccacccaagcaatgccacatggtgttgactagtttgaaagcaaaatgccatccactccagtccacatttgcaagtccaactgtcagtaatcctgttggtgggaacgaaaaatgtgctgacgtgacaattcagatattcttttccaaaattctgaagttagctgctattagaataagaaacttgtgtgaaaggattcaatatatggaacagacagagcgtgtctataatgtcttcaagcagattcttgatcaacagacaacattattttttaatagacacatcgatcaacttattctttgctgtctttatggtgttgcaaaggtttgccaattagaactctcattcagggagatactcaacaattacaaaaaagaagcacaatgcaaaccagaagtttttttaagcatctatattggaagtaggaatcataatggggtattaatatcacgccatgttgatatcattactttttacaatgaggtctttgttccagcagccaagcctttcctggtgtcattaatatcatctggtactcgtccagaagacaagaagaatgctagtggccaagttcctggatcaccgaagctatctcctttcccaaatttaccagatatgtccccaaagaaagtttcagcttctcataatgtatatgtgtctcctttgcggcaaaccaagatggatttactgctgtcaccaagttccaggagtttttatgcatgcattggtgaaggcacccatgcttatcagagcccatctaaagatttggctgctataaatagccgcctaaattataatggtcggagagtaaacagtcgattaaactttgacatggtgagcgactcagtggtagctggtagtctaggccagccaaatggtggttctacttccttggatcctgcagctgcatttagccccctttcaaagagaaagccagatacttgatcaaatataaatggcgatctctctcgtatatagctcacagctccatagcagtctattcttctgaataagtgggttgactggagtgatttaactgtacatgtatgtgttagtgagaaccagcagtttataggcagcaaactgttttaaattagctttgaggttttatcaccatttccctgctgattgaacatattttagattgtaacatctgctttgtagaatgctaatgaatctttagttttcagtgggttgacattaaaaatccttatcctagttggctggttgttgggagacattcatcaaggttatatttggtcgtcaaatagtactgtacttgattcatatctttcatatttttcactagcgttggcaaccgtaaattgctttcctgactaggaacatattcttcacaagtatggcaactctaaactatttgaccttttatattctcatttttaagtactttctctatttctgctacttttgtactgtgtatttccagcttctccaccagactgattgttagagtgtatgctcctatattatccatgtatgtgtaaaatgggctgctagcccattagggttagggttcccctgggtctatatatgtaaccaccctctatgcaatagaagttgaatatcagtttctatcactaatgattccatattcagtgggctgcaagtgatttgacatacgtgccttatccttcaggtatgtctcatgttgactttgcttttgtaatggtactgttggcttcattgctggaatgctggttataatcaacctttactgctctatattgttctttttttggtttgcacaaccagggtggttggttttctgaatcaatcaatccatttcctcggacacaagataatttttgcgagataaggaaaatctgaaatgctatcaccatttaaaacattggctcctggaagttcaggttaggtgttgctgtagaatgagatggttaccatctttacaagctcaggctatatgatttcagcagcactgtaacctggggtgcaaatgttaaggccctgcaagcactttccaggccacaccaattctgcttggttcttgaagatacattcttcctatggtgccccctatataaaagccatttctggttgttatgtttatccttgacatgtcaacagattagtgttgggttgcagtcatgcggtccttaagtctcggagaaggcgagaagtcattgctgctagcattgtgatcgtcggccacgaaagtaatcaaaaagtgagagctacttgttcctagcaaatggagaagggcgatatataggtttatgatcaaattcagtgtatgcaagcagcatattttgtttagagttagcttttgaggttcatcatttcatttcacagctgattctctatgttgtaactccttagtcgtgtagaaattagaatgctatctgcttaatttttagtgaataatttgctagtatattttttaatgtaattgcagtagctctgcctcttcattaaggaattgaccccgttttaag

SEQ ID NO: 41289 - DNA, 2113 bp, Zea Mays
cccaaagacctaaatctctcgccgctgcgcgtctctcttctttccctctgtataccgcgagcgcccgcagctagctgctagccgcgcgcccgccgctacctgcccgcctccagcgcgcccgccgcgcgtgccccgccgccacccctcgcggtgatctgtgtgggcgacgtccacagctacatcacgaagctggagagcctctggtccaacctctaggccgcactccccgccgacgccttggccaccgcgctggtcatcttcctcggcgactacaacgaccgcggcccgcacacccgcagggtcctcaacttcctcctcgcgctcccgacgcgctacccagcgcagcgccatgtcttcctctgcggcaaccacgacctcgccttcacggcgttcgttggggcgccgccgccgccgcccaacggctccccgttcttcggccacctgcgcagcgccatctctctttcctccctatctcgctgctccctcccctgccgccctgcttatttacgcccatttcttaagagaggatttgatggcctgtcagaataaaagagctcgaggaaattgcggcggccggaaatcctggtgatggtgccacacaaacacgagaatctgcttcgtcctcggcggaattgccgtcggggtcgggcgattcttcggaggacaagtgcctctgtttcgttgagctggctaggtccatggggattagtcaggacactcatgagtcgatggcaacagatgcagccaattacctttgccaccagcttcagcatcttcttgggcctatctcttctgcgacgagccaaagtggcccctgggaggagaggtcggtgatggttaggttgactcagaagctgcagaaatctaagagaaataagtggtggcggcagaggagaaggaagcatgttgcagagctttttcagaaggagcgtgcggattatgatagagttgaccaggaagctgatgaatggagggctaagcaaatagccaaggacattgcaaagcggagggtggaaagcatgcagcagattgctagaaagaaaacaaatgaggaaagaaagcgcctagaatctgagactggaaatgctttgggtgattcagatactgagccaaggaacacaaagtacatgtcactgggagacgaccgcagcctgtgcatggaatgcctggggtctgcggtcatggacaccggtgaatgccagcccctgtaccattctatcagggactactacgaggggatgaaaatgaagctggaccagcagatacccatgctcttggttgagcagcaagcgcttaacgaagccatggaaggagagagtagaggcccacaccacatgcctgagacaaggggcctgtgtctgtcggaggagcagactgtgagcagtatacttaggaggcccaggattggtggaaaccggttactggacatgagaactcagccacaaaaactgactaggagatgtgaattgaggtgtcccagtgggtcaaggctatgatttgaccgaaacttgtgctggagcagctttcactgaatgggatgacaccacttgctgctatgtgaagcttgtttcatgggaagaaggtggttacaagatttctgattatccgatgccgagaggagaggtagtggttggcggacacagtacaacaaaaggctataggactaactgtattgattccggctcccatcaagtgactccttcccctcacgttgactttgcggacagatgtctcaattctagtggtagagctacgaacaacaatctgatgtcctgatcgagagttgaacttgtgtatttgaacttgtgaactatggatgtgaacttgtgtgaatttgtgaacttatgtatttggaattatgtgaatttgcgaacttatatatttggacttgtgtgaatttgtgatatgaacatatatcaatgtgtttgaaatctgtattgtatgtgatatattgtgttgcatgtgatattttgtgtgtctattttttcatttttgtatttttattttttttctggaaaagggttaagaacgtgggtacccacgttcttaaccttaagaacgtgggtaccgtcgaacttattgtgcagtctgtgcagacccaagcagggttaag

SEQ ID NO: 41290 - DNA, 2002 bp, Zea Mays
cccaaagacctaaatctctcgccgctgcgcgtctctcttctttccctctgtataccgcgagcgcccgcagctagctgctagccgcgcgcccgccgctacctgcccgcctccagcgcgcccgccgcgcgtgccccgccgccacccctcgcggtgatctgtgtgggcgacgtccacagctacatcacgaagctggagagcctctggtccaacctctaggccgcactccccgccgacgccttggccaccgcgctggtcatcttcctcggcgactacaacgaccgcggcccgcacacccgcagggtcctcaacttcctcctcgcgctcccgacgcgctacccagcgcagcgccatgtcttcctctgcggcaaccacgacctcgccttcacggcgttcgttggggcgccgccgccgccgcccaacggctccccgttcttcggccacctgcgcagcgccatctctctttcctccctatctcgctgctccctcccctgccgccctgcttatttacgcccatttcttaagagaggatttgatggcctgtcagaataaaagagctcgaggaaattgcggcggccggaaatcctggtgatggtgccacacaaacacgagaatctgcttcgtcctcggcggaattgccgtcggggtcgggcgattcttcggaggacaagtgcctctgtttcgttgagctggctaggtccatggggattagtcaggacactcatgagtcgatggcaacagatgcagccaattacctttgccaccagcttcagcatcttcttgggcctatctcttctgcgacgagccaaagtggcccctgggaggagaggtcggtgatggttaggttgactcagaagctgcagaaatctaagagaaataagtggtggcggcagaggagaaggaagcatgttgcagagctttttcagaaggagcgtgcggattatgatagagttgaccaggaagctgatgaatggagggctaagcaaatagccaaggacattgcaaagcggagggtggaaagcatgcagcagattgctagaaagaaaacaaatgaggaaagaaagcgcctagaatctgagactggaaatgctttgggtgattcagatactgagccaaggaacacaaagtacatgtcactgggagacgaccgcagcctgtgcatggaatgcctggggtctgcggtcatggacaccggtgaatgccagcccctgtaccattctatcagggactactacgaggggatgaaaatgaagctggaccagcagatacccatgctcttggttgagcagcaagcgcttaacgaagccatggaaggagagagtagaggcccacaccacatgcctgagacaaggggcctgtgtctgtcggaggagcagactgtgagcagtatacttaggaggcccaggattggtggaaaccggttactggacatgagaactcagccacaaaaactgactaggagatgtgaattgaggtgtcccagtgggtcaaggctatgatttgaccgaaacttgtgctggagcagctttcactgaatgggatgacaccacttgctgctatgtgaaggattccggctcccatcaagtgactccttcccctcacgttgactttgcggacagatgtctcaattctagtggtagagctacgaacaacaatctgatgtcctgatcgagagttgaacttgtgtatttgaacttgtgaactatggatgtgaacttgtgtgaatttgtgaacttatgtatttggaattatgtgaatttgcgaacttatatatttggacttgtgtgaatttgtgatatgaacatatatcaatgtgtttgaaatctgtattgtatgtgatatattgtgttgcatgtgatattttgtgtgtctattttttcatttttgtatttttattttttttctggaaaagggttaagaacgtgggtacccacgttcttaaccttaagaacgtgggtaccgtcgaacttattgtgcagtctgtgcagacccaagcagggttaag

SEQ ID NO: 41291 - DNA, 1305 bp, Zea Mays
ctcttctttccctctgtataccgcgagcgcccgcagctagctgctagccgcgcgcccgccgctacctgcccgcctccagcgcgcccgccgcgcgtgccccgccgccacccctcgcggtgatctgtgtgggcgacgtccacagctacatcacgaagctggagagcctctggtccaacctctaggccgcactccccgccgacgccttggccaccgcgctggtcatcttcctcggcgactacaacgaccgcggcccgcacacccgcagggtcctcaacttcctcctcgcgctcccgacgcgctacccagcgcagcgccatgtcttcctctgcggcaaccacgacctcgccttcacggcgttcgttggggcgccgccgccgccgcccaacggctccccgttcttcggccacctgcgcagcgccatctctctttcctccctatctcgctgctccctcccctgccgccctgcttatttacgcccatttcttaagagaggatttgatggcctgtcagaataaaagagctcgaggaaattgcggcggccggaaatcctggtgatggtgccacacaaacacgagaatctgcttcgtcctcggcggaattgccgtcggggtcgggcgattcttcggaggacaagtgcctctgtttcgttgagctggctaggtccatggggattagtcaggacactcatgagtcgatggcaacagatgcagccaattacctttgccaccagcttcagcatcttcttgggcctatctcttctgcgacgagccaaagtggcccctgggaggagaggtcggtgatggttaggttgactcagaagctgcagaaatctaagagaaataagtggtggcggcagaggagaaggaagcatgttgcagagctttttcagaaggagcgtgcggattatgatagagttgaccaggaagctgatgaatggagggctaagcaaatagccaaggacattgcaaagcggagggtggaaagcatgcagcagattgctagaaagaaaacaaatgaggaaagaaagcgcctagaatctgaggttgacttggatttggagaattatgagtgtttcatagatgttactctgacgagggataacaatattaccactagaaatatatactagtctgtcattgagaaggagagaaggggtgattatattggaaagactttatagctgtgctacaaggagctgcaccatccgaaatgcgacgtctgccttcagtttattccaacgaacaggagtggcctgatagagtacagatcccacccgttctagggccagaagtattgcccttcgca

SEQ ID NO: 41292 - DNA, 1773 bp, Zea Mays
ctcttctttccctctgtataccgcgagcgcccgcagctagctgctagccgcgcgcccgccgctacctgcccgcctccagcgcgcccgccgcgcgtgccccgccgccacccctcgcggtgatctgtgtgggcgacgtccacagctacatcacgaagctggagagcctctggtccaacctctaggccgcactccccgccgacgccttggccaccgcgctggtcatcttcctcggcgactacaacgaccgcggcccgcacacccgcagggtcctcaacttcctcctcgcgctcccgacgcgctacccagcgcagcgccatgtcttcctctgcggcaaccacgacctcgccttcacggcgttcgttggggcgccgccgccgccgcccaacggctccccgttcttcggccacctgcgcagcgccatctctctttcctccctatctcgctgctccctcccctgccgccctgcttatttacgcccatttcttaagagaggatttgatggcctgtcagaataaaagagctcgaggaaattgcggcggccggaaatcctggtgatggtgccacacaaacacgagaatctgcttcgtcctcggcggaattgccgtcggggtcgggcgattcttcggaggacaagtgcctctgtttcgttgagctggctaggtccatggggattagtcaggacactcatgagtcgatggcaacagatgcagccaattacctttgccaccagcttcagcatcttcttgggcctatctcttctgcgacgagccaaagtggcccctgggaggagaggtcggtgatggttaggttgactcagaagctgcagaaatctaagagaaataagtggtggcggcagaggagaaggaagcatgttgcagagctttttcagaaggagcgtgcggattatgatagagttgaccaggaagctgatgaatggagggctaagcaaatagccaaggacattgcaaagcggagggtggaaagcatgcagcagattgctagaaagaaaacaaatgaggaaagaaagcgcctagaatctgagcaaagcgccgcctgcctgcaagaaaatttccggcgctctgtgcgagttctgcagttccggcgttgctcttctttcccgcgccacctgcctgcaagaaagcgccgggggcgtgccgtcttttccccctccacgcttcagcagcagcgcagtaaatttcgtcggcgtgttgggcagcagcagcagttggcagccaacgtcccgctcccccgcccgctattactttcccagctccgcgacaagctaggcgcgcgtcgtcgtggttgacttggatttggagaattatgagtgtttcatagatgttactctgacgagggataacaatattaccactagaaatatatactagtctgtcattgagaaggagagaaggggtgattatattggaaagactttataggtaatttttctgtggcatttatcactcgagttgcattgtatggactgtccatatcccataatctaaaatacctatggtatccataccacaagctgtgctacaaggagctgcaccatccgaaatgcgacgtctgccttcagtttgtaaggcttcctctgaaatctgaacgacctgcagactgacaaaactacatatgcgttaacttttctgtacttcgtcattgcaagaagctcattcttttcctttgtctgtttctgcagattccaacgaacaggagtggcctgatagagtacagatcccacccgttctagggccagaagtattgcccttcgca

SEQ ID NO: 41293 - DNA, 2304 bp, Zea Mays
ctcttctttccctctgtataccgcgagcgcccgcagctagctgctagccgcgcgcccgccgctacctgcccgcctccagcgcgcccgccgcgcgtgccccgccgccacccctcgcggtgatctgtgtgggcgacgtccacagctacatcacgaagctggagagcctctggtccaacctctaggccgcactccccgccgacgccttggccaccgcgctggtcatcttcctcggcgactacaacgaccgcggcccgcacacccgcagggtcctcaacttcctcctcgcgctcccgacgcgctacccagcgcagcgccatgtcttcctctgcggcaaccacgacctcgccttcacggcgttcgttggggcgccgccgccgccgcccaacggctccccgttcttcggccacctgcgcagcgccatctctctttcctccctatctcgctgctccctcccctgccgccctgcttatttacgcccatttcttaagagaggatttgatggcctgtcagaataaaagagctcgaggaaattgcggcggccggaaatcctggtgatggtgccacacaaacacgagaatctgcttcgtcctcggcggaattgccgtcggggtcgggcgattcttcggaggacaagtgcctctgtttcgttgagctggctaggtccatggggattagtcaggacactcatgagtcgatggcaacagatgcagccaattacctttgccaccagcttcagcatcttcttgggcctatctcttctgcgacgagccaaagtggcccctgggaggagaggtcggtgatggttaggttgactcagaagctgcagaaatctaagagaaataagtggtggcggcagaggagaaggaagcatgttgcagagctttttcagaaggagcgtgcggattatgatagagttgaccaggaagctgatgaatggagggctaagcaaatagccaaggacattgcaaagcggagggtggaaagcatgcagcagattgctagaaagaaaacaaatgaggaaagaaagcgcctagaatctgaggtagtatggaataaaatttcacgcccaggctgtgctgtgaaagttttcttctctagggtgtttgagaactatcttttactagttatgtgcaagcgcatgtgcgcatactactgaacattgatacaaaccagttattttgtttgtttgtttaaatttagctccaacatttaagttgtggcttactttgatacaaactaattattttgtttgtttgtataagtttagttgcaacatttaagttgtgccttactgccttcctattcttgtgatctttatctacttttattgtaactctagaaaccctctgatctctacaattgtcttagtgcaaccaatcttatgggatatcattcacctgtttttttttgtattttttggagagctattttgcaatcagttcatgaagatttgagtagtcattcaaatttcttttttactttaatctactattgattctgtggatgtttttgagttaatagtatcatcataatattcattatcttgaataagctaattttcccaattggcaattcaaatctggtacttccagcaaagcgccgcctgcctgcaagaaaatttccggcgctctgtgcgagttctgcagttccggcgttgctcttctttcccgcgccacctgcctgcaagaaagcgccgggggcgtgccgtcttttccccctccacgcttcagcagcagcgcagtaaatttcgtcggcgtgttgggcagcagcagcagttggcagccaacgtcccgctcccccgcccgctattactttcccagctccgcgacaagctaggcgcgcgtcgtcgtggtccgtccgcttccggtctctactccttgtgctctctgcagtaaaatgagcttccggcgcttcgggttcagtttgcgagttgcattgcttagtctgtgtttttaattagggaaccaatgaacacatgtagtgcattgctaattttagactggaaatgctttgggtgattcagatactgaggtatttgtaggttgacttggatttggagaattatgagtgtttcatagatgttactctgacgagggataacaatattaccactagaaatatatactagtctgtcattgagaaggagagaaggggtgattatattggaaagactttatagctgtgctacaaggagctgcaccatccgaaatgcgacgtctgccttcagtttattccaacgaacaggagtggcctgatagagtacagatcccacccgttctagggccagaagtattgcccttcgca

SEQ ID NO: 41294 - DNA, 2292 bp, Zea Mays
ctcttctttccctctgtataccgcgagcgcccgcagctagctgctagccgcgcgcccgccgctacctgcccgcctccagcgcgcccgccgcgcgtgccccgccgccacccctcgcggtgatctgtgtgggcgacgtccacagctacatcacgaagctggagagcctctggtccaacctctaggccgcactccccgccgacgccttggccaccgcgctggtcatcttcctcggcgactacaacgaccgcggcccgcacacccgcagggtcctcaacttcctcctcgcgctcccgacgcgctacccagcgcagcgccatgtcttcctctgcggcaaccacgacctcgccttcacggcgttcgttggggcgccgccgccgccgcccaacggctccccgttcttcggccacctgcgcagcgccatctctctttcctccctatctcgctgctccctcccctgccgccctgcttatttacgcccatttcttaagagaggatttgatggcctgtcagaataaaagagctcgaggaaattgcggcggccggaaatcctggtgatggtgccacacaaacacgagaatctgcttcgtcctcggcggaattgccgtcggggtcgggcgattcttcggaggacaagtgcctctgtttcgttgagctggctaggtccatggggattagtcaggacactcatgagtcgatggcaacagatgcagccaattacctttgccaccagcttcagcatcttcttgggcctatctcttctgcgacgagccaaagtggcccctgggaggagaggtcggtgatggttaggttgactcagaagctgcagaaatctaagagaaataagtggtggcggcagaggagaaggaagcatgttgcagagctttttcagaaggagcgtgcggattatgatagagttgaccaggaagctgatgaatggagggctaagcaaatagccaaggacattgcaaagcggagggtggaaagcatgcagcagattgctagaaagaaaacaaatgaggaaagaaagcgcctagaatctgaggtagtatggaataaaatttcacgcccaggctgtgctgtgaaagttttcttctctagggtgtttgagaactatcttttactagttatgtgcaagcgcatgtgcgcatactactgaacattgatacaaaccagttattttgtttgtttgtttaaatttagctccaacatttaagttgtggcttactttgatacaaactaattattttgtttgtttgtataagtttagttgcaacatttaagttgtgccttactgccttcctattcttgtgatctttatctacttttattgtaactctagaaaccctctgatctctacaattgtcttagtgcaaccaatcttatgggatatcattcacctgtttttttttgtattttttggagagctattttgcaatcagttcatgaagatttgagtagtcattcaaatttcttttttactttaatctactattgattctgtggatgtttttgagttaatagtatcatcataatattcattatcttgaataagctaattttcccaattggcaattcaaatctggtacttccagcaaagcgccgcctgcctgcaagaaaatttccggcgctctgtgcgagttctgcagttccggcgttgctcttctttcccgcgccacctgcctgcaagaaagcgccgggggcgtgccgtcttttccccctccacgcttcagcagcagcgcagtaaatttcgtcggcgtgttgggcagcagcagcagttggcagccaacgtcccgctcccccgcccgctattactttcccagctccgcgacaagctaggcgcgcgtcgtcgtggtccgtccgcttccggtctctactccttgtgctctctgcagtaaaatgagcttccggcgcttcgggttcagtttgcgagttgcattgcttagtctgtgtttttaattagggaaccaatgaacacatgtagtgcattgctaattttagactggaaatgctttgggtgattcagatactgaggtatttgtaggttgacttggatttggagaattatgagtgtttcatagatgttactctgacgagggataacaatattaccactagaaatatatactagtctgtcattgagaaggagagaaggggtgattatattggaaagactttataggagctgcaccatccgaaatgcgacgtctgccttcagtttattccaacgaacaggagtggcctgatagagtacagatcccacccgttctagggccagaagtattgcccttcgca

SEQ ID NO: 41295 - DNA, 2445 bp, Zea Mays
ctcttctttccctctgtataccgcgagcgcccgcagctagctgctagccgcgcgcccgccgctacctgcccgcctccagcgcgcccgccgcgcgtgccccgccgccacccctcgcggtgatctgtgtgggcgacgtccacagctacatcacgaagctggagagcctctggtccaacctctaggccgcactccccgccgacgccttggccaccgcgctggtcatcttcctcggcgactacaacgaccgcggcccgcacacccgcagggtcctcaacttcctcctcgcgctcccgacgcgctacccagcgcagcgccatgtcttcctctgcggcaaccacgacctcgccttcacggcgttcgttggggcgccgccgccgccgcccaacggctccccgttcttcggccacctgcgcagcgccatctctctttcctccctatctcgctgctccctcccctgccgccctgcttatttacgcccatttcttaagagaggatttgatggcctgtcagaataaaagagctcgaggaaattgcggcggccggaaatcctggtgatggtgccacacaaacacgagaatctgcttcgtcctcggcggaattgccgtcggggtcgggcgattcttcggaggacaagtgcctctgtttcgttgagctggctaggtccatggggattagtcaggacactcatgagtcgatggcaacagatgcagccaattacctttgccaccagcttcagcatcttcttgggcctatctcttctgcgacgagccaaagtggcccctgggaggagaggtcggtgatggttaggttgactcagaagctgcagaaatctaagagaaataagtggtggcggcagaggagaaggaagcatgttgcagagctttttcagaaggagcgtgcggattatgatagagttgaccaggaagctgatgaatggagggctaagcaaatagccaaggacattgcaaagcggagggtggaaagcatgcagcagattgctagaaagaaaacaaatgaggaaagaaagcgcctagaatctgagcaaagcgccgcctgcctgcaagaaaatttccggcgctctgtgcgagttctgcagttccggcgttgctcttctttcccgcgccacctgcctgcaagaaagcgccgggggcgtgccgtcttttccccctccacgcttcagcagcagcgcagtaaatttcgtcggcgtgttgggcagcagcagcagttggcagccaacgtcccgctcccccgcccgctattactttcccagctccgcgacaagctaggcgcgcgtcgtcgtggtccgtccgcttccggtctctactccttgtgctctctgcagtaaaatgagcttccggcgcttcgggttcagtttgcgagttgcattgcttagtctgtgtttttaattagggaaccaatgaacacatgtagtgcattgctaattttagactggaaatgctttgggtgattcagatactgagccaaggaacacaaagtacatgtcactgggagacgaccgcagcctgtgcatggaatgcctggggtctgcggtcatggacaccggtgaatgccagcccctgtaccattctatcagggactactacgaggggatgaaaatgaagctggaccagcagatacccatgctcttggttgagcagcaagcgcttaacgaagccatggaaggagagagtagaggcccacaccacatgcctgagacaaggggcctgtgtctgtcggaggagcagactgtgagcagtatacttaggaggcccaggattggtggaaaccggttactggacatgagaactcagccacaaaaactgactaggagatgtgaattgagggtgattcctctggtaaggtgtttcctttgcttcttgttcttatatgatacttgattgttgtgttgctgcagtgtcccagtgggtcaaggctatgatttgaccgaaacttgtgctggagcagctttcactgaatgggatgacaccacttgctgctatgtgaaggattccggctcccatcaagtgactccttcccctcacgttgactttgcggacagatgtctcaattctagtggtagagctacgaacaacaatctgatgtcctgatcgagagttgaacttgtgtatttgaacttgtgaactatggatgtgaacttgtgtgaatttgtgaacttatgtatttggaattatgtgaatttgcgaacttatatatttggacttgtgtgaatttgtgatatgaacatatatcaatgtgtttgaaatctgtattgtatgtgatatattgtgttgcatgtgatattttgtgtgtctattttttcatttttgtatttttattttttttctggaaaagggttaagaacgtgggtacccacgttcttaaccttaagaacgtgggtaccgtcgaacttattgtgcagtctgtgcagacccaagcagggttaag

SEQ ID NO: 41296 - DNA, 2031 bp, Zea Mays
ctcttctttccctctgtataccgcgagcgcccgcagctagctgctagccgcgcgcccgccgctacctgcccgcctccagcgcgcccgccgcgcgtgccccgccgccacccctcgcggtgatctgtgtgggcgacgtccacagctacatcacgaagctggagagcctctggtccaacctctaggccgcactccccgccgacgccttggccaccgcgctggtcatcttcctcggcgactacaacgaccgcggcccgcacacccgcagggtcctcaacttcctcctcgcgctcccgacgcgctacccagcgcagcgccatgtcttcctctgcggcaaccacgacctcgccttcacggcgttcgttggggcgccgccgccgccgcccaacggctccccgttcttcggccacctgcgcagcgccatctctctttcctccctatctcgctgctccctcccctgccgccctgcttatttacgcccatttcttaagagaggatttgatggcctgtcagaataaaagagctcgaggaaattgcggcggccggaaatcctggtgatggtgccacacaaacacgagaatctgcttcgtcctcggcggaattgccgtcggggtcgggcgattcttcggaggacaagtgcctctgtttcgttgagctggctaggtccatggggattagtcaggacactcatgagtcgatggcaacagatgcagccaattacctttgccaccagcttcagcatcttcttgggcctatctcttctgcgacgagccaaagtggcccctgggaggagaggtcggtgatggttaggttgactcagaagctgcagaaatctaagagaaataagtggtggcggcagaggagaaggaagcatgttgcagagctttttcagaaggagcgtgcggattatgatagagttgaccaggaagctgatgaatggagggctaagcaaatagccaaggacattgcaaagcggagggtggaaagcatgcagcagattgctagaaagaaaacaaatgaggaaagaaagcgcctagaatctgagactggaaatgctttgggtgattcagatactgagccaaggaacacaaagtacatgtcactgggagacgaccgcagcctgtgcatggaatgcctggggtctgcggtcatggacaccggtgaatgccagcccctgtaccattctatcagggactactacgaggggatgaaaatgaagctggaccagcagatacccatgctcttggttgagcagcaagcgcttaacgaagccatggaaggagagagtagaggcccacaccacatgcctgagacaaggggcctgtgtctgtcggaggagcagactgtgagcagtgaggcccaggattggtggaaaccggttactggacatgagaactcagccacaaaaactgactaggagatgtgaattgagggtgattcctctggtaaggtgtttcctttgcttcttgttcttatatgatacttgattgttgtgttgctgcagtgtcccagtgggtcaaggctatgatttgaccgaaacttgtgctggagcagctttcactgaatgggatgacaccacttgctgctatgtgaaggattccggctcccatcaagtgactccttcccctcacgttgactttgcggacagatgtctcaattctagtggtagagctacgaacaacaatctgatgtcctgatcgagagttgaacttgtgtatttgaacttgtgaactatggatgtgaacttgtgtgaatttgtgaacttatgtatttggaattatgtgaatttgcgaacttatatatttggacttgtgtgaatttgtgatatgaacatatatcaatgtgtttgaaatctgtattgtatgtgatatattgtgttgcatgtgatattttgtgtgtctattttttcatttttgtatttttattttttttctggaaaagggttaagaacgtgggtacccacgttcttaaccttaagaacgtgggtaccgtcgaacttattgtgcagtctgtgcagacccaagcagggttaag

SEQ ID NO: 41297 - DNA, 2417 bp, Zea Mays
ctcttctttccctctgtataccgcgagcgcccgcagctagctgctagccgcgcgcccgccgctacctgcccgcctccagcgcgcccgccgcgcgtgccccgccgccacccctcgcggtgatctgtgtgggcgacgtccacagctacatcacgaagctggagagcctctggtccaacctctaggccgcactccccgccgacgccttggccaccgcgctggtcatcttcctcggcgactacaacgaccgcggcccgcacacccgcagggtcctcaacttcctcctcgcgctcccgacgcgctacccagcgcagcgccatgtcttcctctgcggcaaccacgacctcgccttcacggcgttcgttggggcgccgccgccgccgcccaacggctccccgttcttcggccacctgcgcagcgccatctctctttcctccctatctcgctgctccctcccctgccgccctgcttatttacgcccatttcttaagagaggatttgatggcctgtcagaataaaagagctcgaggaaattgcggcggccggaaatcctggtgatggtgccacacaaacacgagaatctgcttcgtcctcggcggaattgccgtcggggtcgggcgattcttcggaggacaagtgcctctgtttcgttgagctggctaggtccatggggattagtcaggacactcatgagtcgatggcaacagatgcagccaattacctttgccaccagcttcagcatcttcttgggcctatctcttctgcgacgagccaaagtggcccctgggaggagaggtcggtgatggttaggttgactcagaagctgcagaaatctaagagaaataagtggtggcggcagaggagaaggaagcatgttgcagagctttttcagaaggagcgtgcggattatgatagagttgaccaggaagctgatgaatggagggctaagcaaatagccaaggacattgcaaagcggagggtggaaagcatgcagcagattgctagaaagaaaacaaatgaggaaagaaagcgcctagaatctgagactggaaatgctttgggtgattcagatactgagccaaggaacacaaagtacatgtcactgggagacgaccgcagcctgtgcatggaatgcctggggtctgcggtcatggacaccggtgaatgccagcccctgtaccattctatcagggactactacgaggggatgaaaatgaagctggaccagcagatacccatgctcttggttgagcagcaagcgcttaacgaagccatggaaggagagagtagaggcccacaccacatgcctgagacaaggggcctgtgtctgtcggaggagcagactgtgagcagtatacttaggaggcccaggattggtggaaaccggttactggacatgagaactcagccacaaaaactgactaggagatgtgaattgagggtgattcctctgtgtcccagtgggtcaaggctatgatttgaccgaaacttgtgctggagcagctttcactgaatgggatgacaccacttgctgctatgtgaaggtttgttctacaaatttgatgtttgctggatctgttaacaaatgtagttgatattcatatgacagatgtagcagatgaaacctgcattaaataaaacaagtggtatatttaagcgtgtctgggagtgtcatgcttggcaccttttctggatccattttatcaaccacgtagcatagcatttaagttttttcaatggaatgctcaaacttttccattaaatacttgccccaatgaacacttccattttcttgaaaactgatctctttccagcatgtccagtccttaattatctgaaatatgttccttttttcgtcaaaccaatgtagcttgtttcatgggaagaaggtggttacaagatttctgattatccgatgccgagaggagaggtagtggttggcggacacagtacaacaaaaggctataggactaactgtattgattccggctcccatcaagtgactccttcccctcacgttgactttgcggacagatgtctcaattctagtggtagagctacgaacaacaatctgatgtcctgatcgagagttgaacttgtgtatttgaacttgtgaactatggatgtgaacttgtgtgaatttgtgaacttatgtatttggaattatgtgaatttgcgaacttatatatttggacttgtgtgaatttgtgatatgaacatatatcaatgtgtttgaaatctgtattgtatgtgatatattgtgttgcatgtgatattttgtgtgtctattttttcatttttgtatttttattttttttctggaaaagggttaagaacgtgggtacccacgttcttaaccttaagaacgtgggtaccgtcgaacttattgtgcagtctgtgcagacccaagcagggttaag

SEQ ID NO: 41298 - DNA, 3106 bp, Zea Mays
ctcttctttccctctgtataccgcgagcgcccgcagctagctgctagccgcgcgcccgccgctacctgcccgcctccagcgcgcccgccgcgcgtgccccgccgccacccctcgcggtgatctgtgtgggcgacgtccacagctacatcacgaagctggagagcctctggtccaacctctaggccgcactccccgccgacgccttggccaccgcgctggtcatcttcctcggcgactacaacgaccgcggcccgcacacccgcagggtcctcaacttcctcctcgcgctcccgacgcgctacccagcgcagcgccatgtcttcctctgcggcaaccacgacctcgccttcacggcgttcgttggggcgccgccgccgccgcccaacggctccccgttcttcggccacctgcgcagcgccatctctctttcctccctatctcgctgctccctcccctgccgccctgcttatttacgcccatttcttaagagaggatttgatggcctgtcagaataaaagagctcgaggaaattgcggcggccggaaatcctggtgatggtgccacacaaacacgagaatctgcttcgtcctcggcggaattgccgtcggggtcgggcgattcttcggaggacaagtgcctctgtttcgttgagctggctaggtccatggggattagtcaggacactcatgagtcgatggcaacagatgcagccaattacctttgccaccagcttcagcatcttcttgggcctatctcttctgcgacgagccaaagtggcccctgggaggagaggtcggtgatggttaggttgactcagaagctgcagaaatctaagagaaataagtggtggcggcagaggagaaggaagcatgttgcagagctttttcagaaggagcgtgcggattatgatagagttgaccaggaagctgatgaatggagggctaagcaaatagccaaggacattgcaaagcggagggtggaaagcatgcagcagattgctagaaagaaaacaaatgaggaaagaaagcgcctagaatctgaggtagtatggaataaaatttcacgcccaggctgtgctgtgaaagttttcttctctagggtgtttgagaactatcttttactagttatgtgcaagcgcatgtgcgcatactactgaacattgatacaaaccagttattttgtttgtttgtttaaatttagctccaacatttaagttgtggcttactttgatacaaactaattattttgtttgtttgtataagtttagttgcaacatttaagttgtgccttactgccttcctattcttgtgatctttatctacttttattgtaactctagaaaccctctgatctctacaattgtcttagtgcaaccaatcttatgggatatcattcacctgtttttttttgtattttttggagagctattttgcaatcagttcatgaagatttgagtagtcattcaaatttcttttttactttaatctactattgattctgtggatgtttttgagttaatagtatcatcataatattcattatcttgaataagctaattttcccaattggcaattcaaatctggtacttccagcaaagcgccgcctgcctgcaagaaaatttccggcgctctgtgcgagttctgcagttccggcgttgctcttctttcccgcgccacctgcctgcaagaaagcgccgggggcgtgccgtcttttccccctccacgcttcagcagcagcgcagtaaatttcgtcggcgtgttgggcagcagcagcagttggcagccaacgtcccgctcccccgcccgctattactttcccagctccgcgacaagctaggcgcgcgtcgtcgtggtccgtccgcttccggtctctactccttgtgctctctgcagtaaaatgagcttccggcgcttcgggttcagtttgcgagttgcattgcttagtctgtgtttttaattagggaaccaatgaacacatgtagtgcattgctaattttagactggaaatgctttgggtgattcagatactgagccaaggaacacaaagtacatgtcactgggagacgaccgcagcctgtgcatggaatgcctggggtctgcggtcatggacaccggtgaatgccagcccctgtaccattctatcagggactactacgaggggatgaaaatgaagctggaccagcagatacccatgctcttggttgagcagcaagcgcttaacgaagccatggaaggagagagtagaggcccacaccacatgcctgagacaaggggcctgtgtctgtcggaggagcagactgtgagcagtatacttaggaggcccaggattggtggaaaccggttactggacatgagaactcagccacaaaaactgactaggagatgtgaattgagggtgattcctctggtaaggtgtttcctttgcttcttgttcttatatgatacttgattgttgtgttgctgcagtgtcccagtgggtcaaggctatgatttgaccgaaacttgtgctggagcagctttcactgaatgggatgacaccacttgctgctatgtgaagcttgtttcatgggaagaaggtggttacaagatttctgattatccgatgccgagaggagaggtagtggttggcggacacagtacaacaaaaggctataggactaactgtattgattccggctcccatcaagtgactccttcccctcacgttgactttgcggacagatgtctcaattctagtggtagagctacgaacaacaatctgatgtcctgatcgagagttgaacttgtgtatttgaacttgtgaactatggatgtgaacttgtgtgaatttgtgaacttatgtatttggaattatgtgaatttgcgaacttatatatttggacttgtgtgaatttgtgatatgaacatatatcaatgtgtttgaaatctgtattgtatgtgatatattgtgttgcatgtgatattttgtgtgtctattttttcatttttgtatttttattttttttctggaaaagggttaagaacgtgggtacccacgttcttaaccttaagaacgtgggtaccgtcgaacttattgtgcagtctgtgcagacccaagcagggttaag

SEQ ID NO: 41299 - DNA, 2354 bp, Zea Mays
ctcttctttccctctgtataccgcgagcgcccgcagctagctgctagccgcgcgcccgccgctacctgcccgcctccagcgcgcccgccgcgcgtgccccgccgccacccctcgcggtgatctgtgtgggcgacgtccacagctacatcacgaagctggagagcctctggtccaacctctaggccgcactccccgccgacgccttggccaccgcgctggtcatcttcctcggcgactacaacgaccgcggcccgcacacccgcagggtcctcaacttcctcctcgcgctcccgacgcgctacccagcgcagcgccatgtcttcctctgcggcaaccacgacctcgccttcacggcgttcgttggggcgccgccgccgccgcccaacggctccccgttcttcggccacctgcgcagcgccatctctctttcctccctatctcgctgctccctcccctgccgccctgcttatttacgcccatttcttaagagaggatttgatggcctgtcagaataaaagagctcgaggaaattgcggcggccggaaatcctggtgatggtgccacacaaacacgagaatctgcttcgtcctcggcggaattgccgtcggggtcgggcgattcttcggaggacaagtgcctctgtttcgttgagctggctaggtccatggggattagtcaggacactcatgagtcgatggcaacagatgcagccaattacctttgccaccagcttcagcatcttcttgggcctatctcttctgcgacgagccaaagtggcccctgggaggagaggtcggtgatggttaggttgactcagaagctgcagaaatctaagagaaataagtggtggcggcagaggagaaggaagcatgttgcagagctttttcagaaggagcgtgcggattatgatagagttgaccaggaagctgatgaatggagggctaagcaaatagccaaggacattgcaaagcggagggtggaaagcatgcagcagattgctagaaagaaaacaaatgaggaaagaaagcgcctagaatctgagactggaaatgctttgggtgattcagatactgagccaaggaacacaaagtacatgtcactgggagacgaccgcagcctgtgcatggaatgcctggggtctgcggtcatggacaccggtgaatgccagcccctgtaccattctatcagggactactacgaggggatgaaaatgaagctggaccagcagatacccatgctcttggttgagcagcaagcgcttaacgaagccatggaaggagagagtagaggcccacaccacatgcctgagacaaggggcctgtgtctgtcggaggagcagactgtgagcagtatacttaggaggcccaggattggtggaaaccggttactggacatgagaactcagccacaaaaactgactaggagatgtgaattgaggtgtcccagtgggtcaaggctatgatttgaccgaaacttgtgctggagcagctttcactgaatgggatgacaccacttgctgctatgtgaaggtttgttctacaaatttgatgtttgctggatctgttaacaaatgtagttgatattcatatgacagatgtagcagatgaaacctgcattaaataaaacaagtggtatatttaagcgtgtctgggagtgtcatgcttggcaccttttctggatccattttatcaaccacgtagcatagcatttaagttttttcaatggaatgctcaaacttttccattaaatacttgccccaatgaacacttccattttcttgaaaactgatctctttccagcatgtccagtccttaattatctgaaatatgttccttttttcgtcaaaccaatgtagcttgtttcatgggaagaaggtggttacaagatttctgattatccgatgccgagaggagaggattccggctcccatcaagtgactccttcccctcacgttgactttgcggacagatgtctcaattctagtggtagagctacgaacaacaatctgatgtcctgatcgagagttgaacttgtgtatttgaacttgtgaactatggatgtgaacttgtgtgaatttgtgaacttatgtatttggaattatgtgaatttgcgaacttatatatttggacttgtgtgaatttgtgatatgaacatatatcaatgtgtttgaaatctgtattgtatgtgatatattgtgttgcatgtgatattttgtgtgtctattttttcatttttgtatttttattttttttctggaaaagggttaagaacgtgggtacccacgttcttaaccttaagaacgtgggtaccgtcgaacttattgtgcagtctgtgcagacccaagcagggttaag

SEQ ID NO: 41300 - DNA, 2936 bp, Zea Mays
ctcttctttccctctgtataccgcgagcgcccgcagctagctgctagccgcgcgcccgccgctacctgcccgcctccagcgcgcccgccgcgcgtgccccgccgccacccctcgcggtgatctgtgtgggcgacgtccacagctacatcacgaagctggagagcctctggtccaacctctaggccgcactccccgccgacgccttggccaccgcgctggtcatcttcctcggcgactacaacgaccgcggcccgcacacccgcagggtcctcaacttcctcctcgcgctcccgacgcgctacccagcgcagcgccatgtcttcctctgcggcaaccacgacctcgccttcacggcgttcgttggggcgccgccgccgccgcccaacggctccccgttcttcggccacctgcgcagcgccatctctctttcctccctatctcgctgctccctcccctgccgccctgcttatttacgcccatttcttaagagaggatttgatggcctgtcagaataaaagagctcgaggaaattgcggcggccggaaatcctggtgatggtgccacacaaacacgagaatctgcttcgtcctcggcggaattgccgtcggggtcgggcgattcttcggaggacaagtgcctctgtttcgttgagctggctaggtccatggggattagtcaggacactcatgagtcgatggcaacagatgcagccaattacctttgccaccagcttcagcatcttcttgggcctatctcttctgcgacgagccaaagtggcccctgggaggagaggtcggtgatggttaggttgactcagaagctgcagaaatctaagagaaataagtggtggcggcagaggagaaggaagcatgttgcagagctttttcagaaggagcgtgcggattatgatagagttgaccaggaagctgatgaatggagggctaagcaaatagccaaggacattgcaaagcggagggtggaaagcatgcagcagattgctagaaagaaaacaaatgaggaaagaaagcgcctagaatctgaggtagtatggaataaaatttcacgcccaggctgtgctgtgaaagttttcttctctagggtgtttgagaactatcttttactagttatgtgcaagcgcatgtgcgcatactactgaacattgatacaaaccagttattttgtttgtttgtttaaatttagctccaacatttaagttgtggcttactttgatacaaactaattattttgtttgtttgtataagtttagttgcaacatttaagttgtgccttactgccttcctattcttgtgatctttatctacttttattgtaactctagaaaccctctgatctctacaattgtcttagtgcaaccaatcttatgggatatcattcacctgtttttttttgtattttttggagagctattttgcaatcagttcatgaagatttgagtagtcattcaaatttcttttttactttaatctactattgattctgtggatgtttttgagttaatagtatcatcataatattcattatcttgaataagctaattttcccaattggcaattcaaatctggtacttccagcaaagcgccgcctgcctgcaagaaaatttccggcgctctgtgcgagttctgcagttccggcgttgctcttctttcccgcgccacctgcctgcaagaaagcgccgggggcgtgccgtcttttccccctccacgcttcagcagcagcgcagtaaatttcgtcggcgtgttgggcagcagcagcagttggcagccaacgtcccgctcccccgcccgctattactttcccagctccgcgacaagctaggcgcgcgtcgtcgtggtccgtccgcttccggtctctactccttgtgctctctgcagtaaaatgagcttccggcgcttcgggttcagtttgcgagttgcattgcttagtctgtgtttttaattagggaaccaatgaacacatgtagtgcattgctaattttagactggaaatgctttgggtgattcagatactgagccaaggaacacaaagtacatgtcactgggagacgaccgcagcctgtgcatggaatgcctggggtctgcggtcatggacaccggtgaatgccagcccctgtaccattctatcagggactactacgaggggatgaaaatgaagctggaccagcagatacccatgctcttggttgagcagcaagcgcttaacgaagccatggaaggagagagtagaggcccacaccacatgcctgagacaaggggcctgtgtctgtcggaggagcagactgtgagcagtatacttaggaggcccaggattggtggaaaccggttactggacatgagaactcagccacaaaaactgactaggagatgtgaattgagggtgattcctctgtgtcccagtgggtcaaggctatgatttgaccgaaacttgtgctggagcagctttcactgaatgggatgacaccacttgctgctatgtgaaggattccggctcccatcaagtgactccttcccctcacgttgactttgcggacagatgtctcaattctagtggtagagctacgaacaacaatctgatgtcctgatcgagagttgaacttgtgtatttgaacttgtgaactatggatgtgaacttgtgtgaatttgtgaacttatgtatttggaattatgtgaatttgcgaacttatatatttggacttgtgtgaatttgtgatatgaacatatatcaatgtgtttgaaatctgtattgtatgtgatatattgtgttgcatgtgatattttgtgtgtctattttttcatttttgtatttttattttttttctggaaaagggttaagaacgtgggtacccacgttcttaaccttaagaacgtgggtaccgtcgaacttattgtgcagtctgtgcagacccaagcagggttaag

SEQ ID NO: 41301 - DNA, 2405 bp, Zea Mays
ctcttctttccctctgtataccgcgagcgcccgcagctagctgctagccgcgcgcccgccgctacctgcccgcctccagcgcgcccgccgcgcgtgccccgccgccacccctcgcggtgatctgtgtgggcgacgtccacagctacatcacgaagctggagagcctctggtccaacctctaggccgcactccccgccgacgccttggccaccgcgctggtcatcttcctcggcgactacaacgaccgcggcccgcacacccgcagggtcctcaacttcctcctcgcgctcccgacgcgctacccagcgcagcgccatgtcttcctctgcggcaaccacgacctcgccttcacggcgttcgttggggcgccgccgccgccgcccaacggctccccgttcttcggccacctgcgcagcgccatctctctttcctccctatctcgctgctccctcccctgccgccctgcttatttacgcccatttcttaagagaggatttgatggcctgtcagaataaaagagctcgaggaaattgcggcggccggaaatcctggtgatggtgccacacaaacacgagaatctgcttcgtcctcggcggaattgccgtcggggtcgggcgattcttcggaggacaagtgcctctgtttcgttgagctggctaggtccatggggattagtcaggacactcatgagtcgatggcaacagatgcagccaattacctttgccaccagcttcagcatcttcttgggcctatctcttctgcgacgagccaaagtggcccctgggaggagaggtcggtgatggttaggttgactcagaagctgcagaaatctaagagaaataagtggtggcggcagaggagaaggaagcatgttgcagagctttttcagaaggagcgtgcggattatgatagagttgaccaggaagctgatgaatggagggctaagcaaatagccaaggacattgcaaagcggagggtggaaagcatgcagcagattgctagaaagaaaacaaatgaggaaagaaagcgcctagaatctgagactggaaatgctttgggtgattcagatactgagccaaggaacacaaagtacatgtcactgggagacgaccgcagcctgtgcatggaatgcctggggtctgcggtcatggacaccggtgaatgccagcccctgtaccattctatcagggactactacgaggggatgaaaatgaagctggaccagcagatacccatgctcttggttgagcagcaagcgcttaacgaagccatggaaggagagagtagaggcccacaccacatgcctgagacaaggggcctgtgtctgtcggaggagcagactgtgagcagtatacttaggaggcccaggattggtggaaaccggttactggacatgagaactcagccacaaaaactgactaggagatgtgaattgaggtgtcccagtgggtcaaggctatgatttgaccgaaacttgtgctggagcagctttcactgaatgggatgacaccacttgctgctatgtgaaggtttgttctacaaatttgatgtttgctggatctgttaacaaatgtagttgatattcatatgacagatgtagcagatgaaacctgcattaaataaaacaagtggtatatttaagcgtgtctgggagtgtcatgcttggcaccttttctggatccattttatcaaccacgtagcatagcatttaagttttttcaatggaatgctcaaacttttccattaaatacttgccccaatgaacacttccattttcttgaaaactgatctctttccagcatgtccagtccttaattatctgaaatatgttccttttttcgtcaaaccaatgtagcttgtttcatgggaagaaggtggttacaagatttctgattatccgatgccgagaggagaggtagtggttggcggacacagtacaacaaaaggctataggactaactgtattgattccggctcccatcaagtgactccttcccctcacgttgactttgcggacagatgtctcaattctagtggtagagctacgaacaacaatctgatgtcctgatcgagagttgaacttgtgtatttgaacttgtgaactatggatgtgaacttgtgtgaatttgtgaacttatgtatttggaattatgtgaatttgcgaacttatatatttggacttgtgtgaatttgtgatatgaacatatatcaatgtgtttgaaatctgtattgtatgtgatatattgtgttgcatgtgatattttgtgtgtctattttttcatttttgtatttttattttttttctggaaaagggttaagaacgtgggtacccacgttcttaaccttaagaacgtgggtaccgtcgaacttattgtgcagtctgtgcagacccaagcagggttaag

SEQ ID NO: 41302 - DNA, 2091 bp, Zea Mays
ctcttctttccctctgtataccgcgagcgcccgcagctagctgctagccgcgcgcccgccgctacctgcccgcctccagcgcgcccgccgcgcgtgccccgccgccacccctcgcggtgatctgtgtgggcgacgtccacagctacatcacgaagctggagagcctctggtccaacctctaggccgcactccccgccgacgccttggccaccgcgctggtcatcttcctcggcgactacaacgaccgcggcccgcacacccgcagggtcctcaacttcctcctcgcgctcccgacgcgctacccagcgcagcgccatgtcttcctctgcggcaaccacgacctcgccttcacggcgttcgttggggcgccgccgccgccgcccaacggctccccgttcttcggccacctgcgcagcgccatctctctttcctccctatctcgctgctccctcccctgccgccctgcttatttacgcccatttcttaagagaggatttgatggcctgtcagaataaaagagctcgaggaaattgcggcggccggaaatcctggtgatggtgccacacaaacacgagaatctgcttcgtcctcggcggaattgccgtcggggtcgggcgattcttcggaggacaagtgcctctgtttcgttgagctggctaggtccatggggattagtcaggacactcatgagtcgatggcaacagatgcagccaattacctttgccaccagcttcagcatcttcttgggcctatctcttctgcgacgagccaaagtggcccctgggaggagaggtcggtgatggttaggttgactcagaagctgcagaaatctaagagaaataagtggtggcggcagaggagaaggaagcatgttgcagagctttttcagaaggagcgtgcggattatgatagagttgaccaggaagctgatgaatggagggctaagcaaatagccaaggacattgcaaagcggagggtggaaagcatgcagcagattgctagaaagaaaacaaatgaggaaagaaagcgcctagaatctgagactggaaatgctttgggtgattcagatactgagccaaggaacacaaagtacatgtcactgggagacgaccgcagcctgtgcatggaatgcctggggtctgcggtcatggacaccggtgaatgccagcccctgtaccattctatcagggactactacgaggggatgaaaatgaagctggaccagcagatacccatgctcttggttgagcagcaagcgcttaacgaagccatggaaggagagagtagaggcccacaccacatgcctgagacaaggggcctgtgtctgtcggaggagcagactgtgagcagtatacttaggaggcccaggattggtggaaaccggttactggacatgagaactcagccacaaaaactgactaggagatgtgaattgagggtgattcctctgtgtcccagtgggtcaaggctatgatttgaccgaaacttgtgctggagcagctttcactgaatgggatgacaccacttgctgctatgtgaagcttgtttcatgggaagaaggtggttacaagatttctgattatccgatgccgagaggagaggtagtggttggcggacacagtacaacaaaaggctataggactaactgtattgattccggctcccatcaagtgactccttcccctcacgttgactttgcggacagatgtctcaattctagtggtagagctacgaacaacaatctgatgtcctgatcgagagttgaacttgtgtatttgaacttgtgaactatggatgtgaacttgtgtgaatttgtgaacttatgtatttggaattatgtgaatttgcgaacttatatatttggacttgtgtgaatttgtgatatgaacatatatcaatgtgtttgaaatctgtattgtatgtgatatattgtgttgcatgtgatattttgtgtgtctattttttcatttttgtatttttattttttttctggaaaagggttaagaacgtgggtacccacgttcttaaccttaagaacgtgggtaccgtcgaacttattgtgcagtctgtgcagacccaagcagggttaag

SEQ ID NO: 41303 - DNA, 2823 bp, Zea Mays
ctcttctttccctctgtataccgcgagcgcccgcagctagctgctagccgcgcgcccgccgctacctgcccgcctccagcgcgcccgccgcgcgtgccccgccgccacccctcgcggtgatctgtgtgggcgacgtccacagctacatcacgaagctggagagcctctggtccaacctctaggccgcactccccgccgacgccttggccaccgcgctggtcatcttcctcggcgactacaacgaccgcggcccgcacacccgcagggtcctcaacttcctcctcgcgctcccgacgcgctacccagcgcagcgccatgtcttcctctgcggcaaccacgacctcgccttcacggcgttcgttggggcgccgccgccgccgcccaacggctccccgttcttcggccacctgcgcagcgccatctctctttcctccctatctcgctgctccctcccctgccgccctgcttatttacgcccatttcttaagagaggatttgatggcctgtcagaataaaagagctcgaggaaattgcggcggccggaaatcctggtgatggtgccacacaaacacgagaatctgcttcgtcctcggcggaattgccgtcggggtcgggcgattcttcggaggacaagtgcctctgtttcgttgagctggctaggtccatggggattagtcaggacactcatgagtcgatggcaacagatgcagccaattacctttgccaccagcttcagcatcttcttgggcctatctcttctgcgacgagccaaagtggcccctgggaggagaggtcggtgatggttaggttgactcagaagctgcagaaatctaagagaaataagtggtggcggcagaggagaaggaagcatgttgcagagctttttcagaaggagcgtgcggattatgatagagttgaccaggaagctgatgaatggagggctaagcaaatagccaaggacattgcaaagcggagggtggaaagcatgcagcagattgctagaaagaaaacaaatgaggaaagaaagcgcctagaatctgagcaaagcgccgcctgcctgcaagaaaatttccggcgctctgtgcgagttctgcagttccggcgttgctcttctttcccgcgccacctgcctgcaagaaagcgccgggggcgtgccgtcttttccccctccacgcttcagcagcagcgcagtaaatttcgtcggcgtgttgggcagcagcagcagttggcagccaacgtcccgctcccccgcccgctattactttcccagctccgcgacaagctaggcgcgcgtcgtcgtggtccgtccgcttccggtctctactccttgtgctctctgcagtaaaatgagcttccggcgcttcgggttcagtttgcgagttgcattgcttagtctgtgtttttaattagggaaccaatgaacacatgtagtgcattgctaattttagactggaaatgctttgggtgattcagatactgagccaaggaacacaaagtacatgtcactgggagacgaccgcagcctgtgcatggaatgcctggggtctgcggtcatggacaccggtgaatgccagcccctgtaccattctatcagggactactacgaggggatgaaaatgaagctggaccagcagatacccatgctcttggttgagcagcaagcgcttaacgaagccatggaaggagagagtagaggcccacaccacatgcctgagacaaggggcctgtgtctgtcggaggagcagactgtgagcagtatacttaggaggcccaggattggtggaaaccggttactggacatgagaactcagccacaaaaactgactaggagatgtgaattgagggtgattcctctgtgtcccagtgggtcaaggctatgatttgaccgaaacttgtgctggagcagctttcactgaatgggatgacaccacttgctgctatgtgaaggtttgttctacaaatttgatgtttgctggatctgttaacaaatgtagttgatattcatatgacagatgtagcagatgaaacctgcattaaataaaacaagtggtatatttaagcgtgtctgggagtgtcatgcttggcaccttttctggatccattttatcaaccacgtagcatagcatttaagttttttcaatggaatgctcaaacttttccattaaatacttgccccaatgaacacttccattttcttgaaaactgatctctttccagcatgtccagtccttaattatctgaaatatgttccttttttcgtcaaaccaatgtagcttgtttcatgggaagaaggtggttacaagatttctgattatccgatgccgagaggagaggtagtggttggcggacacagtacaacaaaaggctataggactaactgtattgattccggctcccatcaagtgactccttcccctcacgttgactttgcggacagatgtctcaattctagtggtagagctacgaacaacaatctgatgtcctgatcgagagttgaacttgtgtatttgaacttgtgaactatggatgtgaacttgtgtgaatttgtgaacttatgtatttggaattatgtgaatttgcgaacttatatatttggacttgtgtgaatttgtgatatgaacatatatcaatgtgtttgaaatctgtattgtatgtgatatattgtgttgcatgtgatattttgtgtgtctattttttcatttttgtatttttattttttttctggaaaagggttaagaacgtgggtacccacgttcttaaccttaagaacgtgggtaccgtcgaacttattgtgcagtctgtgcagacccaagcagggttaag

SEQ ID NO: 41304 - DNA, 2505 bp, Zea Mays
ctcttctttccctctgtataccgcgagcgcccgcagctagctgctagccgcgcgcccgccgctacctgcccgcctccagcgcgcccgccgcgcgtgccccgccgccacccctcgcggtgatctgtgtgggcgacgtccacagctacatcacgaagctggagagcctctggtccaacctctaggccgcactccccgccgacgccttggccaccgcgctggtcatcttcctcggcgactacaacgaccgcggcccgcacacccgcagggtcctcaacttcctcctcgcgctcccgacgcgctacccagcgcagcgccatgtcttcctctgcggcaaccacgacctcgccttcacggcgttcgttggggcgccgccgccgccgcccaacggctccccgttcttcggccacctgcgcagcgccatctctctttcctccctatctcgctgctccctcccctgccgccctgcttatttacgcccatttcttaagagaggatttgatggcctgtcagaataaaagagctcgaggaaattgcggcggccggaaatcctggtgatggtgccacacaaacacgagaatctgcttcgtcctcggcggaattgccgtcggggtcgggcgattcttcggaggacaagtgcctctgtttcgttgagctggctaggtccatggggattagtcaggacactcatgagtcgatggcaacagatgcagccaattacctttgccaccagcttcagcatcttcttgggcctatctcttctgcgacgagccaaagtggcccctgggaggagaggtcggtgatggttaggttgactcagaagctgcagaaatctaagagaaataagtggtggcggcagaggagaaggaagcatgttgcagagctttttcagaaggagcgtgcggattatgatagagttgaccaggaagctgatgaatggagggctaagcaaatagccaaggacattgcaaagcggagggtggaaagcatgcagcagattgctagaaagaaaacaaatgaggaaagaaagcgcctagaatctgagcaaagcgccgcctgcctgcaagaaaatttccggcgctctgtgcgagttctgcagttccggcgttgctcttctttcccgcgccacctgcctgcaagaaagcgccgggggcgtgccgtcttttccccctccacgcttcagcagcagcgcagtaaatttcgtcggcgtgttgggcagcagcagcagttggcagccaacgtcccgctcccccgcccgctattactttcccagctccgcgacaagctaggcgcgcgtcgtcgtggtccgtccgcttccggtctctactccttgtgctctctgcagtaaaatgagcttccggcgcttcgggttcagtttgcgagttgcattgcttagtctgtgtttttaattagggaaccaatgaacacatgtagtgcattgctaattttagactggaaatgctttgggtgattcagatactgagccaaggaacacaaagtacatgtcactgggagacgaccgcagcctgtgcatggaatgcctggggtctgcggtcatggacaccggtgaatgccagcccctgtaccattctatcagggactactacgaggggatgaaaatgaagctggaccagcagatacccatgctcttggttgagcagcaagcgcttaacgaagccatggaaggagagagtagaggcccacaccacatgcctgagacaaggggcctgtgtctgtcggaggagcagactgtgagcagtatacttaggaggcccaggattggtggaaaccggttactggacatgagaactcagccacaaaaactgactaggagatgtgaattgagggtgattcctctggtaaggtgtttcctttgcttcttgttcttatatgatacttgattgttgtgttgctgcagtgtcccagtgggtcaaggctatgatttgaccgaaacttgtgctggagcagctttcactgaatgggatgacaccacttgctgctatgtgaagcttgtttcatgggaagaaggtggttacaagatttctgattatccgatgccgagaggagaggattccggctcccatcaagtgactccttcccctcacgttgactttgcggacagatgtctcaattctagtggtagagctacgaacaacaatctgatgtcctgatcgagagttgaacttgtgtatttgaacttgtgaactatggatgtgaacttgtgtgaatttgtgaacttatgtatttggaattatgtgaatttgcgaacttatatatttggacttgtgtgaatttgtgatatgaacatatatcaatgtgtttgaaatctgtattgtatgtgatatattgtgttgcatgtgatattttgtgtgtctattttttcatttttgtatttttattttttttctggaaaagggttaagaacgtgggtacccacgttcttaaccttaagaacgtgggtaccgtcgaacttattgtgcagtctgtgcagacccaagcagggttaag

SEQ ID NO: 41305 - DNA, 3149 bp, Zea Mays
cccatccacacacattcaagggcaatgtagaagtaaagtagtgttgaagtataggagcccttgcataaatatatgtgttcttgttgcttcatctataggagttctctgcctcccggaagccaacttcatctgtatgagtgctctgcctcccgaaagcaaatatggctagctctatcgcctatcgtgcaataagtaattagagattaaatacaaactagtgtaatatattgatgtatgttattttaattgttgtctatccaccggcgatgtcccataagtagaacccggagtcatacatagtttgtgttattattgtatgactccataagtagtcaccatgtgaaatacattacacatgtatgactgtggcaccacttatgtaatgtatttaactagagactgttttttggtgcttaaatacatgtttagcttcggttcttgaacaccaagctggttcggcgcgccgacaaggtgattacccaggtattggttaaatggaccggctggcatccttttgtggccacttgggaggatgaagttcagctccggcatagttttcccttcacaccagcttgaagacaagctagctcttaagcagtggagaatgtcagcaaccaagaaaggaacggctctggttcaggggcttgcgcagggaaactgaagacaagctgtgaaggcactcgtgaaaaaagatgatggccgatcggcgtggcgtccaggaggagtaagcgtgtaccaaagcccaacaagttaaaatggatgacttggcaagagggaaagacagacagtaaagagttgttcgattattttcaatctatggagaagattgatacggatcgagagattttgacttactaaaaattgaaaccactcaatctctctcaatctgtatggattaagataaaaccgaacatgggcaacgaaaactctcaacccggccgtcgacgatcagcgatctcgttcgcggtgattcaccgcaacacgaaaaccagcgcttcgtgccaggcagcgaagcgaccaagtggggacggcgccctgcggaatgacatttacaaacctctcgaccgacacttgggtgctgtttggttcaagaaatgtaacggaaatggtaatggtttacgttcgattacttgcggtaacaaatttgaataggctagtatcaatttttagtgtggtatctgattacggttggactaaaacaaacattatttaacgttatcagttacccattacgttacaaatttgtgaaccaaacggcaccttggtccttcaattcgcgccagagtcctagcacagcagtacgccagtaaccaaccatccagggtagttcagccgccggcagttggagtaacgaagaagcatgcaccatgaatgcatgcataacgcataaaccctagctagtagcttgccgcgccggataaaaagaggggcggtcgtcatcagctatagagagccatcaggaccgaccggacgtggtatcgattagacggccttcatgtcgcacactacttcgctactgctctcgtggtcgtggagcctgatgacgatgcccacgtcctcgtttacctctactactcctccaagtattcagctcggccgcaccacaccgtccggcgtcccgtcgtcccgcccattggttgctgttggtcgtcgcattaacaggatccgctgctcagcgacctacacccttgcaccaagccgtgagtctactactactaccaccaccgccgtcggtgaggctcggcgtgcacagggtgcagccgtgctcgctcttggcacggccaacccagcagctacctgcttgccgcagactgagtacgccgactggtacttccgtgccacgaagcgcgaccacctcaccaagctaaaagccaagatgaagaagatatgccacaactcgggaataaggaagcgctacttccaccacacggaggacacgctcctcgagcacccggaactcgtggacggcgcgctgccgtcgctggacgcccggcagagcatcctgggctcggccgtgccggagctcgccgcgtccgcggcggcgcgggccatcgccgagtggggccgcccggccgccgacatcacccacctcgtcttcgccaccaactcgggcgcgcacatgccgggcgccgacctccgcctggcgtcgctcctcggcctccgcccgtccgcgcagcgcacggcgctgtacctcaccggctgccacgcgggctccgccgcgctccgcgtcgccaaggacgtggccgagaacagccgcggcgcccgcgtgctggtggcctgcggcgacctcagcctcgtcaagttccgcgcgccgcacgaggaccgtcccgagactctcgtcctgcaggccctgttcggcgacggcgcgggcgccgccatcgtcggtgccgcctccgacgagatgtacggctccggcgctgagtcgtgcccgctcttcgagatggtgtccgcgtcccagacagtggtgcccaacagcgaggacgccgtcgcggggcagctcggccaagacgggctcgtgttcagcccgtcccctagaatgccggcgctcgtacgggagcacatcgaacggtgcctggcggacgccgtcgggccgctcggattactgggtggtggaggtggtggtggtgactggaacgacctcttctgggcggtgcatcccggcgggcctctgcgatccttgacactccaggccacgctggcgctggcgccaagcaagctggcggccagcaggcacgtgttgagtgagtacgggaacatgtcgggtgcctcggttatcttcgtgctggacgagctccggcggcggtgtggcatgctggatggagattttggggtcatgctaggtttcggtccggggttcaccgtcgagaccatggtactccgagcggcgaaggctgcaacgaaaaaggttttctaatgtgtggatgtcagatgtcaccagcagcaacgaaaaattatgttcgagtgaaattcaccggaggtccttgttatcagcagctttgcctctatacattttttgtttggtcagctctttgactcttggcacccttagccaatattggcacattcatagagtcatttgattgtgagtgttctagtccattgcaaactaagatattgtattttgtggcactagatggtttttctgactc

SEQ ID NO: 41306 - DNA, 2943 bp, Zea Mays
cccatccacacacattcaagggcaatgtagaagtaaagtagtgttgaagtataggagcccttgcataaatatatgtgttcttgttgtaagtattttgttatgctataaaatttctatttgcttagtgcataagttgtgattcatctgaaggagtgctctgcctactgggatcacaaggcttcatctataggagttctctgcctcccggaagccaacttcatctcttcggttcttgaacaccaagctggttcggcgcgccgacaaggtgattacccaggtattggttaaatggaccggctggcatccttttgtggccacttgggaggatgaagttcagctccggcatagttttcccttcacaccagcttgaagacaagctagctcttaagcagtggagaatgtcagcaaccaagaaaggaacggctctggttcaggggcttgcgcagggaaactgaagacaagctgtgaaggcactcgtgaaaaaagatgatggccgatcggcgtggcgtccaggaggagtaagcgtgtaccaaagcccaacaagttaaaatggatgacttggcaagagggaaagacagacagtaaagagttgttcgattattttcaatctatggagaagattgatacggatcgagagattttgacttactaaaaattgaaaccactcaatctctctcaatctgtatggattaagataaaaccgaacatgggcaacgaaaactctcaacccggccgtcgacgatcagcgatctcgttcgcggtgattcaccgcaacacgaaaaccagcgcttcgtgccaggcagcgaagcgaccaagtggggacggcgccctgcggaatgacatttacaaacctctcgaccgacacttgggtgctgtttggttcaagaaatgtaacggaaatggtaatggtttacgttcgattacttgcggtaacaaatttgaataggctagtatcaatttttagtgtggtatctgattacggttggactaaaacaaacattatttaacgttatcagttacccattacgttacaaatttgtgaaccaaacggcaccttggtccttcaattcgcgccagagtcctagcacagcagtacgccagtaaccaaccatccagggtagttcagccgccggcagttggagtaacgaagaagcatgcaccatgaatgcatgcataacgcataaaccctagctagtagcttgccgcgccggataaaaagaggggcggtcgtcatcagctatagagagccatcaggaccgaccggacgtggtatcgattagacggccttcatgtcgcacactacttcgctactgctctcgtggtcgtggagcctgatgacgatgcccacgtcctcgtttacctctactactcctccaagtattcagctcggccgcaccacaccgtccggcgtcccgtcgtcccgcccattggttgctgttggtcgtcgcattaacaggatccgctgctcagcgacctacacccttgcaccaagccgtgagtctactactactaccaccaccgccgtcggtgaggctcggcgtgcacagggtgcagccgtgctcgctcttggcacggccaacccagcagctacctgcttgccgcagactgagtacgccgactggtacttccgtgccacgaagcgcgaccacctcaccaagctaaaagccaagatgaagaagatatgccacaactcgggaataaggaagcgctacttccaccacacggaggacacgctcctcgagcacccggaactcgtggacggcgcgctgccgtcgctggacgcccggcagagcatcctgggctcggccgtgccggagctcgccgcgtccgcggcggcgcgggccatcgccgagtggggccgcccggccgccgacatcacccacctcgtcttcgccaccaactcgggcgcgcacatgccgggcgccgacctccgcctggcgtcgctcctcggcctccgcccgtccgcgcagcgcacggcgctgtacctcaccggctgccacgcgggctccgccgcgctccgcgtcgccaaggacgtggccgagaacagccgcggcgcccgcgtgctggtggcctgcggcgacctcagcctcgtcaagttccgcgcgccgcacgaggaccgtcccgagactctcgtcctgcaggccctgttcggcgacggcgcgggcgccgccatcgtcggtgccgcctccgacgagatgtacggctccggcgctgagtcgtgcccgctcttcgagatggtgtccgcgtcccagacagtggtgcccaacagcgaggacgccgtcgcggggcagctcggccaagacgggctcgtgttcagcccgtcccctagaatgccggcgctcgtacgggagcacatcgaacggtgcctggcggacgccgtcgggccgctcggattactgggtggtggaggtggtggtggtgactggaacgacctcttctgggcggtgcatcccggcgggcctctgcgatccttgacactccaggccacgctggcgctggcgccaagcaagctggcggccagcaggcacgtgttgagtgagtacgggaacatgtcgggtgcctcggttatcttcgtgctggacgagctccggcggcggtgtggcatgctggatggagattttggggtcatgctaggtttcggtccggggttcaccgtcgagaccatggtactccgagcggcgaaggctgcaacgaaaaaggttttctaatgtgtggatgtcagatgtcaccagcagcaacgaaaaattatgttcgagtgaaattcaccggaggtccttgttatcagcagctttgcctctatacattttttgtttggtcagctctttgactcttggcacccttagccaatattggcacattcatagagtcatttgattgtgagtgttctagtccattgcaaactaagatattgtattttgtggcactagatggtttttctgactc

SEQ ID NO: 41307 - DNA, 896 bp, Zea Mays
cacgaccgtacctggtgggcctcccgcgatggtttctgcggcgagcaaggcccaggcctaacagaccgagatgtatcgagttttgcgccttcgatacgtcgtttacgtattcagtttttcacacaacggcggcgatgtcgtcggcctcctcctccgccgccgccgccaacgccggtgaaggaagcgggggtgcggaggagggcgtggagatcacttacgtgagctatggcggggagcagcatctgccgctggtgatgtcgctggtggacgaggagctcagcgagccctattccatcttcacctaccgctacttcgtctacctctggccgcagctcaccttcctgcaactgagctagttactagatcaattcgggcaatgatggaatctggctgtgaggaggtgacacttgaagcagaagttactaataagggtgcccttgctctgtatggtcgccttgggtttatccgagcaaagagattgtacagatactatctaaatggtgtagacgcatttcggctgaaactactgtttccgcgccctgataatgacccacaaatatttggtataattgactagattctccctactcgtgacagcatcctaatcagtaggttgaattgagttggagatctgtaatccgatcatttttcgctctgttcatgcttcctcagctatcatgtggctgtaatattgctgtacttacatataaatgttcgaggtgttttattttcttcctgttctttgataagggtgttgtaagacctttttcttttgtgagaaaaacaaaacgcatgccgcagttgcaagaggactgtgcagttcttttgctcaataaacaaaacgcatgccgcagttgctgtagtgtttagggggtgtttgggaacaaagtttttct

SEQ ID NO: 41308 - DNA, 846 bp, Zea Mays
agatgtatcgagttttgcgccttcgatacgtcgtttacgtattcagtttttcacacaacggcggcgatgtcgtcggcctcctcctccgccgccgccgccaacgccggtgaaggaagcgggggtgcggaggagggcgtggagatcacttacgtgagctatggcggggagcagcatctgccgctggtgatgtcgctggtggacgaggagctcagcgagccctattccatcttcacctaccgctacttcgtctacctctggccgcagctcaccttcctgcaactgagctagttactagatcaattcgggcaatgatggaatctggctgtgaggagcttgtatcttctgatcaggtgacacttgaagcagaagttactaataagggtgcccttgctctgtatggtcgccttgggtttatccgagcaaagagattgtacagatactatctaaatggtgtagacgcatttcggctgaaactactgtttccgcgccctgataatgacccacaaatatttggtataattgactagattctccctactcgtgacagcatcctaatcagtaggttgaattgagttggagatctgtaatccgatcatttttcgctctgttcatgcttcctcagctatcatgtggctgtaatattgctgtacttacatataaatgttcgaggtgttttattttcttcctgttctttgataagggtgttgtaagacctttttcttttgtgagaaaaacaaaacgcatgccgcagttgcaagaggactgtgcagttcttttgctcaataaacaaaacgcatgccgcagttgctgtagtgtttagggggtgtttgggaacaaagtttttct

SEQ ID NO: 41309 - DNA, 1276 bp, Zea Mays
atgcagaaggatgtggatgatatggttcatatccacttccataaccatattgagttgttgttaccgtacctggagcagtcgaggcaggggtacctacccaagcgtagcttccacgtgaaaacatgctcgaaattcagacatcaggcgactatcctcgacccgtctcttctcaacttgcgtccctcctctcgtctcgtgtggttgatggtgctaccatcgcacctggtgcaatctcattatcaccacgcttccgctgatgattttctccagattgtgcaaaagacatttgtcaaagacgaagggcagtcgatggcgccaaatcaggtggctggagagatcctgtcgttcttcactcgcaataacttcaccgtctcagaccgcggggaggtcatcacattcgagggcacaatgataccaaacagaggccaggcggcgctgctaaccttctgcacctgcattagcctcgggagtgtcgggcttgttctatcaatcgctgtcccagaaggtggcaacaactggttctggctcatgaccctgagccccttggcgggagcgtactactggacgaaagcgtcaaggaaagaagagatcaaggtcaagatgatcctatccgatgacgggaacgtgtccgagatccttgtgcagggcgatgacgtccaggttgagcagatgaggaaggacctcaagttcagcgagaaggggatggtctatgtgaagggcatctttgagacatgactgggagtttcatactctatctgtgagtgaacaatcgagtggagacgagtctttgctgcaacggaaactgcgtaagcgtaacccaggagagaaagaagtaactggaagtctgaccactgcacattggagttccaattggacaccagccgatcactcaaggggtctgcggcgagcggacgacgagttcgcggttggcggacggacgctgcaccgtcacaggcaacacaactaagatgggatcggcagtggtggacttccctaggggcgagctgcggcaacgacctccttagggcgtgagcgacgacgtgtttttatgctaccctgtatacatatttatgccaacgtcaatagatgtttacgacatatatttcagtcaatggttacccttacatctattgtctgtttatgatatttctattcacattttatgcaaacgtttatagatttgtatgtattatctcgttacctagcccattgtgtatatggggtttctaacatttacattagctcggtatttatgatcaaaactgagaggttttac

SEQ ID NO: 41310 - DNA, 1531 bp, Zea Mays
cccatctatactcgagcgtgaggactgaggacaaaagcaccgctcccacttacacatgggccccgccaattatgaacatacagacttccccgctttcccatccctgcggcccttatccccagcccaaaatggacgccaccaccgccgtggctgcgaggcgcctcctcctcctcccgctccgcgcccagccgccagcaccgcggggcgcagcgccggccacggcgaacccctggtgtcgatccgttccgcggagacgacgagtccgtgccgccccggcgcgcgcgtcgctggaccgcgccgcggtcctcctcgacaccgcggccgcggtggccaacggcgggacaggttactcgcaggcgagctactacacgtctctgggactcttcgttctctccgttccggggctgtggtccctcatcaagcgctccgtcaagtccaagattgtgcaaaagacatttgtcaaagacgaagggcagtcgatggcgccaaatcaggtggctggagagatcctgtcgttcttcactcgcaataacttcaccgtctcagaccgcggggaggtcatcacattcgagggcacaatgataccaaacagaggccaggcggcgctgctaaccttctgcacctgcattagcctcgggagtgtcgggcttgttctatcaatcgctgtcccagaaggtggcaacaactggttctggctcatgaccctgagccccttggcgggagcgtactactggacgaaagcgtcaaggaaagaagagatcaaggtcaagatgatcctatccgatgacgggaacgtgtccgagatccttgtgcagggcgatgacgtccaggttgagcagatgaggaaggacctcaagttcagcgagaaggggatggtctatgtgaagggcatctttgagacatgactgggagtttcatactctatctgtgagtgaacaatcgagtggagacgagtctttgctgcaacggaaactgcgtaagcgtaacccaggtgaggaaatgcaaattggacgggcaaatctgtaccttggcttaaaggaaaaaaagaagtgatcttcatacgggatttgattattgagagaaagaagtaactggaagtctgaccactgcacattggagttccaattggacaccagccgatcactcaaggggtctgcggcgagcggacgacgagttcgcggttggcggacggacgctgcaccgtcacaggcaacacaactaagatgggatcggcagtggtggacttccctaggggcgagctgcggcaacgacctccttagggcgtgagcgacgacgtgtttttatgctaccctgtatacatatttatgccaacgtcaatagatgtttacgacatatatttcagtcaatggttacccttacatctattgtctgtttatgatatttctattcacattttatgcaaacgtttatagatttgtatgtattatctcgttacctagcccattgtgtatatggggtttctaacatttacattagctcggtatttatgatcaaaactgagaggttttac

SEQ ID NO: 41311 - DNA, 1473 bp, Zea Mays
cccgctttcccatccctgcggcccttatccccagcccaaaatggacgccaccaccgccgtggctgcgaggcgcctcctcctcctcccgctccgcgcccagccgccagcaccgcggggcgcagcgccggccacggcgaacccctggtgtcgatccgttccgcggagacgacgagtccgtgccgccccggcgcgcgcgtcgctggaccgcgccgcggtcctcctcgacaccgcggccgcggtggccaacggcgggacaggttactcgcaggcgagctactacacgtctctgggactcttcgttctctccgttccggggctgtggtccctcatcaagcgctccgtcaagtccaagattgtgcaaaagacatttgtcaaagacgaagggcagtcgatggcgccaaatcaggtggctggagagatcctgtcgttcttcactcgcaataacttcaccgtctcagaccgcggggaggtcatcacattcgagggcacaatgataccaaacagaggccaggcggcgctgctaaccttctgcacctgcattagcctcgggagtgtcgggcttgttctatcaatcgctgtcccagaaggtggcaacaactggttctggctcatgaccctgagccccttggcgggagcgtactactggacgaaagcgtcaaggaaagaagagatcaaggtcaagatgatcctatccgatgacgggaacgtgtccgagatccttgtgcagggcgatgacgtccaggttgagcagatgaggaaggacctcaagttcagcgagaaggggatggtctatgtgaagggcatctttgagacatgactgggagtttcatactctatctgtgagtgaacaatcgagtggagacgagtctttgctgcaacggaaactgcgtaagcgtaacccaggtgaggaaatgcaaattggacgggcaaatctgtaccttggcttaaaggaaaaaaagaagtgatcttcatacgggatttgattattgtaagtgttgcccgtatgaggatagttaatgagagaaagaagtaactggaagtctgaccactgcacattggagttccaattggacaccagccgatcactcaaggggtctgcggcgagcggacgacgagttcgcggttggcggacggacgctgcaccgtcacaggcaacacaactaagatgggatcggcagtggtggacttccctaggggcgagctgcggcaacgacctccttagggcgtgagcgacgacgtgtttttatgctaccctgtatacatatttatgccaacgtcaatagatgtttacgacatatatttcagtcaatggttacccttacatctattgtctgtttatgatatttctattcacattttatgcaaacgtttatagatttgtatgtattatctcgttacctagcccattgtgtatatggggtttctaacatttacattagctcggtatttatgatcaaaactgagaggttttac

SEQ ID NO: 41312 - DNA, 1324 bp, Zea Mays
tagatgcacctgtgcccgtgcctacagaatcggattgtgcaaaagacatttgtcaaagacgaagggcagtcgatggcgccaaatcaggtggctggagagatcctgtcgttcttcactcgcaataacttcaccgtctcagaccgcggggaggtcatcacattcgagggcacaatgataccaaacagaggccaggcggcgctgctaaccttctgcacctgcattagcctcgggagtgtcgggcttgttctatcaatcgctgtcccagaaggtggcaacaactggttctggctcatgaccctgagccccttggcgtatgtctctctgctactcaactcccagcaattcagaatgaattcttccagtacaaatgcagtaactgacccttcatgatgaggtcccaggggagcgtactactggacgaaagcgtcaaggaaagaagagatcaaggtcaagatgatcctatccgatgacgggaacgtgtccgagatccttgtgcagggcgatgacgtccaggttgagcagatgaggaaggacctcaagttcagcgagaaggggatggtctatgtgaagggcatctttgagacatgactgggagtttcatactctatctgtgagtgaacaatcgagtggagacgagtctttgctgcaacggaaactgcgtaagcgtaacccaggtgaggaaatgcaaattggacgggcaaatctgtaccttggcttaaaggaaaaaaagaagtgatcttcatacgggatttgattattgtaagtgttgcccgtatgaggatagttaatgtatgaactcaaactaatgactttataaaaagctgatgagaaacacctttttgagcatgaaaatactaaaacctttttaggagagaaagaagtaactggaagtctgaccactgcacattggagttccaattggacaccagccgatcactcaaggggtctgcggcgagcggacgacgagttcgcggttggcggacggacgctgcaccgtcacaggcaacacaactaagatgggatcggcagtggtggacttccctaggggcgagctgcggcaacgacctccttagggcgtgagcgacgacgtgtttttatgctaccctgtatacatatttatgccaacgtcaatagatgtttacgacatatatttcagtcaatggttacccttacatctattgtctgtttatgatatttctattcacattttatgcaaacgtttatagatttgtatgtattatctcgttacctagcccattgtgtatatggggtttctaacatttacattagctcggtatttatgatcaaaactgagaggttttac

SEQ ID NO: 41313 - DNA, 1207 bp, Zea Mays
cacggttcaagttcaaataaatattacaaaaaaaaacttgtcatagttccctcgaagaaagacctggggctggcttttaagggcaaccaaaagatggtcctggaagcattggaggctatgagtgagaaggaagcatttgagatgaaagctgaactagagaccaagggggagacaaattttaaagtctgcacacttggaaaagacgtggtgattacaaagaagatggtatcaatcagcatggagaagaagctggaacaccagcgagtcttcaccccttcggtcgtcgagccgtcattcggcataggacggatcatctactgcttgtttgagcactcgttttacacaaggcctagcaaatcagaagaggaacagctgaatgtcttccggttccctcctcttgtggcccctatcaagtgcaccgtgttcccccttgttaagaatcaagagtttgacgatgctgccaaagtaatcgccaaggcattaacaactgctggtatctcccacattattgacactactggtacgtgcaatacaatcttaaataccccactccgtataacgtaactatatatatgtaagcataagctcgtggttgttctcttgcagcaatttctattgggaggaggtacgccaggacggatgagatcggtgttccatttgctgtaacagtggattcggcaacgaacgtgacgatccgagagagggacagcaaggagcaggtccgcgtggacatcgacgaggtggcgcctgtggtgaagcagctgacggaaggccaaagcacatggacggatgtttctgcaaagtatcccgcccatgtcggcccccaaagtgagcaggagtgaagaatcgccgccctgatgtctagtctagccatcgaccgagaaggcgtcgggatgagccgtcttcgttctccaattgctgagaagattgtgtggcctaaacataactgcttttggtattgacattatccagaaaggcagtttttttccctcatacatacatgacacttgctatagcagttggatgttatgaagtctgcagatgtcaccgatttttttgtttcttttaaatgcccctttcttgatgtattctcacccatacaaaacataccatttgaggtatttctgaactagctgtccttttgtaaggtcagactgggaattgttcagctatctacagtggaattggaaatttcagttacttgtta

SEQ ID NO: 41314 - DNA, 2049 bp, Zea Mays
gaattcaatttgattgcacaagtacaccttggctacgacccttggccgccgcctcaacctcaactcatctcgccggtggtcgatctcctccatctgctcgccgcggcgcaacccggagaggagaccgcgctcggtcgagcaccacctagggctagcgtcctcgcgacgagctccggcgcggcgtccgccctctgcagccccggtgtccccgcgaccggctccggcgcgaccggcacacagctccacaggccaacgggacctgattcatggcgaagcaggcgtacgccacgagcagtctcgtggtcgggtacgcgctgtgctccagcttgctggctatcatcaacaagtatgccatcaccaagttcagctaccccggactgctgaccgccctgcagtacctgacctcggtggttggagtgtgggtgctcgggaagctcggcttcctctgccacgacgccttcaacctccagaccgccaagaagtttgcgccggccgcggttgtcttctaccttgccatcttcaccaacacccacctcctcaagcatgcaaacgtcgacactttcatcgtgttcagatccctgactcctctcctggtggctatcgccgacaccaccttccggaagcaaccgtgcccttccaagctcacgttcttgtccctcgtgatcattttgggaggcgcggtcggctatgtgatgacagactcggccttcaccctcactgcatactcgtgggcactcgcttacctggtcaccataactactgagatggtgtacatcaagcacatggtgaccaacttggggctcaacacctggggctttgtgctctacaacaatcttctctcgctgctaatggcaccggtgtttgggtttctgacaggggagcacttgtccgtcttcagagcttttgagtcaagggggcagagttggtttgagcttgatgcctttgtggcggttgcgttgtcctgcgtctttggtctgctcatcagcttctttggtttcgctgcaaggaaagcgatctctgccacagcgttcacagtgacaggtgtggtcaacaagttcctcacggttgcgataaatgtgatgatttgggacaagcatgcaagcatgtttggtttggtttgcttgctcttcactctcgctggtggagtgctctatcagcagtcagttacaacaaaaggcaatccttcagcagcagctaagcagggaagaggtggtgatgatgctgttgaggtggatgaggagagccagatgctggtttcatctccaaaggttgtctaaggtgcatgatcaccaaagatccagttctgttcgtttttctggacccatgttttgaagatttgtcagtcatgtaccgaaggaaatccaagaggctgcatttttgttctaggagaggctgcagtaactttacatgatacatgtttggtctataattatttttgttaccgtgccttgtttactggtaagctccaaaccccgtgcgatgtttaattacttagaacgacaaaccaatgcggtgaccatcttatatggttattggcacctatctggacattgtatacctgatgaggtgactcagattacatacaccctttctgacattactaaggcccatgttcgtttggtacggattgatgggctggaatcattcctagccgaattgcttctttaatttatataatttttgatcagctggaatgatttcgggtgcaatcccgcacaaacaaacaaggcctaaatgttttagcagtgcattagcttcatggttttggtatgatcagattttcagtggcccatttgctatcagcggggatcaaataaactacgcatttgtttgcggatgcttcgcagtcagcagttaatgaaactgccaagatcggttgcattatggtcatctggtgtactgttctacaaggcaattcgaaaatttgtgttgatgtccttgcaaaaaaagttgtgttggtggtgcataggataatcggattaatgctgttgttgctacagcaactaagctgtctatggtgcttgctgcttggtttgtctatggtgcttt

SEQ ID NO: 41315 - DNA, 2155 bp, Zea Mays
agcgtccctaccctctcctgtcctgtcgttctcgtgcaagctcacggtcccccacgcccacgagcgcctccgctgcgacgaagagaatcatcaggcagagcgggggtggggcggggcgcagatggatctagagaggtcaccgccagcgtcgtcggcggaggcgcccggggacggcggcgggggcggggccgcggcctgctcaatctgcctggatgcggtgctcgcccgcagcgctggtcgctccgtcgccaagctacaatgcggacacgagttccacctaggatttcatagcgtcgtcgacgtggttcagacttaataacggagatgctctgacacatgttcggatggtgagcctgatgatgctgatgctgatgggagtgaaaactgcacgtgtaagagcaagtagtgctgttcctgcataattggagctccagattgtattgggtctgcattcaatgcaaaaggagcgatgcaatgccctaactgtcggaagattgagaaaggtcgctggctttatgcaagcggacatcgcgcctctgttgatattgatatgggtggctgggtgaccagtgacaactatgatatcacctccgagcttccttttggatttcaatggtgcccctttagtggattcacccggctagcatccatgtttgaggagcgtgaagctgagcttacttatcacacaactggagatcgctcaagtgctgcaagcagttcacttgtttgcccatatcttgccctgcgtggttttctgcatcctgttcatgtgccttctacatctaatcctggtgctgaaagcacttcatttcgtcggcatgcaactggcttggaaggccatgccactcttgatttgaataatgctcaacttttccatgcgattgagtcaataaatcatgacagtgagcacagacatttgagtaatcttcctgtatcaggaattcctgagtattctatgactccatttggtataggactaccaagatatgacagtggcagccaacagagattcagatcatatgcacatcatcatcccctaatccataggccagcacctcgcagtgggagcaatttggtggcaccaccattggggtcggttccagctgtggtggcggcggcggagaccgcaagaggcagccacatgtaccaacgctcgtccgtgcatggcagcccgttccctcctaccaccactagaagggtgaggccgagagccttgacgatcacatcgttcatcgcagcgacgtcctcaggtgagatcggaggcccccatggattctccgctcctggagccgccatgaacaggagcgtctctgacgctgagggcatctctagacccattgaccggccgtacaatgcatggggccgggagggcttcgctccgttcccctggatccccgctgaaggcgagtctcactggtggggcaccttcaaccctgtgcagaaccatgcgcatggaggctttagcagaaggcctgctggggagcggatgccgccgcagagccaaagccacccggagaacagctatcaggctgtgccgccgtcacagaggatgccgccgttcttgtgattcgacaaggctgttcctacgtccgatcgctgtgtataaaatgaagtattcggttcggggcctgagagagcacattgagcgaagatcgactgcactgcagtctccagcgttgggacctgtgtgatgtttatgccgctggtatttcagcgcttttctttttccctccggtccagcagcactctggtttcattgagcgctgtagactgtctgtcctaactgatgttgtgttgcgttgaggaggacgatttggaaacgtgagccgaagctgaactgcatctctggtctccgggactaaaaaatgccgtttgctgctatgaaagttgtatcgatttgcgaccgcaggtcgcctgcaaatttgttagaacaggtgaaatttagtgaacacaaatgttggagacctgcggcgtttacattttttttgttggttaccgagattgtatttaaaggtcgtgatgcgccatcaagcgattgtgatggatcaatttatctccctattgtagcaatgggttttttttgaaaccgatggatgtatatgtcactagaagtaaataccagacaaatatagttgtatccatgctaatttgacca

SEQ ID NO: 41316 - DNA, 2176 bp, Zea Mays
cgtccctaccctctcctgtcctgtcgttctcgtgcaagctcacggtcccccacgcccacgagcgcctccgctgcgacgaagagaatcatcaggcagagcgggggtggggcggggcgcagatggatctagagaggtcaccgccagcgtcgtcggcggaggcgcccggggacggcggcgggggcggggccgcggcctgctcaatctgcctggatgcggtgctcgcccgcagcgctggtcgctccgtcgccaagctacaatgcggacacgagttccacctaggtcggatcccccgcgccgctgctgggctacgttttttcgtcatccggatctgcctgtgatggccgccttggtcgggtagcgtgcgtcaccggcgtaatttgccgtaaaagaggctgaatttggcgtagaagaggaattctgatgtgtcgttttccaggatttcatagcgtcgtcgacgtggttcagacttaataacggagatgctctgacacatgttcggatggtgagcctgatgatgctgatgctgatgggagtgaaaactgcacgtgtaagagcaagtagtgctgttcctgcataattggagctccaggttgacttgcgaatccgaggcttggatttagcggtaatttaggttgcttcactagcggttggcctgttgccttgagggttgtcgtgatttagcttagttgttattaggcctataacggcttttgaaagcagggacaacatcaaaggttcggacctttgggtcttgttcttcccattcaggtcacaccttgtgttaagtactgagtacttccctagagcaaatttagaaaaaaatgggagcttcatctcgtgtgatgcaaatttaaaattcctatgacccaacttctcaaatttcttctatctgatctgttagttgcttctaatgctgcccatcctttaagtttatgcttgttttaaccgacttaggttgtttgcaaaactgaactgatgtcttgtgatacctaactttgctaaatgatggattggttccctgtgcaagtcatttgattgacatttacagcgcgaaatacattctgagtttattggaaaatttgatcgaacaacgaaataacatattgtgattagggatttgaggacttaggttttaattctccattgaaatttatatgcactgaatttaatattttctcacacgcctgtacataattgattaatcttatacaggtcaaattgctacatatgtaattgaatgaaaatgaacctgattatcctcagttatcaaccacaacttctcatcatgtagttatgcaagtgaatatttttaactgatgcccaaacaaacctttaaatcatgccttagcaattttgtcaagcaccaattttagttcaacttgaacaccaacagcacagttctattgtcacatcagtttttttccacttatctccaagaatgtctctgtcccctcacccttgtgtgtttatgcgataatgtgcatgaaaaatacattatgataccttacgcagattgctgaactaatcaagattttgttgccagattgtattgggtctgcattcaatgcaaaaggagcgatgcaatgccctaactgtcggaagattgagaaaggtcgctggctttatgcaagcggacatcgcgcctctgttgatattgatatgggtggctgggtgaccagtgacaactatgatatcacctccgagcttccttttggatttcaatggtgcccctttagtggattcacccggctagcatccatgtttgaggagcgtgaagctgagcttacttatcacacaactggagatcgctcaagtgctgcaagcagttcacttgtttgcccatatcttgccctgcgtggttttctgcatcctgttcatgtgccttctacatctaatcctggtgctgaaagcacttcatttcgtcggcatgcaactggcttggaaggccatgccactcttgatttgaataatgctcaacttttccatgcgattgagtcaataaatcatgacagtgagcacagacatttgagtaatcttcctgtatcaggaattcctgagtattctatgactccatttggtataggactaccaagatatgacagtggcagccaacagagattcagatcatatgcacatcatcatcccctaatccatagctactatttcagaagagttc

SEQ ID NO: 41317 - DNA, 1162 bp, Zea Mays
cgtccctaccctctcctgtcctgtcgttctcgtgcaagctcacggtcccccacgcccacgagcgcctccgctgcgacgaagagaatcatcaggcagagcgggggtggggcggggcgcagatggatctagagaggtcaccgccagcgtcgtcggcggaggcgcccggggacggcggcgggggcggggccgcggcctgctcaatctgcctggatgcggtgctcgcccgcagcgctggtcgctccgtcgccaagctacaatgcggacacgagttccacctagattgtattgggtctgcattcaatgcaaaaggagcgatgcaatgccctaactgtcggaagattgagaaaggtcgctggctttatgcaagcggacatcgcgcctctgttgatattgatatgggtggctgggtgaccagtgacaactatgatatcacctccgagcttccttttggatttcaatggtgcccctttagtggattcacccggctagcatccatgtttgaggagcgtgaagctgagcttacttatcacacaactggagatcgctcaagtgctgcaagcagttcacttgtttgcccatatcttgccctgcgtggttttctgcatcctgttcatgtgccttctacatctaatcctggtgctgaaagcacttcatttcgtcggcatgcaactggcttggaaggccatgccactcttgatttgaataatgctcaacttttccatgcgattgagtcaataaatcatgacagtgagcacagacatttgagtaatcttcctgtatcaggaattcctgagtattctatgactccatttggtataggactaccaagatatgacagtggcagccaacagagattcagatcatatgcacatcatcatcccctaatccataggctgcatccttggtggttgcttcaccacctttttggtgtcacaccccgtggctaccggtgatgaggaggaatatgaagatgccctcacgaaagtcacgatagatttatgatggttgccaatgttgcttgtccccatgacatgtctgtcactcaccttgattaggcgagataatggccctctcgggtactgtagcatatatataggcagataagaatatatgggctttatgggccttaacaacccctgtcaaactcaaggcggaagtggag

SEQ ID NO: 41318 - DNA, 2261 bp, Zea Mays
cgtccctaccctctcctgtcctgtcgttctcgtgcaagctcacggtcccccacgcccacgagcgcctccgctgcgacgaagagaatcatcaggcagagcgggggtggggcggggcgcagatggatctagagaggtcaccgccagcgtcgtcggcggaggcgcccggggacggcggcgggggcggggccgcggcctgctcaatctgcctggatgcggtgctcgcccgcagcgctggtcgctccgtcgccaagctacaatgcggacacgagttccacctaggtcggatcccccgcgccgctgctgggctacgttttttcgtcatccggatctgcctgtgatggccgccttggtcgggtagcgtgcgtcaccggcgtaatttgccgtaaaagaggctgaatttggcgtagaagaggaattctgatgtgtcgttttccaggatttcatagcgtcgtcgacgtggttcagacttaataacggagatgctctgacacatgttcggatggtgagcctgatgatgctgatgctgatgggagtgaaaactgcacgtgtaagagcaagtagtgctgttcctgcataattggagctccaggttgacttgcgaatccgaggcttggatttagcgattgtattgggtctgcattcaatgcaaaaggagcgatgcaatgccctaactgtcggaagattgagaaaggtcgctggctttatgcaagcggacatcgcgcctctgttgatattgatatgggtggctgggtgaccagtgacaactatgatatcacctccgagcttccttttggatttcaatggtgcccctttagtggattcacccggctagcatccatgtttgaggagcgtgaagctgagcttacttatcacacaactggagatcgctcaagtgctgcaagcagttcacttgtttgcccatatcttgccctgcgtggttttctgcatcctgttcatgtgccttctacatctaatcctggtgctgaaagcacttcatttcgtcggcatgcaactggcttggaaggccatgccactcttgatttgaataatgctcaacttttccatgcgattgagtcaataaatcatgacagtgagcacagacatttgagtaatcttcctgtatcaggaattcctgagtattctatgactccatttggtataggactaccaagatatgacagtggcagccaacagagattcagatcatatgcacatcatcatcccctaatccataggccagcacctcgcagtgggagcaatttggtggcaccaccattggggtcggttccagctgtggtggcggcggcggagaccgcaagaggcagccacatgtaccaacgctcgtccgtgcatggcagcccgttccctcctaccaccactagaagggtgaggccgagagccttgacgatcacatcgttcatcgcagcgacgtcctcagacccattgaccggccgtacaatgcatggggccgggagggcttcgctccgttcccctggatccccgctgaaggcgagtctcactggtggggcaccttcaaccctgtgcagaaccatgcgcatggaggctttagcagaaggcctgctggggagcggatgccgccgcagagccaaagccacccggagaacagctatcaggctgtgccgccgtcacagaggatgccgccgttcttgtgattcgacaaggctgttcctacgtccgatcgctgtgtataaaatgaagtattcggttcggggcctgagagagcacattgagcgaagatcgactgcactgcagtctccagcgttgggacctgtgtgatgtttatgccgctggtatttcagcgcttttctttttccctccggtccagcagcactctggtttcattgagcgctgtagactgtctgtcctaactgatgttgtgttgcgttgaggaggacgatttggaaacgtgagccgaagctgaactgcatctctggtctccgggactaaaaaatgccgtttgctgctatgaaagttgtatcgatttgcgaccgcaggtcgcctgcaaatttgttagaacaggtgaaatttagtgaacacaaatgttggagacctgcggcgtttacattttttttgttggttaccgagattgtatttaaaggtcgtgatgcgccatcaagcgattgtgatggatcaatttatctccctattgtagcaatgggttttttttgaaaccgatggatgtatatgtcactagaagtaaataccagacaaatatagttgtatccatgctaatttgacca

SEQ ID NO: 41319 - DNA, 2228 bp, Zea Mays
cgtccctaccctctcctgtcctgtcgttctcgtgcaagctcacggtcccccacgcccacgagcgcctccgctgcgacgaagagaatcatcaggcagagcgggggtggggcggggcgcagatggatctagagaggtcaccgccagcgtcgtcggcggaggcgcccggggacggcggcgggggcggggccgcggcctgctcaatctgcctggatgcggtgctcgcccgcagcgctggtcgctccgtcgccaagctacaatgcggacacgagttccacctaggtcggatcccccgcgccgctgctgggctacgttttttcgtcatccggatctgcctgtgatggccgccttggtcgggatttcatagcgtcgtcgacgtggttcagacttaataacggagatgctctgacacatgttcggatggtgagcctgatgatgctgatgctgatgggagtgaaaactgcacgtgtaagagcaagtagtgctgttcctgcataattggagctccagattgtattgggtctgcattcaatgcaaaaggagcgatgcaatgccctaactgtcggaagattgagaaaggtcgctggctttatgcaagcggacatcgcgcctctgttgatattgatatgggtggctgggtgaccagtgacaactatgatatcacctccgagcttccttttggatttcaatggtgcccctttagtggattcacccggctagcatccatgtttgaggagcgtgaagctgagcttacttatcacacaactggagatcgctcaagtgctgcaagcagttcacttgtttgcccatatcttgccctgcgtggttttctgcatcctgttcatgtgccttctacatctaatcctggtgctgaaagcacttcatttcgtcggcatgcaactggcttggaaggccatgccactcttgatttgaataatgctcaacttttccatgcgattgagtcaataaatcatgacagtgagcacagacatttgagtaatcttcctgtatcaggaattcctgagtattctatgactccatttggtataggactaccaagatatgacagtggcagccaacagagattcagatcatatgcacatcatcatcccctaatccataggccagcacctcgcagtgggagcaatttggtggcaccaccattggggtcggttccagctgtggtggcggcggcggagaccgcaagaggcagccacatgtaccaacgctcgtccgtgcatggcagcccgttccctcctaccaccactagaagggtgaggccgagagccttgacgatcacatcgttcatcgcagcgacgtcctcaggtgagatcggaggcccccatggattctccgctcctggagccgccatgaacaggagcgtctctgacgctgagggcatctctagacccattgaccggccgtacaatgcatggggccgggagggcttcgctccgttcccctggatccccgctgaaggcgagtctcactggtggggcaccttcaaccctgtgcagaaccatgcgcatggaggctttagcagaaggcctgctggggagcggatgccgccgcagagccaaagccacccggagaacagctatcaggctgtgccgccgtcacagaggatgccgccgttcttgtgattcgacaaggctgttcctacgtccgatcgctgtgtataaaatgaagtattcggttcggggcctgagagagcacattgagcgaagatcgactgcactgcagtctccagcgttgggacctgtgtgatgtttatgccgctggtatttcagcgcttttctttttccctccggtccagcagcactctggtttcattgagcgctgtagactgtctgtcctaactgatgttgtgttgcgttgaggaggacgatttggaaacgtgagccgaagctgaactgcatctctggtctccgggactaaaaaatgccgtttgctgctatgaaagttgtatcgatttgcgaccgcaggtcgcctgcaaatttgttagaacaggtgaaatttagtgaacacaaatgttggagacctgcggcgtttacattttttttgttggttaccgagattgtatttaaaggtcgtgatgcgccatcaagcgattgtgatggatcaatttatctccctattgtagcaatgggttttttttgaaaccgatggatgtatatgtcactagaagtaaataccagacaaatatagttgtatccatgctaatttgacca

SEQ ID NO: 41320 - DNA, 1527 bp, Zea Mays
atagttgctgctaaggtcgatccacacagggagcgtgaagctgagcttacttatcacacaactggagatcgctcaagtgctgcaagcagttcacttgtttgcccatatcttgccctgcgtggttttctgcatcctgttcatgtgccttctacatctaatcctggtgctgaaagcacttcatttcgtcggcatgcaactggcttggaaggccatgccactcttgatttgaataatgctcaacttttccatgcgattgagtcaataaatcatgacagtgagcacagacatttgagtaatcttcctgtatcaggaattcctgagtattctatgactccatttggtataggactaccaagatatgacagtggcagccaacagagattcagatcatatgcacatcatcatcccctaatccataggccagcacctcgcagtgggagcaatttggtggcaccaccattggggtcggttccagctgtggtggcggcggcggagaccgcaagaggcagccacatgtaccaacgctcgtccgtgcatggcagcccgttccctcctaccaccactagaagggtgaggccgagagccttgacgatcacatcgttcatcgcagcgacgtcctcaggtgagatcggaggcccccatggattctccgctcctggagccgccatgaacaggagcgtctctgacgctgagggcatctctagacccattgaccggccgtacaatgcatggggccgggagggcttcgctccgttcccctggatccccgctgaaggcgagtctcactggtggggcaccttcaaccctgtgcagaaccatgcgcatggaggctttagcagaaggcctgctggggagcggatgccgccgcagagccaaagccacccggagaacagctatcaggctgtgccgccgtcacagaggatgccgccgttcttgtgattcgacaaggctgttcctacgtccgatcgctgtgtataaaatgaagtattcggttcggggcctgagagagcacattgagcgaagatcgactgcactgcagtctccagcgttgggacctgtgtgatgtttatgccgctggtatttcagcgcttttctttttccctccggtccagcagcactctggtttcattgagcgctgtagactgtctgtcctaactgatgttgtgttgcgttgaggaggacgatttggaaacgtgagccgaagctgaactgcatctctggtctccgggactaaaaaatgccgtttgctgctatgaaagttgtatcgatttgcgaccgcaggtcgcctgcaaatttgttagaacaggtgaaatttagtgaacacaaatgttggagacctgcggcgtttacattttttttgttggttaccgagattgtatttaaaggtcgtgatgcgccatcaagcgattgtgatggatcaatttatctccctattgtagcaatgggttttttttgaaaccgatggatgtatatgtcactagaagtaaataccagacaaatatagttgtatccatgctaatttgacca

SEQ ID NO: 41321 - DNA, 1521 bp, Zea Mays
atataggcaccccgcaccccgttggcgtttgcccgtcctgactcctcgtccccgtgcacaccaccctcgtctccgcgcccgcgccactcacatcgtgatcgagacgacccgcgtcctccgcggtccgcgcccgcgcaccatctcgcctcgcattcccgaaagtatctgtattccttgatcaacatgtcgcgggaggagaatgtttatatggccaagctggctgagcaagcagaacggtacgaggaaatggttgaatacatggagaaggtggctaagaccacagatgtgcaagagctcactgttgaggagcgtaaccttctatctgttgcctacaagaatgtgattgcggccccccgtgcctcatggcgcattatctcctccatcgagcagaaagaggagtcccgtaagaatgaggaacatgttgcacagatcaaggaataccgtggcaagattgaggctgaattgagcaacatttgtgatggtatcctaaagctgcttgacacgcaccttgtgccttcctccactgccacagagtcgaaggtgttttacctcaagatgaagggtgattatcacaggtaccttgctgagtttaagactggtgctgagaggaaggaatctgcagagagcacaatggtagcttataaggcagctcaggatattgcattggctgaactgccacctattcatcccataaggcttggacttgcacttaacttctcagttttctattacgagattcagaactctccagacaaagcttgcaatcttgccaaggaggcgtttgatgaagctatttctcagttggacatgcttggtgaggattcctacaaagatagcaacttgattatgcagctcctgagggacaacttgaccctctggacggtatatccctgctgatgaactttgccggaggacggcattgaggagggcttagaatcctctaagggcgatgctggtgagggtcagtagcctggtaaacttagattgatggttcgacgtgtttctcaagcacatcgtgttggacgcccagtgctgacaaaaggcttttgctgctccatgcattccaagcttctgccccctcgttcgcaccctctttatgttgttggctggtagtggtcagatttagtcccattggtttagttggccctgggtccatctgaactgatgtattgttactgctatggaagtcattcctttagttttgctctggcagtggattgctgttgggtcgtgttttcagtctttattggttccgatcggacgctgttgcggcaaaccacccctgtagatactcttcacatgctgaagaaaactaccagcagccgtttagcctgaataattgctaaatgataggttaccgttgaggctgattggtttttatttttttttaccctgtgacatcaagttcttgggtaactttttttaccgttgaggctcaaacaaattgttaagtgggagaattgtgaagtgggagtggtaatggatcatgatctaaatgattcttcacaattcattgaaacc

SEQ ID NO: 41322 - DNA, 1464 bp, Zea Mays
cttgcggacgatttcccccggtttttgtttgaatttctcgggcgctgttatgtgcggcggctagatctgcttgtcgctggtgcagtaggagtttctcgctcggttccgatcctgagaacccgaccgcgcgggtatctgtattccttgatcaacatgtcgcgggaggagaatgtttatatggccaagctggctgagcaagcagaacggtacgaggaaatggttgaatacatggagaaggtggctaagaccacagatgtgcaagagctcactgttgaggagcgtaaccttctatctgttgcctacaagaatgtgattgcggccccccgtgcctcatggcgcattatctcctccatcgagcagaaagaggagtcccgtaagaatgaggaacatgttgcacagatcaaggaataccgtggcaagattgaggctgaattgagcaacatttgtgatggtatcctaaagctgcttgacacgcaccttgtgccttcctccactgccacagagtcgaaggtgttttacctcaagatgaagggtgattatcacaggtaccttgctgagtttaagactggtgctgagaggaaggaatctgcagagagcacaatggtagcttataaggcagctcaggatattgcattggctgaactgccacctattcatcccataaggcttggacttgcacttaacttctcagttttctattacgagattcagaactctccagacaaagcttgcaatcttgccaaggaggcgtttgatgaagctatttctcagttggacatgcttggtgaggattcctacaaagatagcaacttgattatgcagctcctgagggacaacttgaccctctggacggaggacggcattgaggagggcttagaatcctctaagggcgatgctggtgagggtcagtagcctggtaaacttagattgatggttcgacgtgtttctcaagcacatcgtgttggacgcccagtgctgacaaaaggcttttgctgctccatgcattccaagcttctgccccctcgttcgcaccctctttatgttgttggctggtagtggtcagatttagtcccattggtttagttggccctgggtccatctgaactgatgtattgttactgctatggaagtcattcctttagttttgctctggcagtggattgctgttgggtcgtgttttcagtctttattggttccgatcggacgctgttgcggcaaaccacccctgtagatactcttcacatgctgaagaaaactaccagcagccgtttagcctgaataattgctaaatgataggttaccgttgaggctgattggtttttatttttttttaccctgtgacatcaagttcttgggtaactttttttaccgttgaggctcaaacaaattgttaagtgggagaattgtgaagtgggagtggtaatggatcatgatctaaatgattcttcacaattcattgaaacc

SEQ ID NO: 41323 - DNA, 1355 bp, Zea Mays
cctcacatgacttttattgttagtatctgtattccttgatcaacatgtcgcgggaggagaatgtttatatggccaagctggctgagcaagcagaacggtacgaggaaatggttgaatacatggagaaggtggctaagaccacagatgtgcaagagctcactgttgaggagcgtaaccttctatctgttgcctacaagaatgtgattgcggccccccgtgcctcatggcgcattatctcctccatcgagcagaaagaggagtcccgtaagaatgaggaacatgttgcacagatcaaggaataccgtggcaagattgaggctgaattgagcaacatttgtgatggtatcctaaagctgcttgacacgcaccttgtgccttcctccactgccacagagtcgaaggtgttttacctcaagatgaagggtgattatcacaggtaccttgctgagtttaagactggtgctgagaggaaggaatctgcagagagcacaatggtagcttataaggcagctcaggatattgcattggctgaactgccacctattcatcccataaggcttggacttgcacttaacttctcagttttctattacgagattcagaactctccagacaaagcttgcaatcttgccaaggaggcgtttgatgaagctatttctcagttggacatgcttggtgaggattcctacaaagatagcaacttgattatgcagctcctgagggacaacttgaccctctggacggaggacggcattgaggagggcttagaatcctctaagggcgatgctggtgagggtcagtagcctggtaaacttagattgatggttcgacgtgtttctcaagcacatcgtgttggacgcccagtgctgacaaaaggcttttgctgctccatgcattccaagcttctgccccctcgttcgcaccctctttatgttgttggctggtagtggtcagatttagtcccattggtttagttggccctgggtccatctgaactgatgtattgttactgctatggaagtcattcctttagttttgctctggcagtggattgctgttgggtcgtgttttcagtctttattggttccgatcggacgctgttgcggcaaaccacccctgtagatactcttcacatgctgaagaaaactaccagcagccgtttagcctgaataattgctaaatgataggttaccgttgaggctgattggtttttatttttttttaccctgtgacatcaagttcttgggtaactttttttaccgttgaggctcaaacaaattgttaagtgggagaattgtgaagtgggagtggtaatggatcatgatctaaatgattcttcacaattcattgaaacc

SEQ ID NO: 41324 - DNA, 1314 bp, Zea Mays
cttcctctgtggatcgacctgctgcagttcatccagtcagttggggttttgtttgctgtgtctgatgagaagaaaactccaaaatccgaagggtcttccgacgaacgtcaagggcttcctccagcaggcttttcaaatccttttgattttggttctatgcaaagtttgctcaatgatccatctattaaggagatggcagatcaaattgcaagggatcctgcattcaaccggatggctgagcagctacagagaagtgctcaaagcacaggagaacagggcacacctccattaaatcctcaacaatacatggaaacaatgcaaaaggtcatggaaaacccccagtttatgaccatggcagagcgtctggggaatgctcttatgcaggatcctgctatgtccagtatgctggaaacctttagtagtccatcacataaggagcagctggaagagcgtatgtctcgcattaaggaagatccagctatgaagtcaattcttgatgagttagagaatgggggcccttctgcaatgatgaagtactggaacgaccctgatactcttcaaaagattggtgaggcaatgggagctagcttcccatttggtgcaggttcttctgctgaaccttctggtactgaagaaactgaggaagaaggtggggatgacgatgaatccatcgttcatcacactgccagtgttggtgatgaagagggtctcaagaaagcactagatggtggagccgacaaggatgaagaagactctgagggaagaagggccttacattttgcatgtgggtacggtgagttgaagtgtgcccagatccttcttgaagctggtgctgcagtggacgctcttgacaagaacaagaacaccccgttgcattacgctgctggctacggccgcaaggagtgtgtggatcttcttttgaagcacggtgctgctgtaacgctccaaaacctggacgggaagacacctatcgatgtcgccaagctgaataaccaggacgaggttctgaagttgctcgagaaggacgccttcctttgaataccatgcctttcgtatacacttggactcttggtgtcatgttttttttttcataccggttgtttttgtctggatagccacatgtcatggtccttaaatctgttatgcctaaatgctattagcatgtgggtgttcgaactggcctgtaatggtctaccgttcgtgacttgtgttttcccactccatttctgatacttaagcacatatgaaaaagttgtttccggatcaaattcaatggtggtgtatcatggttatctgtcttatgcttaagagaca

SEQ ID NO: 41325 - DNA, 1593 bp, Zea Mays
aatcacatcaaccggactgcagtccatcgaaaagcccacgaggcgacgagcgtgcaacgaactcactccctcgaccgtatcggctgctcctctatccctttcctgccactagtccactactatctaagctagcatggccatgatgatgctagcgcgcaacctgtgctctcgtctccgcccaccgctcgccgccgccgcggcgttctcgacggtccccgcggcgtcggcggccgcagcggaggcggagaggtcgatacgggacgggccgcggaacgactggagccggcccgagatccaggccgtctacgactccccgctcctcgacctcctcttccacggggctcaggtccatagaaatgtccataaattcagagaagtgcagcagtgcacacttctttcaatcaagactggtgggtgcagcgaagattgttcttactgccctcagtcatcaagatacgacactggattgaaggctcaaaaattgatgaacaaagatgctgtcttagaagcagcaaaaaaggcaaaagaggctggaagcacccgtttttgcatgggagctgcatggagagaaaccattggaaggaaaacaaacttcaaccagattcttgaatatgtcaaggaaataaggtcattgacttaacagccttaattacatggaatatgaagatatatccagccagcaaaagttttatgcatgattcttatattttatttcaccattttagcatggataattgaatttgtaggggtatgggcatggaggtctgttgcacactgggcatgatagagaaacaacaagctgaagaactcaagaaggctggacttacagcatataatcataacctagatacatcaagagagtattaccccaacattattaccacacgatcatatgatgataggctgcagactcttcagcatgtgcgtgaagctggaataagcatctgctcaggtggaatcattggtcttggtgaagcagaggaggaccgggtagggttgttgcatacacttgccaccttgcctacacacccagagagtgtccctattaatgcattggttgctgtaaaaggaacacctctcgaggaccagaagcctgtagagatatgggaaatgatccgcatgatcgccactgctcggatcgtgatgccaagggcaatggtgaggctttcagcgggccgagtacggttctccatgccagagcaagctctctgcttccttgctggggccaactccatctttgccggcgagaaacttctcacaaccgcgaacaacgactttgacgcggaccaggcgatgttcaatatccttggcttaatccccaaggccccaagctttggagaggaagaggcggcggcagcggcggtggcggctcctgtgtgcaccgagaggtctgagcaagctgcttctatgtagaatggcaaaactagaactactgttattatagtttgatttgatctggtccctctatgaggtgtgtgtgtgtgtgcagaagagaatagagcaaagtgtgtgtgtgcagaagagaattgagcaacagagacagataagattacgggagagaacgcaggactgtgagagaatattcttctacgt

SEQ ID NO: 41326 - DNA, 1620 bp, Zea Mays
aatcacatcaaccggactgcagtccatcgaaaagcccacgaggcgacgagcgtgcaacgaactcactccctcgaccgtatcggctgctcctctatccctttcctgccactagtccactactatctaagctagcatggccatgatgatgctagcgcgcaacctgtgctctcgtctccgcccaccgctcgccgccgccgcggcgttctcgacggtccccgcggcgtcggcggccgcagcggaggcggagaggtcgatacgggacgggccgcggaacgactggagccggcccgagatccaggccgtctacgactccccgctcctcgacctcctcttccacggggctcaggtccatagaaatgtccataaattcagagaagtgcagcagtgcacacttctttcaatcaagactggtgggtgcagcgaagattgttcttactgccctcagtcatcaagatacgacactggattgaaggctcaaaaattgatgaacaaagatgctgtcttagaagcagcaaaaaaggcaaaagaggctggaagcacccgtttttgcatgggagctgcatggagagaaaccattggaaggaaaacaaacttcaaccagattcttgaatatgtcaaggaaataaggggtatgggcatggaggtctgttgcacactgggcatgatagagaaacaacaagctgaagaactcaagaaggctggacttacagcatataatcataacctagatacatcaagagagtattaccccaacattattaccacacgatcatatgatgataggctgcagactcttcagcatgtgcgtgaagctggaataagcatctgctcaggtggaatcattggtcttggtgaagcagaggaggaccgggtagggttgttgcatacacttgccaccttgcctacacacccagagagtgtccctattaatgcattggttgctgtaaaaggaacacctctcgaggaccagaagcctgtagagatatgggaaatgatccgcatgatcgccactgctcggatcgtgatgccaagggcaatggtgaggctttcagcgggccgagtacggttctccatgccagagcaagctctctgcttccttgctggggccaactccatctttgccggcgagaaacttctcacaaccgcgaacaacgactttgacgcggaccaggcgatgttcaatatccttggcttaatccccaaggccccaagctttggagaggaagaggcggcggcagcggcggtggcggctcctgtgtgcaccgagaggtctgagcaagctgcttctatgtagaatggcaaaactagaactactgttattatagtttgatttgatctggtccctctatgaggtgtgtgtgtgtgtgcagaagagaatagagcaaagtgtgtgtgtgcagaagagaattgagcaacagagacagataagattacgggagagaacgcaggactgtgagagaatattcttctacgtacatcgcttttcctattacatcctacggcaggtgcttcccatattgcatcctatggcgccttccttacatagagcacggcgctacaccgcaccacctcccacatggtgcctacaggttcctcaagcactgacgaggaagtcgcccg

SEQ ID NO: 41327 - DNA, 2479 bp, Zea Mays
gagcacccctcccctcccctcctgtagtcccgtactcccgtctcagcctccagactcccacgggccacggcacaaaaaagaccaagagaaacgactattaaacgcgccccaccccgactcgggcacgcaactctaccgacctccgctcaccgccccctttcctcctatccctcccagagccccgacccggccggccggccggccggaaccctagccttatcgcccctccctttcccgcctcgcctccgcgcgatctcccgatcgccggattcgtgccgcggctggatggactccgacgtggagatgaacaccgccagcgatgaggaggtgatggacaacgatgactactacgactactgctacagcgacgtgggcgacgacggtgggagcaacagcgggagcgaggagctggtggccggggactacgacgagggcctcgaggccgaggggaccgacgaggtggtctctaggcgcgagcagacatttgtggttttaaacgaacaagttatatctgaacgtcaagccgaagatgtgagcaaggtatctgccgtcacactgattacaagggaggaggcgtgtgccctcctccatcactataaatggaacatcagcaagctgagtgacgaatggtttgcagatgaagaaaaagtccgccatactgttggcttacttttgaatggaaatcatgacccccgctctaggaagctagtctgtggaatatgttttgaggggtgttcttctgatatgatgagctctgctggttgtgctcatttttattgccatgaatgttgggaaggctacattagcgctgcaattggtgatggtccaggatgtttgtcattgcgatgccctgatccatcttgtagtgctatggttcttcaagggatgattaatgaattagctaaagatgaggatagaaaaaaatatgcacgatttctcttacgcgcatatgttgaaggtagcaagaagactaaatggtgtccagctcctgactgcacatgtgctgtggagttccttgggatcgagcatccgaggcttcatcaatatccattactcttgtttgcagtgcactgaggaagctcatcgaccagtgaactgtgagactgtttctaagtggatattaaaaaacagtgcagaatctgaaaacatgaactggatactggctaattctaagccctgtccaaagtgcaaacggccaatagagaaaaaccagggatgcatgcatatgacatgcacccctccttgtaaattcgaattttgctggttatgtctgggtgcatggtcagatcacggagagagaacaggtggcttttatgcttgcaatcgttatgaatcagcaaagaaagagggagtttacgacgagactgatgcaaggagggaaagagctaaaaactctcttgagagatatatgcattactatgagcgctgggcatccaatcagacatcgaggcagaaggcccaagcagatctgctaaaagcggaaaaggaccagattgcaaatttaactgacattttcgggataccagagacccagcttaagttcataatcgaagcttggtcacagattatagaatgcaggcgagtgttgaaatggacatatgcttatggctactatctggatgataagatcaagagtgaattttttgagtatctgcaaggtgaggctgagtctggtttggaacgcctgcatcagtgcgctgagaaagacttgcaaatttttttgccgtctgtgaaatctgacagcactgaaacaacgacacctacagtggctgaatttggtgaattccgcgtgaagcttgctggacttacaagcgtgactcggaattactttgagaaccttgttcaagctttggaagctgggttggaggatgtccgtgccacaggccaggctgctggtacatccagcactgccaccagctccaagaaaggaggaactaaatccaagaagaagcagcacactgcaccatcatctgaccacactgatgatgggtggccctgcgagcgctgcacatttcttaaccctcctacagtggatgcatgcagcgtctgcgaaaagagtaggtactagatgatggaatagctcaaagggagccagggaggcatcccaagaaaacctcaaagctcgtgagaagcatgcatgcatcggatgctgagaagaagagcttccagctgccgcaatgttgtacagagagttattttagggcctcggttggaaacggtgtggaggctcaagtggtcacatgtttgtgggggtcatttggttttctagttcttttctgttgttccttgtaaatatatttgttgtgatgtggtgacctgtgtttatgtgatgagtttttgtttctgacaaactgtgaaattaaactttaacaaaactgatgagaggtagctctgtttattccctcctaattgcgggcagggtctttgtctattcttccacattatttatctacggttacttgccaagtaaccatctgct

SEQ ID NO: 41328 - DNA, 2635 bp, Zea Mays
aaaaaagaccaagagaaacgactattaaacgcgccccaccccgactcgggcacgcaactctaccgacctccgctcaccgccccctttcctcctatccctcccagagccccgacccggccggccggccggccggaaccctagccttatcgcccctccctttcccgcctcgcctccgcgcgatctcccgatcgccggattcgtgccgcggctggatggactccgacgtggagatgaacaccgccagcgatgaggaggtgatggacaacgatgactactacgactactgctacagcgacgtgggcgacgacggtgggagcaacagcgggagcgaggagctggtggccggggactacgacgagggcctcgaggccgaggggaccgacgaggtggtctctaggcgcgagcagacatttgtggttttaaacgaacaagttatatctgaacgtcaagccgaagatgtgagcaaggtatctgccgtcacactgattacaagggaggaggcgtgtgccctcctccatcactataaatggaacatcagcaagctgagtgacgaatggtttgcagatgaagaaaaagtccgccatactgttggcttacttttgaatggaaatcatgacccccgctctaggaagctagtctgtggaatatgttttgaggggtgttcttctgatatgatgagctctgctggttgtgctcatttttattgccatgaatgttgggaaggctacattagcgctgcaattggtgatggtccaggatgtttgtcattgcgatgccctgatccatcttgtagtgctatggttcttcaagggatgattaatgaattagctaaagatgaggatagaaaaaaatatgcacgatttctcttacgcgcatatgttgaaggtagcaagaagactaaatggtgtccagctcctgactgcacatgtgctgtggagttccttggtgatgaaaactatgatgtttcatgcaattgcatgttcagcttttgttggaattgcactgaggaagctcatcgaccagtgaactgtgagactgtttctaagtggatattaaaaaacagtgcagaatctgaaaacatgaactggatactggctaattctaagccctgtccaaagtgcaaacggccaatagagaaaaaccagggatgcatgcatatgacatgcacccctccttgtaaattcgaattttgctggttatgtctgggtgcatggtcagatcacggagagagaacaggtggcttttatgcttgcaatcgttatgaatcagcaaagaaagagggagttgtatgtcttttctttacttcatgcattttggagaaacacttctgtagaactctagtataattgtaatattatttctgccactgctgctacaatgggattaaaagtctcttttggtggatgaacagcagctcatctttgggatgttgtgattttctgtgtggatgctatgttcttttcatttccaaggatgttttctcctcaaacttaaattgcttctgttgcagtacgacgagactgatgcaaggagggaaagagctaaaaactctcttgagagatatatgcattactatgagcgctgggcatccaatcagacatcgaggcagaaggcccaagcagatctgctaaaagcggaaaaggaccagattgcaaatttaactgacattttcgggataccagagacccagcttaagttcataatcgaagcttggtcacagattatagaatgcaggcgagtgttgaaatggacatatgcttatggctactatctggatgataagatcaagagtgaattttttgagtatctgcaaggtgaggctgagtctggtttggaacgcctgcatcagtgcgctgagaaagacttgcaaatttttttgccgtctgtgaaatctgacagcactgaaacaacgacacctacagtggctgaatttggtgaattccgcgtgaagcttgctggacttacaagcgtgactcggaattactttgagaaccttgttcaagctttggaagctgggttggaggatgtccgtgccacaggccaggctgctggtacatccagcactgccaccagctccaagaaaggaggaactaaatccaagaagaagcagcacactgcaccatcatctgaccacactgatgatgggtggccctgcgagcgctgcacatttcttaaccctcctacagtggatgcatgcagcgtctgcgaaaagagtaggtactagatgatggaatagctcaaagggagccagggaggcatcccaagaaaacctcaaagctcgtgagaagcatgcatgcatcggatgctgagaagaagagcttccagctgccgcaatgttgtacagagagttattttagggcctcggttggaaacggtgtggaggctcaagtggtcacatgtttgtgggggtcatttggttttctagttcttttctgttgttccttgtaaatatatttgttgtgatgtggtgacctgtgtttatgtgatgagtttttgtttctgacaaactgtgaaattaaactttaacaaaactgatgagaggtagctctgtttattccctcctaattgcgggcagggtctttgtctattcttccacattatttatctacggttacttgccaagtaaccatctgct

SEQ ID NO: 41329 - DNA, 2304 bp, Zea Mays
aagagaaacgactattaaacgcgccccaccccgactcgggcacgcaactctaccgacctccgctcaccgccccctttcctcctatccctcccagagccccgacccggccggccggccggccggaaccctagccttatcgcccctccctttcccgcctcgcctccgcgcgatctcccgatcgccggattcgtgccgcggctggatggactccgacgtggagatgaacaccgccagcgatgaggaggtgatggacaacgatgactactacgactactgctacagcgacgtgggcgacgacggtgggagcaacagcgggagcgaggagctggtggccggggactacgacgagggcctcgaggccgaggggaccgacgaggtggtctctaggcgcgagcagacatttgtggttttaaacgaacaagttatatctgaacgtcaagccgaagatgtgagcaagatgaagaaaaagtccgccatactgttggcttacttttgaatggaaatcatgacccccgctctaggaagctagtctgtggaatatgttttgaggggtgttcttctgatatgatgagctctgctggttgtgctcatttttattgccatgaatgttgggaaggctacattagcgctgcaattggtgatggtccaggatgtttgtcattgcgatgccctgatccatcttgtagtgctatggttcttcaagggatgattaatgaattagctaaagatgaggatagaaaaaaatatgcacgatttctcttacgcgcatatgttgaaggtagcaagaagactaaatggtgtccagctcctgactgcacatgtgctgtggagttccttggtgatgaaaactatgatgtttcatgcaattgcatgttcagcttttgttggaattgcactgaggaagctcatcgaccagtgaactgtgagactgtttctaagtggatattaaaaaacagtgcagaatctgaaaacatgaactggatactggctaattctaagccctgtccaaagtgcaaacggccaatagagaaaaaccagggatgcatgcatatgacatgcacccctccttgtaaattcgaattttgctggttatgtctgggtgcatggtcagatcacggagagagaacaggtggcttttatgcttgcaatcgttatgaatcagcaaagaaagagggagtttacgacgagactgatgcaaggagggaaagagctaaaaactctcttgagagatatatgcattactatgagcgctgggcatccaatcagacatcgaggcagaaggcccaagcagatctgctaaaagcggaaaaggaccagattgcaaatttaactgacattttcgggataccagagacccagcttaagttcataatcgaagcttggtcacagattatagaatgcaggcgagtgttgaaatggacatatgcttatggctactatctggatgataagatcaagagtgaattttttgagtatctgcaaggtgaggctgagtctggtttggaacgcctgcatcagtgcgctgagaaagacttgcaaatttttttgccgtctgtgaaatctgacagcactgaaacaacgacacctacagtggctgaatttggtgaattccgcgtgaagcttgctggacttacaagcgtgactcggaattactttgagaaccttgttcaagctttggaagctgggttggaggatgtccgtgccacaggccaggctgctggtacatccagcactgccaccagctccaagaaaggaggaactaaatccaagaagaagcagcacactgcaccatcatctgaccacactgatgatgggtggccctgcgagcgctgcacatttcttaaccctcctacagtggatgcatgcagcgtctgcgaaaagagtaggtactagatgatggaatagctcaaagggagccagggaggcatcccaagaaaacctcaaagctcgtgagaagcatgcatgcatcggatgctgagaagaagagcttccagctgccgcaatgttgtacagagagttattttagggcctcggttggaaacggtgtggaggctcaagtggtcacatgtttgtgggggtcatttggttttctagttcttttctgttgttccttgtaaatatatttgttgtgatgtggtgacctgtgtttatgtgatgagtttttgtttctgacaaactgtgaaattaaactttaacaaaactgatgagaggtagctctgtttattccctcctaattgcgggcagggtctttgtctattcttccacattatttatctacggttacttgccaagtaaccatctgct

SEQ ID NO: 41330 - DNA, 2319 bp, Zea Mays
ctcgggcacgcaactctaccgacctccgctcaccgccccctttcctcctatccctcccagagccccgacccggccggccggccggccggaaccctagccttatcgcccctccctttcccgcctcgcctccgcgcgatctcccgatcgccggattcgtgccgcggctggatggactccgacgtggagatgaacaccgccagcgatgaggaggtgatggacaacgatgactactacgactactgctacagcgacgtgggcgacgacggtgggagcaacagcgggagcgaggagctggtggccggggactacgacgagggcctcgaggccgaggggaccgacgaggtggtctctaggcgcgagcagacatttgtggttttaaacgaacaagttatatctgaacgtcaagccgaagatgtgagcaaggtatctgccgtcacactgattacaagggaggaggcgtgtgccctcctccatcactataaatggaacatcagcaagctgagtgacgaatggtttgcagatgaagaaaaagtccgccatactgttggcttacttttgaatggaaatcatgacccccgctctaggaagctagtctgtggaatatgttttgaggggtgttcttctgatatgatgagctctgctggttgtgctcatttttattgccatgaatgttgggaaggctacattagcgctgcaattggtgatggtccaggatgtttgtcattgcgatgccctgatccatcttgtagtgctatggttcttcaagggatgattaatgaattagctaaagatgaggatagaaaaaaatatgcacgatttctcttacgcgcatatgttgaaggtagcaagaagactaaatggtgtccagctcctgactgcacatgtgctgtggagttccttggtgatgaaaactatgatgtttcatgcaattgcatgttcagcttttgttggaattgcactgaggaagctcatcgaccagtgaactgtgagactgtttctaagtggatattaaaaaacagtgcagaatctgaaaacatgaactggatactggctaattctaagccctgtccaaagtgcaaacggccaatagagaaaaaccagggatgcatgcatatgacatgcacccctccttgtaaattcgaattttgctggttatgtctgggtgcatggtcagatcacggagagagaacaggtggcttttatgcttgcaatcgttatgaatcagcaaagaaagagggagtttacgacgagactgatgcaaggagggaaagagctaaaaactctcttgagagatatatgcattactatgagcgctgggcatccaatcagacaattgcaaatttaactgacattttcgggataccagagacccagcttaagttcataatcgaagcttggtcacagattatagaatgcaggcgagtgttgaaatggacatatgcttatggctactatctggatgataagatcaagagtgaattttttgagtatctgcaaggtgaggctgagtctggtttggaacgcctgcatcagtgcgctgagaaagacttgcaaatttttttgccgtctgtgaaatctgacagcactgaaacaacgacacctacagtggctgaatttggtgaattccgcgtgaagcttgctggacttacaagcgtgactcggaattactttgagaaccttgttcaagctttggaagctgggttggaggatgtccgtgccacaggccaggctgctggtacatccagcactgccaccagctccaagaaaggaggaactaaatccaagaagaagcagcacactgcaccatcatctgaccacactgatgatgggtggccctgcgagcgctgcacatttcttaaccctcctacagtggatgcatgcagcgtctgcgaaaagagtaggtactagatgatggaatagctcaaagggagccagggaggcatcccaagaaaacctcaaagctcgtgagaagcatgcatgcatcggatgctgagaagaagagcttccagctgccgcaatgttgtacagagagttattttagggcctcggttggaaacggtgtggaggctcaagtggtcacatgtttgtgggggtcatttggttttctagttcttttctgttgttccttgtaaatatatttgttgtgatgtggtgacctgtgtttatgtgatgagtttttgtttctgacaaactgtgaaattaaactttaacaaaactgatgagaggtagctctgtttattccctcctaattgcgggcagggtctttgtctattcttccacattatttatctacggttacttgccaagtaaccatctgct

SEQ ID NO: 41331 - DNA, 2254 bp, Zea Mays
aactctaccgacctccgctcaccgccccctttcctcctatccctcccagagccccgacccggccggccggccggccggaaccctagccttatcgcccctccctttcccgcctcgcctccgcgcgatctcccgatcgccggattcgtgccgcggctggatggactccgacgtggagatgaacaccgccagcgatgaggaggtgatggacaacgatgactactacgactactgctacagcgacgtgggcgacgacggtgggagcaacagcgggagcgaggagctggtggccggggactacgacgagggcctcgaggccgaggggaccgacgaggtggtctctaggcgcgagcagacatttgtggttttaaacgaacaagttatatctgaacgtcaagccgaagatgtgagcaagatgaagaaaaagtccgccatactgttggcttacttttgaatggaaatcatgacccccgctctaggaagctagtctgtggaatatgttttgaggggtgttcttctgatatgatgagctctgctggttgtgctcatttttattgccatgaatgttgggaaggctacattagcgctgcaattggtgatggtccaggatgtttgtcattgcgatgccctgatccatcttgtagtgctatggttcttcaagggatgattaatgaattagctaaagatgaggatagaaaaaaatatgcacgatttctcttacgcgcatatgttgaaggtagcaagaagactaaatggtgtccagctcctgactgcacatgtgctgtggagttccttgggatcgagcatccgaggcttcatcaatatccattactcttgtttgcagtgcactgaggaagctcatcgaccagtgaactgtgagactgtttctaagtggatattaaaaaacagtgcagaatctgaaaacatgaactggatactggctaattctaagccctgtccaaagtgcaaacggccaatagagaaaaaccagggatgcatgcatatgacatgcacccctccttgtaaattcgaattttgctggttatgtctgggtgcatggtcagatcacggagagagaacaggtggcttttatgcttgcaatcgttatgaatcagcaaagaaagagggagtttacgacgagactgatgcaaggagggaaagagctaaaaactctcttgagagatatatgcattactatgagcgctgggcatccaatcagacatcgaggcagaaggcccaagcagatctgctaaaagcggaaaaggaccagattgcaaatttaactgacattttcgggataccagagacccagcttaagttcataatcgaagcttggtcacagattatagaatgcaggcgagtgttgaaatggacatatgcttatggctactatctggatgataagatcaagagtgaattttttgagtatctgcaaggtgaggctgagtctggtttggaacgcctgcatcagtgcgctgagaaagacttgcaaatttttttgccgtctgtgaaatctgacagcactgaaacaacgacacctacagtggctgaatttggtgaattccgcgtgaagcttgctggacttacaagcgtgactcggaattactttgagaaccttgttcaagctttggaagctgggttggaggatgtccgtgccacaggccaggctgctggtacatccagcactgccaccagctccaagaaaggaggaactaaatccaagaagaagcagcacactgcaccatcatctgaccacactgatgatgggtggccctgcgagcgctgcacatttcttaaccctcctacagtggatgcatgcagcgtctgcgaaaagagtaggtactagatgatggaatagctcaaagggagccagggaggcatcccaagaaaacctcaaagctcgtgagaagcatgcatgcatcggatgctgagaagaagagcttccagctgccgcaatgttgtacagagagttattttagggcctcggttggaaacggtgtggaggctcaagtggtcacatgtttgtgggggtcatttggttttctagttcttttctgttgttccttgtaaatatatttgttgtgatgtggtgacctgtgtttatgtgatgagtttttgtttctgacaaactgtgaaattaaactttaacaaaactgatgagaggtagctctgtttattccctcctaattgcgggcagggtctttgtctattcttccacattatttatctacggttacttgccaagtaaccatctgct

SEQ ID NO: 41332 - DNA, 2036 bp, Zea Mays
tgtggctgctgacgcctgttttatatgcaccgacatttgtggttttaaacgaacaagttatatctgaacgtcaagccgaagatgtgagcaaggtatctgccgtcacactgattacaagggaggaggcgtgtgccctcctccatcactataaatggaacatcagcaagctgagtgacgaatggtttgcagatgaagaaaaagtccgccatactgttggcttacttttgaatggaaatcatgacccccgctctaggaagctagtctgtggaatatgttttgaggggtgttcttctgatatgatgagctctgctggttgtgctcatttttattgccatgaatgttgggaaggctacattagcgctgcaattggtgatggtccaggatgtttgtcattgcgatgccctgatccatcttgtagtgctatggttcttcaagggatgattaatgaattagctaaagatgaggatagaaaaaaatatgcacgatttctcttacgcgcatatgttgaaggtagcaagaagactaaatggtgtccagctcctgactgcacatgtgctgtggagttccttggtgatgaaaactatgatgtttcatgcaattgcatgttcagcttttgttggaattgcactgaggaagctcatcgaccagtgaactgtgagactgtttctaagtggatattaaaaaacagtgcagaatctgaaaacatgaactggatactggctaattctaagccctgtccaaagtgcaaacggccaatagagaaaaaccagggatgcatgcatatgacatgcacccctccttgtaaattcgaattttgctggttatgtctgggtgcatggtcagatcacggagagagaacaggtggcttttatgcttgcaatcgttatgaatcagcaaagaaagagggagtttacgacgagactgatgcaaggagggaaagagctaaaaactctcttgagagatatatgcattactatgagcgctgggcatccaatcagacatcgaggcagaaggcccaagcagatctgctaaaagcggaaaaggaccagattgcaaatttaactgacattttcgggataccagagacccagcttaagttcataatcgaagcttggtcacagattatagaatgcaggcgagtgttgaaatggacatatgcttatggctactatctggatgataagatcaagagtgaattttttgagtatctgcaaggtgaggctgagtctggtttggaacgcctgcatcagtgcgctgagaaagacttgcaaatttttttgccgtctgtgaaatctgacagcactgaaacaacgacacctacagtggctgaatttggtgaattccgcgtgaagcttgctggacttacaagcgtgactcggaattactttgagaaccttgttcaagctttggaagctgggttggaggatgtccgtgccacaggccaggctgctggtacatccagcactgccaccagctccaagaaaggaggaactaaatccaagaagaagcagcacactgcaccatcatctgaccacactgatgatgggtggccctgcgagcgctgcacatttcttaaccctcctacagtggatgcatgcagcgtctgcgaaaagagtaggtactagatgatggaatagctcaaagggagccagggaggcatcccaagaaaacctcaaagctcgtgagaagcatgcatgcatcggatgctgagaagaagagcttccagctgccgcaatgttgtacagagagttattttagggcctcggttggaaacggtgtggaggctcaagtggtcacatgtttgtgggggtcatttggttttctagttcttttctgttgttccttgtaaatatatttgttgtgatgtggtgacctgtgtttatgtgatgagtttttgtttctgacaaactgtgaaattaaactttaacaaaactgatgagaggtagctctgtttattccctcctaattgcgggcagggtctttgtctattcttccacattatttatctacggttacttgccaagtaaccatctgct

SEQ ID NO: 41333 - DNA, 1749 bp, Zea Mays
gtcgctccctcctcctcctttgttattgctgatgcatgattaggttccattgtcattatttgctacattagcgctgcaattggtgatggtccaggatgtttgtcattgcgatgccctgatccatcttgtagtgctatggttcttcaagggatgattaatgaattagctaaagatgaggatagaaaaaaatatgcacgatttctcttacgcgcatatgttgaaggtagcaagaagactaaatggtgtccagctcctgactgcacatgtgctgtggagttccttggtgatgaaaactatgatgtttcatgcaattgcatgttcagcttttgttggaattgcactgaggaagctcatcgaccagtgaactgtgagactgtttctaagtggatattaaaaaacagtgcagaatctgaaaacatgaactggatactggctaattctaagccctgtccaaagtgcaaacggccaatagagaaaaaccagggatgcatgcatatgacatgcacccctccttgtaaattcgaattttgctggttatgtctgggtgcatggtcagatcacggagagagaacaggtggcttttatgcttgcaatcgttatgaatcagcaaagaaagagggagtttacgacgagactgatgcaaggagggaaagagctaaaaactctcttgagagatatatgcattactatgagcgctgggcatccaatcagacatcgaggcagaaggcccaagcagatctgctaaaagcggaaaaggaccagattgcaaatttaactgacattttcgggataccagagacccagcttaagttcataatcgaagcttggtcacagattatagaatgcaggcgagtgttgaaatggacatatgcttatggctactatctggatgataagatcaagagtgaattttttgagtatctgcaaggtgaggctgagtctggtttggaacgcctgcatcagtgcgctgagaaagacttgcaaatttttttgccgtctgtgaaatctgacagcactgaaacaacgacacctacagtggctgaatttggtgaattccgcgtgaagcttgctggacttacaagcgtgactcggaattactttgagaaccttgttcaagctttggaagctgggttggaggatgtccgtgccacaggccaggctgctggtacatccagcactgccaccagctccaagaaaggaggaactaaatccaagaagaagcagcacactgcaccatcatctgaccacactgatgatgggtggccctgcgagcgctgcacatttcttaaccctcctacagtggatgcatgcagcgtctgcgaaaagagtaggtactagatgatggaatagctcaaagggagccagggaggcatcccaagaaaacctcaaagctcgtgagaagcatgcatgcatcggatgctgagaagaagagcttccagctgccgcaatgttgtacagagagttattttagggcctcggttggaaacggtgtggaggctcaagtggtcacatgtttgtgggggtcatttggttttctagttcttttctgttgttccttgtaaatatatttgttgtgatgtggtgacctgtgtttatgtgatgagtttttgtttctgacaaactgtgaaattaaactttaacaaaactgatgagaggtagctctgtttattccctcctaattgcgggcagggtctttgtctattcttccacattatttatctacggttacttgccaagtaaccatctgct

SEQ ID NO: 41334 - DNA, 1899 bp, Zea Mays
ctcacttcctttggacttttccccttaggctgaaaagtctgacacgttcgccaccctcattcacttcttcgcctgggtctccacctagtttcgtcgcccggttcgcgcccttcagtgtgataacggccgcgagttcgacaactacgcctctcgctccttcctcgcccacgacgttcagttgcagctctcgcatagttgttaaagcggcaaggcgaggctacattagcgctgcaattggtgatggtccaggatgtttgtcattgcgatgccctgatccatcttgtagtgctatggttcttcaagggatgattaatgaattagctaaagatgaggatagaaaaaaatatgcacgatttctcttacgcgcatatgttgaaggtagcaagaagactaaatggtgtccagctcctgactgcacatgtgctgtggagttccttgggatcgagcatccgaggcttcatcaatatccattactcttgtttgcagtgcactgaggaagctcatcgaccagtgaactgtgagactgtttctaagtggatattaaaaaacagtgcagaatctgaaaacatgaactggatactggctaattctaagccctgtccaaagtgcaaacggccaatagagaaaaaccagggatgcatgcatatgacatgcacccctccttgtaaattcgaattttgctggttatgtctgggtgcatggtcagatcacggagagagaacaggtggcttttatgcttgcaatcgttatgaatcagcaaagaaagagggagtttacgacgagactgatgcaaggagggaaagagctaaaaactctcttgagagatatatgcattactatgagcgctgggcatccaatcagacatcgaggcagaaggcccaagcagatctgctaaaagcggaaaaggaccagattgcaaatttaactgacattttcgggataccagagacccagcttaagttcataatcgaagcttggtcacagattatagaatgcaggcgagtgttgaaatggacatatgcttatggctactatctggatgataagatcaagagtgaattttttgagtatctgcaaggtgaggctgagtctggtttggaacgcctgcatcagtgcgctgagaaagacttgcaaatttttttgccgtctgtgaaatctgacagcactgaaacaacgacacctacagtggctgaatttggtgaattccgcgtgaagcttgctggacttacaagcgtgactcggaattactttgagaaccttgttcaagctttggaagctgggttggaggatgtccgtgccacaggccaggctgctggtacatccagcactgccaccagctccaagaaaggaggaactaaatccaagaagaagcagcacactgcaccatcatctgaccacactgatgatgggtggccctgcgagcgctgcacatttcttaaccctcctacagtggatgcatgcagcgtctgcgaaaagagtaggtactagatgatggaatagctcaaagggagccagggaggcatcccaagaaaacctcaaagctcgtgagaagcatgcatgcatcggatgctgagaagaagagcttccagctgccgcaatgttgtacagagagttattttagggcctcggttggaaacggtgtggaggctcaagtggtcacatgtttgtgggggtcatttggttttctagttcttttctgttgttccttgtaaatatatttgttgtgatgtggtgacctgtgtttatgtgatgagtttttgtttctgacaaactgtgaaattaaactttaacaaaactgatgagaggtagctctgtttattccctcctaattgcgggcagggtctttgtctattcttccacattatttatctacggttacttgccaagtaaccatctgct

SEQ ID NO: 41335 - DNA, 1859 bp, Zea Mays
gttcgccaccctcattcacttcttcgcctgggtctccacctagtttcgtcgcccggttcgcgcccttcagtgtgataacggccgcgagttcgacaactacgcctctcgctccttcctcgcccacgacgttcagttgcagctctcgcatagttgttaaagcggcaaggcgaggctacattagcgctgcaattggtgatggtccaggatgtttgtcattgcgatgccctgatccatcttgtagtgctatggttcttcaagggatgattaatgaattagctaaagatgaggatagaaaaaaatatgcacgatttctcttacgcgcatatgttgaaggtagcaagaagactaaatggtgtccagctcctgactgcacatgtgctgtggagttccttggtgatgaaaactatgatgtttcatgcaattgcatgttcagcttttgttggaattgcactgaggaagctcatcgaccagtgaactgtgagactgtttctaagtggatattaaaaaacagtgcagaatctgaaaacatgaactggatactggctaattctaagccctgtccaaagtgcaaacggccaatagagaaaaaccagggatgcatgcatatgacatgcacccctccttgtaaattcgaattttgctggttatgtctgggtgcatggtcagatcacggagagagaacaggtggcttttatgcttgcaatcgttatgaatcagcaaagaaagagggagtttacgacgagactgatgcaaggagggaaagagctaaaaactctcttgagagatatatgcattactatgagcgctgggcatccaatcagacatcgaggcagaaggcccaagcagatctgctaaaagcggaaaaggaccagattgcaaatttaactgacattttcgggataccagagacccagcttaagttcataatcgaagcttggtcacagattatagaatgcaggcgagtgttgaaatggacatatgcttatggctactatctggatgataagatcaagagtgaattttttgagtatctgcaaggtgaggctgagtctggtttggaacgcctgcatcagtgcgctgagaaagacttgcaaatttttttgccgtctgtgaaatctgacagcactgaaacaacgacacctacagtggctgaatttggtgaattccgcgtgaagcttgctggacttacaagcgtgactcggaattactttgagaaccttgttcaagctttggaagctgggttggaggatgtccgtgccacaggccaggctgctggtacatccagcactgccaccagctccaagaaaggaggaactaaatccaagaagaagcagcacactgcaccatcatctgaccacactgatgatgggtggccctgcgagcgctgcacatttcttaaccctcctacagtggatgcatgcagcgtctgcgaaaagagtaggtactagatgatggaatagctcaaagggagccagggaggcatcccaagaaaacctcaaagctcgtgagaagcatgcatgcatcggatgctgagaagaagagcttccagctgccgcaatgttgtacagagagttattttagggcctcggttggaaacggtgtggaggctcaagtggtcacatgtttgtgggggtcatttggttttctagttcttttctgttgttccttgtaaatatatttgttgtgatgtggtgacctgtgtttatgtgatgagtttttgtttctgacaaactgtgaaattaaactttaacaaaactgatgagaggtagctctgtttattccctcctaattgcgggcagggtctttgtctattcttccacattatttatctacggttacttgccaagtaaccatctgct

SEQ ID NO: 41336 - DNA, 1347 bp, Zea Mays
aaatatttctgtgaggttgaatcgatactggctaattctaagccctgtccaaagtgcaaacggccaatagagaaaaaccagggatgcatgcatatgacatgcacccctccttgtaaattcgaattttgctggttatgtctgggtgcatggtcagatcacggagagagaacaggtggcttttatgcttgcaatcgttatgaatcagcaaagaaagagggagtttacgacgagactgatgcaaggagggaaagagctaaaaactctcttgagagatatatgcattactatgagcgctgggcatccaatcagacatcgaggcagaaggcccaagcagatctgctaaaagcggaaaaggaccagattgcaaatttaactgacattttcgggataccagagacccagcttaagttcataatcgaagcttggtcacagattatagaatgcaggcgagtgttgaaatggacatatgcttatggctactatctggatgataagatcaagagtgaattttttgagtatctgcaaggtgaggctgagtctggtttggaacgcctgcatcagtgcgctgagaaagacttgcaaatttttttgccgtctgtgaaatctgacagcactgaaacaacgacacctacagtggctgaatttggtgaattccgcgtgaagcttgctggacttacaagcgtgactcggaattactttgagaaccttgttcaagctttggaagctgggttggaggatgtccgtgccacaggccaggctgctggtacatccagcactgccaccagctccaagaaaggaggaactaaatccaagaagaagcagcacactgcaccatcatctgaccacactgatgatgggtggccctgcgagcgctgcacatttcttaaccctcctacagtggatgcatgcagcgtctgcgaaaagagtaggtactagatgatggaatagctcaaagggagccagggaggcatcccaagaaaacctcaaagctcgtgagaagcatgcatgcatcggatgctgagaagaagagcttccagctgccgcaatgttgtacagagagttattttagggcctcggttggaaacggtgtggaggctcaagtggtcacatgtttgtgggggtcatttggttttctagttcttttctgttgttccttgtaaatatatttgttgtgatgtggtgacctgtgtttatgtgatgagtttttgtttctgacaaactgtgaaattaaactttaacaaaactgatgagaggtagctctgtttattccctcctaattgcgggcagggtctttgtctattcttccacattatttatctacggttacttgccaagtaaccatctgct

SEQ ID NO: 41337 - DNA, 1512 bp, Zea Mays
ttatgaaggacgtgagtgcatgacgggtttgacacaacccaaacgtggccctttctcaacccggcgccgcaagggaaaaccctcgcgccgcttcgctcgtttcaattccaaaaaaaaaggaaaaccctttgcagtcggggaactctcgcattccactattccagtcatcgagagcgcggctgcggcggcgagggaaacatcctttctcgcatcatggccacctctacggagccggagggcgcgccgcccgcggctaaggggcctaaaggagaggccaacacgaaggggagcaacgaacatagagaggtcggcgcaggcagcggcggcggctcgcagaagcggaagaggaaggaggtcttcatctacggcaactacaggaactactatggctaccggattgatcgcaatgttggtgaagatcctcgccttgaggcgttcaagaaacagtggtttgaaaagaaggattgtctcgatattggatgcaaccagggtttggtaacgattggcttagccatgaaatttaaatgtcaaagcattcttggcgttgatattgattcaggtttaattgagactgctaagtggaatctgcgaaggataatgcggcaggataaggtggctacaaacaacgtcaaagctcagaaatcatcggattctcctcagagctctccagaagaattggcatctgagttatcgaatgggaacaagcaccaagatctttttaaaattgtctcttttcgacgtgaaaattttgtagcgagtatggatggatgttcagaacagtatgacaccatactatgttacgttatttgtgaagatctggaggcttctaagaccgggaggtgtttttatcatggagcctcaaccatggagttcatacaagagaaacagattagtttcagaggtcgccagaaataacttcaacaccatctgtatatacccagggacatttcgcgagattcttctagacaaggttggatttaggtcggtggagttgcttgccgaaagattagtgggcaccgtcagtggtttcgatcgtccaatagaagtttaccacaagtgatgaaactggattaaggattgtggcatgcctgcccaattgcacactcacctgaccaaattattgtgttgagctttgaaatgctcactgcctgactaggtacaagtacaacaatgaagcaagtatggtgctggacttgcgtttgtaaaacagaatatcagatggcgaaggatcaagatggaagaagaggtggtaggatgttgtgttctctagatggaagtgctgggaattttgttaatgggtctgtttttgtataaaatggataatggataccgtaccctgaaagggaaagagtccttcatgagtatcattttgcctgctatggatatcatgatttctcttgcttattgtttgccactccccattttcaaaactgtaagtcattttggcttttgtagatacataattttccatgttgatgccttgtgcttatttatgtgcgcagtgaaaatgcc

SEQ ID NO: 41338 - DNA, 1522 bp, Zea Mays
ttatgaaggacgtgagtgcatgacgggtttgacacaacccaaacgtggccctttctcaacccggcgccgcaagggaaaaccctcgcgccgcttcgctcgtttcaattccaaaaaaaaaggaaaaccctttgcagtcggggaactctcgcattccactattccagtcatcgagagcgcggctgcggcggcgagggaaacatcctttctcgcatcatggccacctctacggagccggagggcgcgccgcccgcggctaaggggcctaaaggagaggccaacacgaaggggagcaacgaacatagagaggtcggcgcaggcagcggcggcggctcgcagaagcggaagaggaaggaggtcttcatctacggcaactacaggaactactatggctaccggattgatcgcaatgttggtgaagatcctcgccttgaggcgttcaagaaacagtggtttgaaaagaaggattgtctcgatattggatgcaaccagggtttggtaacgattggcttagccatgaaatttaaatgtcaaagcattcttggcgttgatattgattcaggtttaattgagactgctaagtggaatctgcgaaggataatgcggcaggataaggtggctacaaacaacgtcaaagctcagaaatcatcggattctcctcagagctctccagaagaattggcatctgagttatcgaatgggaacaagcaccaagatctttttaaaattgtctcttttcgacgtgaaaattttgtagcgagtatggatggatgttcagaacagtatgacaccatactatgtttgagtgtgacaaaatggatccacctgaactggggcgacgatggcctagttacgttatttgtgaagatctggaggcttctaagaccgggaggtgtttttatcatggagcctcaaccatggagttcatacaagagaaacagattagtttcagagggacatttcgcgagattcttctagacaaggttggatttaggtcggtggagttgcttgccgaaagattagtgggcaccgtcagtggtttcgatcgtccaatagaagtttaccacaagtgatgaaactggattaaggattgtggcatgcctgcccaattgcacactcacctgaccaaattattgtgttgagctttgaaatgctcactgcctgactaggtacaagtacaacaatgaagcaagtatggtgctggacttgcgtttgtaaaacagaatatcagatggcgaaggatcaagatggaagaagaggtggtaggatgttgtgttctctagatggaagtgctgggaattttgttaatgggtctgtttttgtataaaatggataatggataccgtaccctgaaagggaaagagtccttcatgagtatcattttgcctgctatggatatcatgatttctcttgcttattgtttgccactccccattttcaaaactgtaagtcattttggcttttgtagatacataattttccatgttgatgccttgtgcttatttatgtgcgcagtgaaaatgcc

SEQ ID NO: 41339 - DNA, 1756 bp, Zea Mays
ttatgaaggacgtgagtgcatgacgggtttgacacaacccaaacgtggccctttctcaacccggcgccgcaagggaaaaccctcgcgccgcttcgctcgtttcaattccaaaaaaaaaggaaaaccctttgcagtcggggaactctcgcattccactattccagtcatcgagagcgcggctgcggcggcgagggaaacatcctttctcgcatcatggccacctctacggagccggagggcgcgccgcccgcggctaaggggcctaaaggagaggccaacacgaaggggagcaacgaacatagagaggtcggcgcaggcagcggcggcggctcgcagaagcggaagaggaaggaggtcttcatctacggcaactacaggaactactatggctaccggattgatcgcaatgttggtgaagatcctcgccttgaggcgttcaagaaacagtggtttgaaaagaaggattgtctcgatattggatgcaaccagggtttggtaacgattggcttagccatgaaatttaaatgtcaaagcattcttggcgttgatattgattcaggtttaattgagactgctaagtggaatctgcgaaggataatgcggcaggataaggtggctacaaacaacgtcaaagctcagaaatcatcggattctcctcagagctctccagaagaattggcatctgagttatcgaatgggaacaagcaccaagatctttttaaaattgtctcttttcgacgtgaaaattttgtagcgagtatggatggatgttcagaacagtatgacaccatactatgtgtgacaaaatggatccacctgaactggggcgacgatggcctagttacgttatttgtgaagatctggaggcttctaagaccgggaggtgtttttatcatggagcctcaaccatggagttcatacaagagaaacagattagtttcagaggctagaggcaactcttgaaaagccttcgttattatctgatgcactcctgatcctaaggttaagtgaacataccataaatgatcaaaatcctccacaaacttaatacaaatgctcaattctatcatgttgtcgaccttaaaaattttcctggagcgtaatgaacttgcatttcttattccctttcccctacctgtttttaggtcgccagaaataacttcaacaccatctgtatatacccagggacatttcgcgagattcttctagacaaggttggatttaggtcggtggagttgcttgccgaaagattagtgggcaccgtcagtggtttcgatcgtccaatagaagtttaccacaagtgatgaaactggattaaggattgtggcatgcctgcccaattgcacactcacctgaccaaattattgtgttgagctttgaaatgctcactgcctgactaggtacaagtacaacaatgaagcaagtatggtgctggacttgcgtttgtaaaacagaatatcagatggcgaaggatcaagatggaagaagaggtggtaggatgttgtgttctctagatggaagtgctgggaattttgttaatgggtctgtttttgtataaaatggataatggataccgtaccctgaaagggaaagagtccttcatgagtatcattttgcctgctatggatatcatgatttctcttgcttattgtttgccactccccattttcaaaactgtaagtcattttggcttttgtagatacataattttccatgttgatgccttgtgcttatttatgtgcgcagtgaaaatgcc

SEQ ID NO: 41340 - DNA, 1619 bp, Zea Mays
ttatgaaggacgtgagtgcatgacgggtttgacacaacccaaacgtggccctttctcaacccggcgccgcaagggaaaaccctcgcgccgcttcgctcgtttcaattccaaaaaaaaaggaaaaccctttgcagtcggggaactctcgcattccactattccagtcatcgagagcgcggctgcggcggcgagggaaacatcctttctcgcatcatggccacctctacggagccggagggcgcgccgcccgcggctaaggggcctaaaggagaggccaacacgaaggggagcaacgaacatagagaggtcggcgcaggcagcggcggcggctcgcagaagcggaagaggaaggaggtcttcatctacggcaactacaggaactactatggctaccggattgatcgcaatgttggtgaagatcctcgccttgaggcgttcaagaaacagtggtttgaaaagaaggattgtctcgatattggatgcaaccagggtttggtaacgattggcttagccatgaaatttaaatgtcaaagcattcttggcgttgatattgattcaggtttaattgagactgctaagtggaatctgcgaaggataatgcggcaggataaggtggctacaaacaacgtcaaagctcagaaatcatcggattctcctcagagctctccagaagaattggcatctgagttatcgaatgggaacaagcaccaagatctttttaaaattgtctcttttcgacgtgaaaattttgtagcgagtatggatggatgttcagaacagtatgacaccatactatgtttgagtgtgacaaaatggatccacctgaactggggcgacgatggcctagttacgttatttgtgaagatctggaggcttctaagaccgggaggtgtttttatcatggagcctcaaccatggagttcatacaagagaaacagattagtttcagaggctagaggcaactcttgaaaagccttcgttattatctgatgcactcctgatcctaaggtcgccagaaataacttcaacaccatctgtatatacccagggacatttcgcgagattcttctagacaaggttggatttaggtcggtggagttgcttgccgaaagattagtgggcaccgtcagtggtttcgatcgtccaatagaagtttaccacaagtgatgaaactggattaaggattgtggcatgcctgcccaattgcacactcacctgaccaaattattgtgttgagctttgaaatgctcactgcctgactaggtacaagtacaacaatgaagcaagtatggtgctggacttgcgtttgtaaaacagaatatcagatggcgaaggatcaagatggaagaagaggtggtaggatgttgtgttctctagatggaagtgctgggaattttgttaatgggtctgtttttgtataaaatggataatggataccgtaccctgaaagggaaagagtccttcatgagtatcattttgcctgctatggatatcatgatttctcttgcttattgtttgccactccccattttcaaaactgtaagtcattttggcttttgtagatacataattttccatgttgatgccttgtgcttatttatgtgcgcagtgaaaatgcc

SEQ ID NO: 41341 - DNA, 1060 bp, Zea Mays
ggctttaacaccttagcaagacagcagcaaaaatcctcgcgattttgaaaccctcgcctccctcttcctttccggccgccgcctgccgccggaaggagaaaaaatgggtgccggtggggaggaagcgccgcggataatcgtgcctatggcggtggagggtaccccgaatcagctggcgtttgtagaggagtcgaagctgcagaagcgcaaggagaacgtggactgggccgtgaggaaccgggagcgcagggcggccaagcgccagcgcatccgcgacgagcacaaggtcgccgtcaggcggcccgaggagttcgtcaccgcgttccgcaacaaggagcgcgacttcctgcggatgaggacccgcatcaaggtccgcagccagccgcccgtcgaggcgctcggctccaggctcgtcttcgcgattcgcatccctggctccgtggacttgcacccgcacatcaggaaggttttgaggaaactacgactgacgaaggtcctcactggggtgttcctcagggccaccgagttgacgctgaagaggctgcttgtggtcgaaccctttgtcacatacgggtttccgaacttaaagagtgtgaaagagcttatctacaagaagggccgcgggttctttgacatggaacctttccctcttaccagcaacgatctaattgagaaggctcttggagatcatggcatcatatgcttggaagaccttgtgtacgagtcaggcaaccggggcgacaaagtcaacgaactaattgaaaaattgaattaaagcagagttgttcgcttcggactggtacggattaaaaccaaacgaacaggcctgtctctctctagttgtgattttgtggtggagtgatggatctgttactttgtcagttttgtaatagtatagctggatgtaatctagaggtgctgtttggtttacgaaatataatggtaacgataatgattcacactcgaatgatgttggtaataagtttgaatagttagtattaacttttggtgtaatatctaattactgttgaacctaaataaatatggtttaacgttacca

SEQ ID NO: 41342 - DNA, 1042 bp, Zea Mays
cgcctccctcttcctttccggccgccgcctgccgccggaaggagaaaaaatgggtgccggtggggaggaagcgccgcggataatcgtgcctatggcggtggagggtaccccgaatcagctggcgtttgtagaggagtcgaagctgcagaagcgcaaggagaacgtggactgggccgtgaggaaccgggagcgcagggcggccaagcgccagcgcatccgcgacgagcacaaggtcgccgtcaggcggcccgaggagttcgtcaccgcgttccgcaacaaggagcgcgacttcctgcggatgaggacccgcatcaaggtccgcagccagccgcccgtcgaggcgctcggctccaggctcgtcttcgcgattcgcatccctggggccaccgagttgacgctgaagaggctgcttgtggtcgaaccctttgtcacatacgggtttccgaacttaaagagtgtgaaagagcttatctacaagaagggccgcgggttctttgacatggaacctttccctcttaccagcaacgatctaattgagaaggctcttggagatcatggcatcatatgcttggaagaccttgtgtacgagatcgccactgtaggcccgcacttccgagaagcatcgaggttcctcatgcccttccagctcaagtgtccggagaggaggctgcagatgaagaggaaaccgtacagggatggtggcgactcaggcaaccggggcgacaaagtcaacgaactaattgaaaaattgaattaaagcagagttgttcgcttcggactggtacggattaaaaccaaacgaacaggcctgtctctctctagttgtgattttgtggtggagtgatggatctgttactttgtcagttttgtaatagtatagctggatgtaatctagaggtgctgtttggtttacgaaatataatggtaacgataatgattcacactcgaatgatgttggtaataagtttgaatagttagtattaacttttggtgtaatatctaattactgttgaacctaaataaatatggtttaacgttacca

SEQ ID NO: 41343 - DNA, 2815 bp, Zea Mays
acttttataatataatgtcagctcactgtttattgtctctaatgccggcaggattttttgagtaggcctaaacctttttaaggctagtttggcactttggcaaccccatttttccaagggattttcattttcccaagggaagttagttcattttcccttgggaaaacaggaattccttgggaaaatggagttgccaaactagcccttacatgttggattttccccttggatgcaaagttgctgttgagctgcatggttcagtttttagcacacttctcaatactctttatggatttattatgaggatttattatgaactgatagatgtaaacttctctttggaagtcttcaagttgatacatttaaggaattcctgaatttatggaggcaaaatttttattgccaacatctctgacttttatgtacctaacaattttctgttttagcgcattgcacaacgtattcggcaagatggtgggactgcagatgcatctcttcgtcgtgagatccaaactgaatcggttcagctaggaatttcgatgcaacatttgggtgctatgttctttgagcttggtcggacgatgatgatgcttcgcacagggcaatctccttctgaggcttttgtaaattctgggcctgctgtttatataaactccacaggaccaaacccaatcatggttcagccatcttttcaaaacacccctccttttggtgtatctaatataccagttctgggtggaatttctggtgcttttggtattgttgatccttctcgacatatgaatatcccaagtaacggtgcatctgcaacaagtggttcagctgctggtactaccaccggttctgaaggagctatccacgggaaccgccaagatgcggcaagaactcaaggaggtaacccaccaggtttcctggctgcaacacgtggattgccaaccagaacagttgttgctgctgttccagcacggtcctcagtgggcaatggagctcaaggaaattcaacatctgctattccacaagcttctgttggtggtgtttctggtgttcctcttatagcggcacaggtagccaatgcattggcaaatgcaccaagccaggtttctttatctacacaaagtgcagcagatcagggatttcacctgactacagacaacagagctgatgttctgagttcatcaacaccagccactacaccacagaatggtccctcaggtacttccggttccagtttgccatctcaagacaggaatactttaaatgttcccagtcttgatagtatacaacagcatccacaattgggagatacttgtgcagatacagctgacttatcaggagacgccacagccatcagtactcatgatgctccttcgaacccatcagttgacagttctgtgctgaagaacaaatcctcggatgaagtaggttcacagaccactgagccttctgcaagtggcagtgctgaaccattaggtcttggtggaggtctgattccaattccaaagaggcggagcaaagcagtaaagccatctgggagcacaactgatcctagtagggatttgtcctcagtcagccaaaaccaagatcctatttcagtagcccagcagtttctggaaggttttgcttcccgaaatactaatggtagcagaagcaacaccctctcctctggtcctccatcttctgtgccacaggctactgaagttcctccgagaagacagggtggtggacaacctgatattggcagcatgatatctggtatgctcaacaacccagttttcagcaacatgttgtcgaatgtggcaacacaggcagggggctctagtgctgatttgaagagcgtgatggaaggattacaaagccctgctattgtagatacgataagcaatatcgtgcagaatgtggatgagcaagacctgggggccatgtttggttcaggcagaggacaaggtggcatggatttgtcaaggatgttgcagcaaatgatgcccgttgtatcccaggctcttggtggtgcaggggggcgttctgctggtgcaaatggtggacagcataggtcgcggcctcagcgcattgacggtgaaggaaatgcaccagccagcagttctcagattgatctccatgaagctcgtcaaagcattgaacagcatgaatccccagagaatatcttccgcgctgtccttgaaactgctgctcaggcccatggtgaagataacagcattcagggcatggtcgaagaacttgccactgatcaagagcttgccgatgactacatgaaacttttgatggaacaagttcggcagaggatacagtcagagtcgcagtcggggagccagccttgaaggattgggcggcagggtcgtgtagccagccattcgctctgcgatatttatctatgggaaagaacagaaccaaagctgttgtctgggcgtttttcatgattaggtgcccggtgtacatgtggcgttgtaattttccgagataatgtatctgcagcagcatatctcgtactctggttagaactgtttttttttacgaattttgctagaggtacatacaacgagttttaaaggtggtgacgtctgaatttcgtggaattgacaatgacatgtctgtatgattggtgtcgcaactctccagttcggaaatttgttagcacaggttgtccttgttcctggcatgtgtttcaccttttagccattaaataccattttggttcatgtaaggtagtaaccttgtgcactgggtccggttataaatgattccttaagggctcatttgagatcaaaggtaatgaagaggaataagggatcaaaattcc

SEQ ID NO: 41344 - DNA, 2711 bp, Zea Mays
atttttccaagggattttcattttcccaagggaagttagttcattttcccttgggaaaacaggaattccttgggaaaatggagttgccaaactagcccttacatgttggattttccccttggatgcaaagttgctgttgagctgcatggttcagtttttagcacacttctcaatactctttatggatttattatgaggatttattatgaactgatagatgtaaacttctctttggaagtcttcaagttgatacatttaaggaattcctgaatttatggaggcaaaatttttattgccaacatctctgacttttatgtacctaacaattttctgttttagcgcattgcacaacgtattcggcaagatggtgggactgcagatgcatctcttcgtcgtgagatccaaactgaatcggttcagctaggaatttcgatgcaacatttgggtgctatgttctttgagcttggtcggacgatgatgatgcttcgcacagggcaatctccttctgaggcttttgtaaattctgggcctgctgtttatataaactccacaggaccaaacccaatcatggttcagccatcttttcaaaacacccctccttttggtgtatctaatataccagttctgggtggaatttctggtgcttttggtattgttgatccttctcgacatatgaatatcccaagtaacggtgcatctgcaacaagtggttcagctgctggtactaccaccggttctgaaggagctatccacgggaaccgccaagatgcggcaagaactcaaggaggtaacccaccaggtttcctggctgcaacacgtggattgccaaccagaacagttgttgctgctgttccagcacggtcctcagcagtgggcaatggagctcaaggaaattcaacatctgctattccacaagcttctgttggtggtgtttctggtgttcctcttatagcggcacaggtagccaatgcattggcaaatgcaccaagccaggtttctttatctacacaaagtgcagcagatcagggatttcacctgactacagacaacagagctgatgttctgagttcatcaacaccagccactacaccacagaatggtccctcaggtacttccggttccagtttgccatctcaagacaggaatactttaaatgttcccagtcttgatagtatacaacagcatccacaattgggagatacttgtgcagatacagctgacttatcaggagacgccacagccatcagtactcatgatgctccttcgaacccatcagttgacagttctgtgctgaagaacaaatcctcggatgaagtaggttcacagaccactgagccttctgcaagtggcagtgctgaaccattaggtcttggtggaggtctgattccaattccaaagaggcggagcaaagcagtaaagccatctgggagcacaactgatcctagtagggatttgtcctcagtcagccaaaaccaagatcctatttcagtagcccagcagtttctggaaggttttgcttcccgaaatactaatggtagcagaagcaacaccctctcctctggtcctccatcttctgtgccacaggctactgaagttcctccgagaagacagggtggtggacaacctgatattggcagcatgatatctggtatgctcaacaacccagttttcagcaacatgttgtcgaatgtggcaacacaggcagggggctctagtgctgatttgaagagcgtgatggaaggattacaaagccctgctattgtagatacgataagcaatatcgtgcagaatgtggatgagcaagacctgggggccatgtttggttcaggcagaggacaaggtggcatggatttgtcaaggatgttgcagcaaatgatgcccgttgtatcccaggctcttggtggtgcaggggggcgttctgctggtgcaaatggtggacagcataggtcgcggcctcagcgcattgacggtgaaggaaatgcaccagccagcagttctcagattgatctccatgaagctcgtcaaagcattgaacagcatgaatccccagagaatatcttccgcgctgtccttgaaactgctgctcaggcccatggtgaagataacagcattcagggcatggtcgaagaacttgccactgatcaagagcttgccgatgactacatgaaacttttgatggaacaagttcggcagaggatacagtcagagtcgcagtcggggagccagccttgaaggattgggcggcagggtcgtgtagccagccattcgctctgcgatatttatctatgggaaagaacagaaccaaagctgttgtctgggcgtttttcatgattaggtgcccggtgtacatgtggcgttgtaattttccgagataatgtatctgcagcagcatatctcgtactctggttagaactgtttttttttacgaattttgctagaggtacatacaacgagttttaaaggtggtgacgtctgaatttcgtggaattgacaatgacatgtctgtatgattggtgtcgcaactctccagttcggaaatttgttagcacaggttgtccttgttcctggcatgtgtttcaccttttagccattaaataccattttggttcatgtaaggtagtaaccttgtgcactgggtccggttataaatgattccttaagggctcatttgagatcaaaggtaatgaagaggaataagggatcaaaattcc

SEQ ID NO: 41345 - DNA, 799 bp, Zea Mays
tcgatataatggtatttctttctttctttctttcaagtcttcaggttcagtgagtcgagttggcgatgttttctcagttacaaatgtagccactcttgcttccacgatgctgggtgcatgcatgctgccctttgaaatcaccattcgagccctgaatgaagcgttaacgggcgaggtccagcgtctgaaactcgcaactggggagatgaccgatgggcctatgccgaagggcctgcagcagcagatgaactcccagatgctgcagctccagcagctgcagatccagcagcaggcgcccccacaacagacgcagcagcaaggccagcgacaacagccgcagaagtcggcgtaaagaccgtggctgagaggaggacgcggaagcgaattgagcattggccaaggccaactgaaggatgccgggtgggaaaagaaagaaccccaatcttttgccgtatatatatattatcagacaggttgtaggatagcagcaacagcagtagggcgggcgagggaccccgttggccccgcgcgatttgagttgttttcgccggataccgtaaccttagctggagtctgtcgtcgtcttggtgtcgtgcctgcctgcctagtgttgatgaggcgtcttggtagcgtcccttggaacgccctctcggagccggaggtgcttcttttgcttcttttgtctatatagataattatatgtgcatgggaacctgcgtagtactgcagttattattattatcattgttaatttattatatctatagagtctgtggactgttgaaggggtggggggctt

SEQ ID NO: 41346 - DNA, 677 bp, Zea Mays
tcgctggagaaccgatacagtgacgatccctgaatgaagcgttaacgggcgaggtccagcgtctgaaactcgcaactggggagatgaccgatgggcctatgccgaagggcctgcagcagcagatgaactcccagatgctgcagctccagcagctgcagatccagcagcaggcgcccccacaacagacgcagcagcaaggccagcgacaacagccgcagaagtcggcgtaaagaccgtggctgagaggaggacgcggaagcgaattgagcattggccaaggccaactgaaggatgccgggtgggaaaagaaagaaccccaatcttttgccgtatatatatattatcagacaggttgtaggatagcagcaacagcagtagggcgggcgagggaccccgttggccccgcgcgatttgagttgttttcgccggataccgtaaccttagctggagtctgtcgtcgtcttggtgtcgtgcctgcctgcctagtgttgatgaggcgtcttggtagcgtcccttggaacgccctctcggagccggaggtgcttcttttgcttcttttgtctatatagataattatatgtgcatgggaacctgcgtagtactgcagttattattattatcattgttaatttattatatctatagagtctgtggactgttgaaggggtggggggctt

SEQ ID NO: 41347 - DNA, 4971 bp, Zea Mays
gaagacgaggactggcacgcggccgcgacggccggaaggacgcagcagccgccgccgccgctcacccacgacgacaaccgcagcttccttcggatgctgcgtgacatgaaagagaagctgggcgtggacgcgcccaaggtggaggtgcgcttcgagaggcttaccgtggaggcggacgtccgcgtcggccgccgcgccgtcccgacgctgctcaacgccgccatcaacgccgcccaggagttagcaacgtctgttcatatgtgtgttacaaggaaaagacctatcagaatcataaatgaagtaagcggggtgattcgaccatcaaggatgacactacttctaggagcacctggttccgggaagacgactctactaaaagcgttagcaggaaaattggattcttctttgaagttcaaaggaaaagtcatgtacaatggagaagaaattaattactcaacaccacagacacagtacctgcgtacttatgttagccagtatgatcttcaccatgctgagatgacagtaagagagacaatcgacttctcttccaagatgcttggaaccaataatgaatttgatatgctaggagaagcaataagaagaaaaaagggtgtcatcaatgaagtggatcaagatcttgattcattcattaagctcttctctcaggccaccacctttggagaaggaagcaacctcacaacaaactatattatcaagatacttggcctgtctgagtgtgctgataccctagtaggagacgagatgagaagaggaatatctggagggcaaaagaagagagccacagttggtaagcatttctataagggctgatggtagaagacaaatacagccatatataggttttatgtagctgccaccagaaggacacatttcaatctgaaagaaaacgactactgacatttcaccacctcaagaatgtaaaatatagggtaggaatcttcatgatagcgaagaatgactagctctaaaatagaatgtttataactctcaagtaagatggaagtaacaaccagaaattagaatgacgaacagagtaaggagatacttaactggaacctaacctaagttggcatacgctaaagtgaagttgtttaatgcaggggagatgctagttggtctggcaagatgcttctttatggatgatatatcaacaggtcttgatagctccacggcatttgagatcatgaagtttctccaacagatggcccatttgatggatctcacaatggtaatttccttgttgcaaccaccgcctgagacattggaattatttgacgacattatacttttatgtgaggggcaaattgtgtatcatggtccccgagaaaatgctacggacttgttcgaaaccatgggattcaaatgccctgacaggaagaatgtagccgatttccttcaagaggtaatcaaccatcaaatgtgcctaactgccaataataaatagctaaactttgagataattaatacatcagatcctcaaaatgtatagtgttcaaggctaactttgagataattaatacatcagatccacaaaattaagcaggcaatagatgacttacaattctatgcatgagcataaaatgtcattgttctgcaatacacgtgcttttgcaaaataatgtaacaagttttctccaattggccactgaccaggtaacctctaagatggaccaaaagcaatactggactggtgaccaaaataagtatcagtaccatacaattgaaaattttgcagaatccttccgcacgtcatatcttcctcttctagtagaagacaaactgtgcagtccaaacaatactggaaagaataaggaggtaaaagtgaatgcaggtcgccgagtatccagatggaatattttcaaagcatgcttttcaagggaactgctgctgctgaaaagaaactctccggtccatatattcaagaccattcagataactgttatggctttggtgatctccacacttttcctgagaacaaaaatgagtcacaattctgtacttgatgccaacaagtacatgggagcactttttatggctgtcgtcatagtaaacttcaatgggatgactgaaattgcaatgacgataaagcggcttcccaccttctacaagcaaagagagctactagcattgccaggatgggcactcctttgttcagtttaccttattagcatcccaatatcgcttgttgagacaggcctttggacaggcttaacctactatgtgattggatatgcaccttctgctatcaggttcatccagcactttctggtactttttgccatgcatcaaatgtcaatgggcttgtatcgcttcttagcggccataggaaggacgcaagtgatggccaacatgctagggactgcagctcttattgcaatctacatacttggaggattcgtcatatcaaaagatgatctccaaccatggttgcgctggggatattggacgtccccgttcacctatgcacagaatgcgatcgccctcaatgagttccatgacaaaagatggaattcagaattttattataacggtgcaaacaccgtcggtgaagctatcctcaagatcagagggctgctcatggagtggcactggtactggatttgtgtcaccattttgtttggatactcgctggtcttcaacatcttcagcatatttgcattggagttcatcggctgtatgtataccaatctatcacaaacctcctaaatattgcatttaaacgaaaaaataattatctgcttgtttactgcttgcagctccacacaagcatcaagttaacatcaagaccacaaaagtgaatttcgtgtacaataggcagatggctgaaaatggcaattcatcaaatgatcaagttatcctcccatttcgacccctctccctggtctttgatcatattcaatattttgttgacatgcctaaggtaatatcttgttcacttattaagatcttacctggtagcttcattaattcctatcacatactgaagacaagaatacaaatatcccaccaggagatgacaaaaaatggagcaacgaagaaaaagcttcagctgctacaagatgtcagtggtgcttttaggccaggagtactaacagctctgatggggataactggcgctggcaagacaacattgctcgatgtattagctggaaggaaaactgggggatatatcgaagggactattaagatagcaggctatcctaagaagcaggatacattctcaaggatctcaggttactgtgaacagagtgacattcattcccctaatctcactgtttatgagtcactgaaattttctgcatggcttcgtctaccttcaaatgttaaacctcatcaaagagacatgttcatcaaagaagtcatgaaccttattgagatcactgacttgaaaaatgccatggtaggcatcccaggagcaactggcctgtcagccgagcagcggaaaagactaacaatagctgtggagctagtggccagtccctccattatattcatggatgagccaaccaccggcttggatgctcgtgctgcagctattgtcatgagaacagtacgaaagacggttgacactggacgaactgttgtctgcacaattcatcaaccaagcattgagatttttgaatcttttgatgaggtatgaacaagtttagatggtatagccatataagtggacaaaacatagacacaacaagcaattgagaaacatgatagtccaatgctggagtggtgtcaaggtaattacacaattaaaacaaacatgattctcgacaaacttaaacagcagtcaaattggacaaatgtacagaagtatgaatgaagttgtaaaatgcagttgtaagttaaagtagaagacaatcaaagaactacatgataaactggtctttcttttatacaagtacgtataggcactatggaattaccatcctaagttttaaattaaatttgttccatttcagcttctgcttatgaaaagaggtggccagctcatatacagtggttcggtaggtccactctctagcaacatgataaaatattttgaggtaagattgcctaagatagacgtttatatttgaaagatgcagagagaagaaaatactgaaaattactttgtaacaggccataccaggcgttcctaaaataaacaagggacaaaacccagcaacatggatgttagacatcagttcacacataacagaatatgaaattggagtggactatgcagaaatttattgcaattcctccctgtacagcaaggatgagcaagacgtattaaacatacttggaatcgtatatggatcggcattgttcctgggtttcatgaattgcagcatcctacagccggttgtggcaatggagagagttgtgctctaccgtgaaaaggcggcaggcatgtactccaccatggcatacgctatcgctcaggtgtcggtggaattaccttacatgttggtgcaagtgatgatcttctcatcaatcgtgtacccaatgattgggttccaggtgacagcgagcaaattcttctggttcttcctataccaggtgatgagcttcatgtactacactctatacgggatgatgacggtggccctgacccccaacatcgagatcgccatggggctgtcgttcctcatctttatcttttggaacgtcttctctggcttcataatcgtgagagagatgatgcctgtgtggtggcggtgggtgtactgggcggatccggcggcatggacggtttatgggctaatgttctcacagctcgcagacaggacggagcagatcctggtgccggggctcggggagcagacggtgcgtgagttcctagaggggtacctgggcctgcaggatcgctactttgtgctggtgacctgcctccatcttgccatcattggcctcttcgtctttctcttcttcctcgccatcaagcacctaaacttccagcgcagtttttga

SEQ ID NO: 41348 - DNA, 4738 bp, Zea Mays
gaagacgaggactggcacgcggccgcgacggccggaaggacgcagcagccgccgccgccgctcacccacgacgacaaccgcagcttccttcggatgctgcgtgacatgaaagagaagctgggcgtggacgcgcccaaggtggaggtgcgcttcgagaggcttaccgtggaggcggacgtccgcgtcggccgccgcgccgtcccgacgctgctcaacgccgccatcaacgccgcccaggagttagcaacgtctgttcatatgtgtgttacaaggaaaagacctatcagaatcataaatgaagtaagcggggtgattcgaccatcaaggatgacactacttctaggagcacctggttccgggaagacgactctactaaaagcgttagcaggaaaattggattcttctttgaagttcaaaggaaaagtcatgtacaatggagaagaaattaattactcaacaccacagacacagtacctgcgtacttatgttagccagtatgatcttcaccatgctgagatgacagtaagagagacaatcgacttctcttccaagatgcttggaaccaataatgaatttgatatgctaggagaagcaataagaagaaaaaagggtgtcatcaatgaagtggatcaagatcttgattcattcattaagctcttctctcaggccaccacctttggagaaggaagcaacctcacaacaaactatattatcaagatacttggcctgtctgagtgtgctgataccctagtaggagacgagatgagaagaggaatatctggagggcaaaagaagagagccacagttggggagatgctagttggtctggcaagatgcttctttatggatgatatatcaacaggtcttgatagctccacggcatttgagatcatgaagtttctccaacagatggcccatttgatggatctcacaatggtaatttccttgttgcaaccaccgcctgagacattggaattatttgacgacattatacttttatgtgaggggcaaattgtgtatcatggtccccgagaaaatgctacggacttgttcgaaaccatgggattcaaatgccctgacaggaagaatgtagccgatttccttcaagaggtaatcaaccatcaaatgtgcctaactgccaataataaatagctaaactttgagataattaatacatcagatcctcaaaatgtatagtgttcaaggctaactttgagataattaatacatcagatccacaaaattaagcaggcaatagatgacttacaattctatgcatgagcataaaatgtcattgttctgcaatacacgtgcttttgcaaaataatgtaacaagttttctccaattggccactgaccaggtaacctctaagatggaccaaaagcaatactggactggtgaccaaaataagtatcagtaccatacaattgaaaattttgcagaatccttccgcacgtcatatcttcctcttctagtagaagacaaactgtgcagtccaaacaatactggaaagaataaggaggtaaaagtgaatgcaggtcgccgagtatccagatggaatattttcaaagcatgcttttcaagggaactgctgctgctgaaaagaaactctccggtccatatattcaagaccattcagataactgttatggctttggtgatctccacacttttcctgagaacaaaaatgagtcacaattctgtacttgatgccaacaagtacatgggagcactttttatggctgtcgtcatagtaaacttcaatgggatgactgaaattgcaatgacgataaagcggcttcccaccttctacaagcaaagagagctactagcattgccaggatgggcactcctttgttcagtttaccttattagcatcccaatatcgcttgttgagacaggcctttggacaggcttaacctactatgtgattggatatgcaccttctgctatcaggttcatccagcactttctggtactttttgccatgcatcaaatgtcaatgggcttgtatcgcttcttagcggccataggaaggacgcaagtgatggccaacatgctagggactgcagctcttattgcaatctacatacttggaggattcgtcatatcaaaagatgatctccaaccatggttgcgctggggatattggacgtccccgttcacctatgcacagaatgcgatcgccctcaatgagttccatgacaaaagatggaattcagtaagcactaatttcaaaacttggaagtgattgctatatggtagtatatcctatttcaaattaattacaataaggttcttgatcttttgtttctggtaggaattttattataacggtgcaaacaccgtcggtgaagctatcctcaagatcagagggctgctcatggagtggcactggtactggatttgtgtcaccattttgtttggatactcgctggtcttcaacatcttcagcatatttgcattggagttcatcggctgtatgtataccaatctatcacaaacctcctaaatattgcatttaaacgaaaaaataattatctgcttgtttactgcttgcagctccacacaagcatcaagttaacatcaagaccacaaaagtgaatttcgtgtacaataggcagatggctgaaaatggcaattcatcaaatgatcaagttatcctcccatttcgacccctctccctggtctttgatcatattcaatattttgttgacatgcctaaggtaatatcttgttcacttattaagatcttacctggtagcttcattaattcctatcacatactgaagacaagaatacaaatatcccaccaggagatgacaaaaaatggagcaacgaagaaaaagcttcagctgctacaagatgtcagtggtgcttttaggccaggagtactaacagctctgatggggataactggcgctggcaagacaacattgctcgatgtattagctggaaggaaaactgggggatatatcgaagggactattaagatagcaggctatcctaagaagcaggatacattctcaaggatctcaggttactgtgaacagagtgacattcattcccctaatctcactgtttatgagtcactgaaattttctgcatggcttcgtctaccttcaaatgttaaacctcatcaaagagacgtatgtgtattgtgtttcaacctcaccccctctttatccctgctggagcctagaaactagtttctgacacaaaatttctcttaaaacacatttcagatgttcatcaaagaagtcatgaaccttattgagatcactgacttgaaaaatgccatggtaggcatcccaggagcaactggcctgtcagccgagcagcggaaaagactaacaatagctgtggagctagtggccagtccctccattatattcatggatgagccaaccaccggcttggatgctcgtgctgcagctattgtcatgagaacagtacgaaagacggttgacactggacgaactgttgtctgcacaattcatcaaccaagcattgagatttttgaatcttttgatgaggtatgaacaagtttagatggtatagccatataagtggacaaaacatagacacaacaagcaattgagaaacatgatagtccaatgctggagtggtgtcaaggtaattacacaattaaaacaaacatgattctcgacaaacttaaacagcagtcaaattggacaaatgtacagaagtatgaatgaagttgtaaaatgcagttgtaagttaaagtagaagacaatcaaagaactacatgataaactggtctttcttttatacaagtacgtataggcactatggaattaccatcctaagttttaaattaaatttgttccatttcagcttctgcttatgaaaagaggtggccagctcatatacagtggttcggccataccaggcgttcctaaaataaacaagggacaaaacccagcaacatggatgttagacatcagttcacacataacagaatatgaaattggagtggactatgcagaaatttattgcaattcctccctgtacagcaaggatgagcaagacgtattaaacatacttggaatcgtatatggatcggcattgttcctgggtttcatgaattgcagcatcctacagccggttgtggcaatggagagagttgtgctctaccgtgaaaaggcggcaggcatgtactccaccatggcatacgctatcgctcaggtgtcggtggaattaccttacatgttggtgcaagtgatgatcttctcatcaatcgtgtacccaatgattgggttccaggtgacagcgagcaaattcttctggttcttcctataccaggtgatgagcttcatgtactacactctatacgggatgatgacggtggccctgacccccaacatcgagatcgccatggggctgtcgttcctcatctttatcttttggaacgtcttctctggcttcataatcgtgagagagatgatgcctgtgtggtggcggtgggtgtactgggcggatccggcggcatggacggtttatgggctaatgttctcacagctcgcagacaggacggagcagatcctggtgccggggctcggggagcagacggtgcgtgagttcctagaggggtacctgggcctgcaggatcgctactttgtgctggtgacctgcctccatcttgccatcattggcctcttcgtctttctcttcttcctcgccatcaagcacctaaacttccagcgcagtttttga

SEQ ID NO: 41349 - DNA, 4256 bp, Zea Mays
gaagacgaggactggcacgcggccgcgacggccggaaggacgcagcagccgccgccgccgctcacccacgacgacaaccgcagcttccttcggatgctgcgtgacatgaaagagaagctgggcgtggacgcgcccaaggtggaggtgcgcttcgagaggcttaccgtggaggcggacgtccgcgtcggccgccgcgccgtcccgacgctgctcaacgccgccatcaacgccgcccaggagttagcaacgtctgttcatatgtgtgttacaaggaaaagacctatcagaatcataaatgaagtaagcggggtgattcgaccatcaaggtgaatgtgtccccttatctttcattagctaccagagtacagatatagatcccaacatcccgttccatctcaaacctaagcgcttgatcaaatttagaagataagttactcaaatgcacaagtatggatttgatagtctgttattagtcaacagttttgacttaaggcaaacttagatcccttatatttcagacggacagagtaatttatcaagatatattgactttatatgccattctgtcaggatgacactacttctaggagcacctggttccgggaagacgactctactaaaagcgttagcaggaaaattggattcttctttgaaggtatactgagctacctacatgctaccaaaagtatttgtcaacaagaaaaggcaaaaatagataataatgtctagcattaactaacagaaatatatattttctaacggccaacgattgccaacagttcaaaggaaaagtcatgtacaatggagaagaaattaattactcaacaccacagacacagtacctgcgtacttatgttagccagtatgatcttcaccatgctgagatgacagtaagagagacaatcgacttctcttccaagatgcttggaaccaataatgaatttgatatgctaggagaagcaataagaagaaaaaagggtgtcatcaatgaagtggatcaagatcttgattcattcattaagctcttctctcaggccaccacctttggagaaggaagcaacctcacaacaaactatattatcaagatacttggcctgtctgagtgtgctgataccctagtaggagacgagatgagaagaggaatatctggagggcaaaagaagagagccacagttggggagatgctagttggtctggcaagatgcttctttatggatgatatatcaacaggtcttgatagctccacggcatttgagatcatgaagtttctccaacagatggcccatttgatggatctcacaatggtaatttccttgttgcaaccaccgcctgagacattggaattatttgacgacattatacttttatgtgaggggcaaattgtgtatcatggtccccgagaaaatgctacggacttgttcgaaaccatgggattcaaatgccctgacaggaagaatgtagccgatttccttcaagaggtaacctctaagatggaccaaaagcaatactggactggtgaccaaaataagtatcagtaccatacaattgaaaattttgcagaatccttccgcacgtcatatcttcctcttctagtagaagacaaactgtgcagtccaaacaatactggaaagaataaggaggtaaaagtgaatgcaggtcgccgagtatccagatggaatattttcaaagcatgcttttcaagggaactgctgctgctgaaaagaaactctccggtccatatattcaagaccattcagataactgttatggctttggtgatctccacacttttcctgagaacaaaaatgagtcacaattctgtacttgatgccaacaagtacatgggagcactttttatggctgtcgtcatagtaaacttcaatgggatgactgaaattgcaatgacgataaagcggcttcccaccttctacaagcaaagagagctactagcattgccaggatgggcactcctttgttcagtttaccttattagcatcccaatatcgcttgttgagacaggcctttggacaggcttaacctactatgtgattggatatgcaccttctgctatcaggttcatccagcactttctggtactttttgccatgcatcaaatgtcaatgggcttgtatcgcttcttagcggccataggaaggacgcaagtgatggccaacatgctagggactgcagctcttattgcaatctacatacttggaggattcgtcatatcaaaagatgatctccaaccatggttgcgctggggatattggacgtccccgttcacctatgcacagaatgcgatcgccctcaatgagttccatgacaaaagatggaattcagaattttattataacggtgcaaacaccgtcggtgaagctatcctcaagatcagagggctgctcatggagtggcactggtactggatttgtgtcaccattttgtttggatactcgctggtcttcaacatcttcagcatatttgcattggagttcatcggctctccacacaagcatcaagttaacatcaagaccacaaaagtgaatttcgtgtacaataggcagatggctgaaaatggcaattcatcaaatgatcaagttatcctcccatttcgacccctctccctggtctttgatcatattcaatattttgttgacatgcctaaggtaatatcttgttcacttattaagatcttacctggtagcttcattaattcctatcacatactgaagacaagaatacaaatatcccaccaggagatgacaaaaaatggagcaacgaagaaaaagcttcagctgctacaagatgtcagtggtgcttttaggccaggagtactaacagctctgatggggataactggcgctggcaagacaacattgctcgatgtattagctggaaggaaaactgggggatatatcgaagggactattaagatagcaggctatcctaagaagcaggatacattctcaaggatctcaggttactgtgaacagagtgacattcattcccctaatctcactgtttatgagtcactgaaattttctgcatggcttcgtctaccttcaaatgttaaacctcatcaaagagacatgttcatcaaagaagtcatgaaccttattgagatcactgacttgaaaaatgccatggtaggcatcccaggagcaactggcctgtcagccgagcagcggaaaagactaacaatagctgtggagctagtggccagtccctccattatattcatggatgagccaaccaccggcttggatgctcgtgctgcagctattgtcatgagaacagtacgaaagacggttgacactggacgaactgttgtctgcacaattcatcaaccaagcattgagatttttgaatcttttgatgagcttctgcttatgaaaagaggtggccagctcatatacagtggttcggccataccaggcgttcctaaaataaacaagggacaaaacccagcaacatggatgttagacatcagttcacacataacagaatatgaaattggagtggactatgcagaaatttattgcaattcctccctgtacagcaaggatgagcaagacgtattaaacatacttggaatcgtatatggatcggcattgttcctgggtttcatgaattgcagcatcctacagccggttgtggcaatggagagagttgtgctctaccgtgaaaaggcggcaggcatgtactccaccatggcatacgctatcgctcaggtgtcggtggaattaccttacatgttggtgcaagtgatgatcttctcatcaatcgtgtacccaatgattgggttccaggtgacagcgagcaaattcttctggttcttcctataccaggtgatgagcttcatgtactacactctatacgggatgatgacggtggccctgacccccaacatcgagatcgccatggggctgtcgttcctcatctttatcttttggaacgtcttctctggcttcataatcgtgagagagatgatgcctgtgtggtggcggtgggtgtactgggcggatccggcggcatggacggtttatgggctaatgttctcacagctcgcagacaggacggagcagatcctggtgccggggctcggggagcagacggtgcgtgagttcctagaggggtacctgggcctgcaggatcgctactttgtgctggtgacctgcctccatcttgccatcattggcctcttcgtctttctcttcttcctcgccatcaagcacctaaacttccagcgcagtttttga

SEQ ID NO: 41350 - DNA, 1311 bp, Zea Mays
cgcgcgtggccggccccggccgtggttggtggcctcgacctgcaagccttgctcgggacgccggggtcggtctcgtctcgtctcctcgctctcgttgccggccttcgcctccaagcaagctccgagcaggactgccggagccggaaccccagccgtccgtccgtccgcccgttccctccccgaacccgatccagcttggagaagatgggagctctcaactgggccaaagtagttcatgagcaccaagggtggcgcctcattagctgtatctggctccatgctggcctagttcacttggttgtcaacatgctaagcttgctcttcattggaatccgccttgagcaacaatttgggtttgtgcgcattggtgtcatctacttgatatctggctttgggggcagtgtgttgtctgcacttttcttacacagtaactacgtctctgttggtgcctctggggctttgtttggcctccttggatctatgctttcagagcttattataaattggactatctattccaacaaggcagcggcaatcataactctactttttataattgtaattaatctggccattgggatattacctcatgctgataattttgcccacattggtggatttgcttctgggtttcttattggatttgtgctgctggcaagacctcaatttggttggatggaacgcagcgagctacctcagactagtcaacctccaaagtacaaatcgtaccagtatgtcttgtgggttgctgcactcctcttgctggtagttgggtttgccattatcttggtcatgctcttcacgggtaagaatgggaacgacagctgccactggtgccattacctgaactgcgtaccaacgtccagatggaagtgcgatacctgaattccgcaaagtatatgctccactggtgttcgtgtgttcgtggaaatgtacgaccaaatgtatcctccacttgaccatcctgcgcttcttttgcccggattctccctggttccatgaaatacaaatgttccagaattgtagcacgagcttgtaactgttgatttcggcataattgatgtattcatctcaccaaactctatagcaccaccttgataattttagacggccaatctaaagtattcagattttgcgagtgtccacgcactgacgatttcagccgaaagatcggtaaagttcaattgcatatgatggcactatgctgacggtttgtttgaagctctgaattgaggtgcatttggcctaatcctcttggtttcgaagataacataaacaaacttccaaattagacatgctcttctccggtgc

SEQ ID NO: 41351 - DNA, 4829 bp, Zea Mays
agaagggaagggaatgggactgcaagtgcagcccccgttcatgctacggccagcctgcagctacagcctacatttcccttgcctcagctgtctcgtactgacctcactgctacgcgacgcacataaagcaagcaagcaacaaaattttagttcagctgatttcagctgcaagtgtttttccgttagattttgtttggtgcctgtgagcgtctgctccgagcaacaaaatctgggagattctagaggaagaaggagatcagatagggaggggaattgaagtagttgttcgatatatttctcagcctgaaatcgttacggtgcctgcctgttcatagtatttaagtatcaactattacaaggttggacggcctattatgccacctagtcctctcctagaaacttggcattgggattcctgatgcgacgacccaactccaacccagccatgtccgacgacgacgcctgcttctcgacgcacggtacctagcgatgctgacaatccccctccataagaaggcgtttgtccccaagcggctgccgaaggaaaacgctggcgcagagcagcctcgtcctcccaagtatcaagggcagcatcataaccagaccagcgcactcgaacttattggtcgacgttgtggccgccccaagaaaaggatcgtcggtcgagcacatgtataaggtaaagaagtgctgaccagaatagaagatttgacactgggcttcagctgggacacatggaatacgggatggattgacggagatgatggtaactgcagcctgtatgccacactgccgacacgttggagtaccttgtaaggaccaaaatatatgtaggagagcttatggttggcgcgagtagccactgaattctggatataaggctgaagcttaagatacaccatgtcgccgacagcaaagacacgttccgataggcgtttgtccgcttgaggcttcatacgttgctgtgcacatagcagatgatgacggacatcatgggtcataagctccctctgctataaccatgattgcaagtctgacaagggaattgcatctactgtagatatacccaggtggtgtggatgatagccatacaacacctcaaacggagatttacccaaggaggaattgaatgaggagttgtaccaatactctgcaagaggcagccacttgctccattggctcggttgagaactgacaaaacaacgcaagaaggtttcaaggcattgatttactcgctctgtctggccatctggccatctgtttgcgaatggtaagatgtgctcatgcgtaactcagttcctgaaagcttgaacaagccttgccaaaaggcacttgtgaatatccgatcgcgatccgagataatagccgagtgcataccatgtaagcggtagatactgtccaagaacacctgagctatcttgtaggcagtaaaaggatgagcgaggacaatgaaatgggcaaatttcgaaaatttatccaccacgatgacaatgcagtcaaacttgccagatttggggaggccttcgatgaaatccaaagacaacacctgccaagcatgtgaaggaacttgcaacagctgtaacaacctagggtactgagatctatccgatttggcacgcgagcagatgtcacaggagtagacgtattgtcggacaacatacttcattgctggctaggcaaacagatgtttcaggcgactgtacgttactggaaaaccagagtggccaaccgaactgtcgtgcaatgagaagattatctgttgttgtagtgtgggattgtggacaatccaaatgcggcctttgtaccgaataatgccttcctacaacttgtaaggaccatctgttgtagaggaattagacagatctgccaacagtttaaggcgtgagaatcttgatgatatcctaccaccacattcgatagccattgaagagtgcccactgatattgcattgagtgaaagaggcgaatgaggacaccgagagagggcatccacagccctgttggccgatccctgcttgtataccacctggtattggagtcccaacaatttagtgaagacacactactgccaaggagtcttcagacgctgttcattgagatgagttaagcttcactgattcgtgaagatgaggaatgttccatgctgcaagtatgatctccagtgattcactgcaagcaagatggcgaggttctccttttcataagcagaaagacccatattcttgacacccaaaggcttgcttacgtaagcgagaggatggttgttttgtagcaggactgcccccacacctgctctagaagcatttgtttcaatggcaaattgtttggtaaaatctaggaggcccaacacgggtgctgaagacaaaggctgatttcaacaaggcaaaagcagtagcatgatccgatgttcataaaaaaacacaacatgcttcttcaggagagcagtaaggggcttggcaatgacaccgaagttttgaacgaatttgcggtaataacctgtcaacccaagaaaacctcgcaactccttagagttagttggtgtaggccaggatacaactgcctccactttggccggaccagtggccacgccaactttactaataatatggtccaagtaagctatttcttgttttgcaaatgtgcacttagtaagcttgacttgccagtggtcttgaagcaataactgcaacacatgttccaaatgttttagatgatgtttccaagtgtcagtgtatatcaggatgtcatcaaagaataccagggcgcgctgccgcaataatggcttcagggtgcagttcattgctccttgaaatgtagccagtgcccccgtgagaccaaatgccataaaacgaaactcaaaatgcccatggtacgtttggaacgttgttttgtacagatcaggaggtgccattctgatctgatgaaacctagcgcggagatccaaagtggagaaccatgctgccccatggagttcatcaagaaactcatcaattatgggtacatgaaacttggccttagccatgatggcatttagatggcgataatccacacaaaaccgatgagtcccatccttcttttttaccaaaattaccgatgatgcgaagggacttttgctatgctggattatgtcagaatccaacatctcattcacctatttctcaatctcagatttgaaagaaggagcatatctatacggacacatttgcataggattagctccgggtagcagagggatctggtgatcacagtccctgacaggaggaagactagtaggtaactaaaacactgatgagtacttgtccaataacagttgaagatctgtgggaagctctttgactagttcttgttcagatgcgggcaaggtatccaggctacatagctacaccagagcaccgtgtgtttgtgatgcctgcacgccaaaaagcttaactgaaatgccactagttgatagagatagccacttatctgcccaatgcacgaccataggactatgtgtagacaaccaatccatccccacaatcatatcataggttgggagatccaatatcttgaggtcagaggtgaaatggtatccttgaatagactaatcagctgtgagcacctctgaaacacaagacacactagcaccattcgctacttggatccataaaggagtcgagagtggaacaatatttggacagtgccttgttatggtggagctgacaaaggaaactgaaccacccgattctaataaaaatgagcaatgaaaatcttgctagctagctgacaaatctcatggttttcaggtttgctccagtggttacaaccgactgacatagatggagcaccctgagctcggctttgatccccaacactgattgattatctttagatggaggttgaaactgatgccataattcttctaccaagtgaagcggaacagtatccggacattgatggcctcggaaatatgacaatccacatttgtagcagaggccctaggccttacaaaaagcatagacggagtagagacaatccgccataactggtgcatcaagatgttctagggctttagagtccactagcttgccaggagcagacttgggcggtggaggtagcggaaaaggaccacgagatggagtcttgctggctgtactggaatcaaatttcttgtactcccgaattcttgatgcctccacaatctcctcctgtagttgagcaagaacaaacacagtatccaagtatttcaagagttgaatcataaccatagatttgacatcatgacgaagaccatctaggaagcgcatagtatagtaaagaggataaaaatgggttggtagctattcaattggtctactaattaagcaaactaatcaacatattctgctacagaccccttttgtgtaatatgaaacagttgatgcgctagatgggcatgttgatccttgccaaaacgctcacacagtaggtgacaaaacacataccatgacatgtacactaatttttgtttaacagattgcaaccaacaggcagctgcacctaaaaaactcattgtagcaactttgatccacaccctatgactcattccatacatggcaaaataatcttcataatgtttctgccaaagttttgggttctcgccatcgaaactaggaaagttaaggagtggtaattttcccaactccaactctaaccttgcccttggtggcctaggatcatgatactcatgtggatccagatgagaaagtggagggtgaaacatgaaatcgggcgtaccattgatcgggagatggttttgggcaaggagatgcccaaaaccatgcccccagcgatttttgtcgaagcaattcc

SEQ ID NO: 41352 - DNA, 400 bp, Zea Mays
cgtgcaccaacgcgtctcctgagcaaagaggtggtcacagatgtcgcgaagaagcttggattgttcctcgatcgccatcttcaggttgggctccatggatccggattccttcgcgcgacgcgtgtagtaggtgtgtgctagcgcttagatcagtgtctccgatatcaatttgtgagcgtccgctccaagcaacataatctaggaatgacgagagtaggagaagggagattctagaggaagaaggagatctgatagggaggggaagtagttgttcgatatatttctctgcctaaaatcgtcacagtgcctgttcacagtatttaagtatcaactattacaaggctcgacggcccattatgccacccagtcctctcctaggaacttggcattgggcttcctg

SEQ ID NO: 41353 - DNA, 1243 bp, Zea Mays
gccaaaaaagccgcgcaaatccacccaccagtccactaccccgcacgctataactgcaaccagcgtagcgtaggctcgcggcggccgccgacaactcgggcgggacacgggagacagccatggcgacgggcggccaggggaaggccgcgggctactaccagtacccgacatcgtacgccggtgctgcggacgaggagcgccggtggtggccgtggctcgtgcccaccgtgctcgtcgcctgcatcgcggtcttcgccgccgagatgttcgtcaacgactgcccgcgccacgggagcacgctcggcggcggcgccgggtgcgtggcggccggtctcctccgccggttctccttccagccgctccgcgagaacccgctcttcgggccttcctccgccaccttggagaagatgggagctctcaactgggccaaagtagttcatgagcaccaagggtggcgcctcattagctgtatctggctccatgctggcctagttcacttggttgtcaacatgctaagcttgctcttcattggaatccgccttgagcaacaatttgggtttgtgcgcattggtgtcatctacttgatatctggctttgggggcagtgtgttgtctgcacttttcttacacagtaactacgtctctgttggtgcctctggggctttgtttggcctccttggatctatgctttcagagcttattataaattggactatctattccaacaaggcagcggcaatcataactctactttttataattgtaattaatctggccattgggatattacctcatgctgataattttgcccacattggtggatttgcttctgggtttcttattggatttgtgctgctggcaagacctcaatttggttggatggaacgcagcgagctacctcagactagtcaacctccaaagtacaaatcgtaccagtatgtcttgtgggttgctgcactcctcttgctggtagttgggtttgccattatcttggtcatgctcttcaaaggtaagaatgggaacgacagctgccactggtgccattacctgaactgcgtaccaacgtccagatggaagtgcgatacctgaattccgcgaactatatgctccactagtgttcgtgtgtttgtggaaatgtacgaccaaatgttccacttgaccatcctgcgcttcttttgcccggattctccctggttccatgaaatacaaatgttccagaattgtagcacgagcttataactgtt

SEQ ID NO: 41354 - DNA, 1211 bp, Zea Mays
gttataaatgaacagtttaagtaacccgtttatgttgctgcttgtggatttgtattcctactgttacctcatgactcctgcaaaatcatgcaagcttggagaagatgggagctctcaactgggccaaagtagttcatgagcaccaagggtggcgcctcattagctgtatctggctccatgctggcctagttcacttggttgtcaacatgctaagcttgctcttcattggaatccgccttgagcaacaatttgggtttgtgcgcattggtgtcatctacttgatatctggctttgggggcagtgtgttgtctgcacttttcttacacagtaactacgtctctgttggtgcctctggggctttgtttggcctccttggatctatgctttcagagcttattataaattggactatctattccaacaaggcagcggcaatcataactctactttttataattgtaattaatctggccattgggatattacctcatgctgataattttgcccacattggtggatttgcttctgggtttcttattggatttgtgctgctggcaagacctcaatttggttggatggaacgcagcgagctacctcagactagtcaacctccaaagtacaaatcgtaccagtatgtcttgtgggttgctgcactcctcttgctggtagttgggtttgccattatcttggtcatgctcttcacgggtaagaatgggaacgacagctgccactggtgccattacctgaactgcgtaccaacgtccagatggaagtgcgatacctgaattccgcaaagtatatgctccactggtgttcgtgtgttcgtggaaatgtacgaccaaatgtatcctccacttgaccatcctgcgcttcttttgcccggattctccctggttccatgaaatacaaatgttccagaattgtagcacgagcttgtaactgttgatttcggcataattgatgtattcatctcaccaaactctatagcaccaccttgataattttagacggccaatctaaagtattcagattttgcgagtgtccacgcactgacgatttcagccgaaagatcggtaaagttcaattgcatatgatggcactatgctgacggtttgtttgaagctctgaattgaggtgcatttggcctaatcctcttggtttcgaagataacataaacaaacttccaaattagacatgctcttctccggtgc

SEQ ID NO: 41355 - DNA, 982 bp, Zea Mays
tttctttttattccatcatggatttggaatgcgcattggtgtcatctacttgatatctggctttgggggcagtgtgttgtctgcacttttcttacacagtaactacgtctctgttggtgcctctggggctttgtttggcctccttggatctatgctttcagagcttattataaattggactatctattccaacaaggcagcggcaatcataactctactttttataattgtaattaatctggccattgggatattacctcatgctgataattttgcccacattggtggatttgcttctgggtttcttattggatttgtgctgctggcaagacctcaatttggttggatggaacgcagcgagctacctcagactagtcaacctccaaagtacaaatcgtaccagtatgtcttgtgggttgctgcactcctcttgctggtagttgggtttgccattatcttggtcatgctcttcacgggtaagaatgggaacgacagctgccactggtgccattacctgaactgcgtaccaacgtccagatggaagtgcgatacctgaattccgcaaagtatatgctccactggtgttcgtgtgttcgtggaaatgtacgaccaaatgtatcctccacttgaccatcctgcgcttcttttgcccggattctccctggttccatgaaatacaaatgttccagaattgtagcacgagcttgtaactgttgatttcggcataattgatgtattcatctcaccaaactctatagcaccaccttgataattttagacggccaatctaaagtattcagattttgcgagtgtccacgcactgacgatttcagccgaaagatcggtaaagttcaattgcatatgatggcactatgctgacggtttgtttgaagctctgaattgaggtgcatttggcctaatcctcttggtttcgaagataacataaacaaacttccaaattagacatgctcttctccggtgc

SEQ ID NO: 41356 - DNA, 3079 bp, Zea Mays
ctccgcacaggactccaaccgcctcgccgttgcatcgccgcgggcgtcaacctaggctgctgccggtaccggtgcgtccccagccatggctcggccgccgcaggaggcgatcgacaccttcgtcagcatcaccggcgccgacgaggtcaccgcagtccgcgtgctcgaggaacatggtcatgatctaaatgaagctgtgaatgcttattttaatgaaggagataggaccaccaccagaatcaatcagaatcctgtgcctgccactgccagttatgatgacatgatggagctggatgaaccacttgatcccatgttcaacagacctttgttccctagaactttgggcaacccttttgcccttttggatccaggttttgctgacataactgctggtgatatatttggacgtggaccccgagttacacaacctagggacgtgaggcagatacctattgaagttaaggacagcaatactcaaacaggcagttctggtcagggtcccattattgaggatgttactggacgtgaatctttctatggtccagaggtccatgggaccgttatagttgacgaagatgatgaagacttgccattaacactatctgctcaggatcctaagatcccaagcagtgctttgcacccaaaccatttcatgcctagtgcgcctccagtggttgatgttagtgaccataacaatgatatagaagaggagatgattaaggcagcaattgaagcttcaaaaagggaagctgacgggatgaaaaatgttctaagtagtggtcaatctgaaaacatgtcacgtggcagaggtgatcatgagcttgctcgggcggtttctttgtccttggagacagcagagcgagagagagctctgcgccaagagggaatgtatgtagcagatcactctcctgacttatctgataaagaaggcggtcaaggaggaagtgggataagcgaaaggtgaagtcacatttccaaatgggtagaacagtggtagtgtgtggattattacttatttataatcaattaatggctcaatttctgttcccctatcatttgtttttttgtatggtttcatttgcatggaagccatgcatcgtgtgggatatgatattgtttccctgtttgtgtgggtcacttctcatgcaatgttttagcgagcttttcctaacctttgcgaggactaactacaggagaagtgggaacttctgagcaaacagtagatgaagagaacttccaagaggacaatgaagatggtgaagaacaacctttagttaggactcgttctaggcgacttcgaggcagaactattgagccagcagaaactgttcaaagggctgacagcccgccctcaagtccccaacctcatgttcaaattggtcatcagcgtaatgtggggtttccttcagtagagtggggtggtatttcttctgaagagcgtgatgaagctcttatgcttgaggctgcaatgtttggtgggattcctgaaggagcaccatatccattttccttcccagcccatggcaggtcgactcactatcccctagtagcacgtcctccatcaccatcattaacggcacagcggttgttaagggagcagcaggatgatgagtatcttgctgctctccaagctgatcgagaaaaagagttgaaggctgtgcaggaggctgaacttcgcagggtagaggaagctgcagcaagagaggctgctcttgaacgtcaaaagaaagaagaggaggagaagctaaagaaacaacgtgaggaagaggagttggaatccaagcttgcagccaaacaagcatcactacctaaggagccactacaaaatgacgagggggctgtcacagtggtagtccgcatgcctgatggtagtcgtcgaggacggcgctttctcaaatctgacaggcttcagtatctttttgatttcatagacatcagccggactttcaaaccaggaacttatagactggcgaggtcttatcccaggcgtgccttcactgaattggagagccagatgtcactgagcgatctcggtctcactagcaagcaggaagctctgttcctagaaaaactgtctgcgtagagtacaaggttctggagttatggtcgagtagtatatgcacttataaaatcggtcatttagatcgtgcctggcgtgtgttcatgaaaatactgcagcggttgaatgattactgatctctagagatcccgtcgccatcttctgtgctctgaaacggaggtgtttcgatctgactgtgcagatgggcagttctacattcagatttcagaacaactgtagctcttgcggttttaagacttgagtatggtttactttggagatagtggtttagaccatccgtgttggtctcctgagcggtattcttacgtgatcacgtgtcaaaacgaacagaatcctttgttgcagtcattatagttaaccgtctcgctggaactcgcaacatgtatagcatggtcatgcatggtttggttttacttattttattattattatgctgatgatatagaccgcaagacagagtctgaatatcaaaagaagaagacgacgacgacgacaacgttggagctcgactgctctcactgtgaaatggaaacacttcttattcctctcccctcctgccatccattgcagcacgcgtgccaggtccctgcttcaagcggctcagttggcttgggcgaggtggcaccggccgggcaggctgttgatgatgcccatggtgctgcaggcgcactcgtgcgacacggcgctcagcgcgctgcagcagtccgcgctggggtccggcgcgccgggcaccaggtacgcgcggcacgccaggaggcggttcagctgcggcaggcactgcccgccggcctgcgccccggcgccgcgcagcaccgacgacgggccggtgccgccgccgaggaccagcaggacgaggcacgcggcgaggagtgcgcggggggcggtggctgcttctagcgccattgttgcctcgtcttgtgggggctggggctgcggctgctttctgctctgctggcttgctgtgtgggtgtggccaggatgcctggtgcacgctatttg

SEQ ID NO: 41357 - DNA, 1135 bp, Zea Mays
gtttttttgctgacaaccaataaaatttctgtgctaaattttagatttcctctactatgctgttaagctaattgtccatgttttcttactgctcgaatgaatagaaatctggaattatgctattattaaaactgggtttcaacactttaccattaatcgaacgggtttcgcttgaataccattacgaaacttgacataaatgttgtaatgccgtttcattattttataaagctaaaaaggaaataagagagatggagagacaattttgctctcttccccgcagcgcacggtggtctgggtgtggccgtgtgggtgtggtgtctgtagtctgtactcgtactcgtagatagaggcttttcaagtgccacctacgcaagtgcaattcaagaatgaatcgatggagagaaatttggcaaaatgggtcgctctagcttgccgctctgtaaaacacaccgcttctagctgtactcgtaaaaacgggtcgctcaagtctgatcgctcgtcagaaggggtcacggatacttttggggcacctggcaagtgggcccgcgaaggcttgtcccgattatgcccttacggtataatcgcatgccgtctgtttcccttcctcttctctggacgccgaggactccttctctgtcttcgcacgcagcttcctcctcctctgtccaagcggcggtcgtcggagacgaacctgggaacggcgacggcggatgtgcgacggacgcgagcgggtggatccagtggtcgtccaatcctgtgatatccggtgacgacgacgtctaccactccctccacttttcagcttggagaagatgggagctctcaactgggccaaagtagttcatgagcaccaagggtggcgcctcattagctgtatctggctccatgctggcctagttcacttggttgtcaacatgctaagcttgctcttcattggaatccgccttgagcaacaatttgggtttgtgtgttgtctgcacttttcttacacagtaactacatctctgttggtgcctctggggctttgtttggcctccttggatctatgctttcagagcttattatgaactggactatctattccaacaagacctcaatttggttggatggaacgcagcgagctacctcagac

SEQ ID NO: 41358 - DNA, 1667 bp, Zea Mays
gtttttttgctgacaaccaataaaatttctgtgctaaattttagatttcctctactatgctgttaagctaattgtccatgttttcttactgctcgaatgaatagaaatctggaattatgctattattaaaactgggtttcaacactttaccattaatcgaacgggtttcgcttgaataccattacgaaacttgacataaatgttgtaatgccgtttcattattttataaagctaaaaaggaaataagagagatggagagacaattttgctctcttccccgcagcgcacggtggtctgggtgtggccgtgtgggtgtggtgtctgtagtctgtactcgtactcgtagatagaggcttttcaagtgccacctacgcaagtgcaattcaagaatgaatcgatggagagaaatttggcaaaatgggtcgctctagcttgccgctctgtaaaacacaccgcttctagctgtactcgtaaaaacgggtcgctcaagtctgatcgctcgtcagaaggggtcacggatacttttggggcacctggcaagtgggcccgcgaaggcttgtcccgattatgcccttacggtataatcgcatgccgtctgtttcccttcctcttctctggacgccgaggactccttctctgtcttcgcacgcagcttcctcctcctctgtccaagcggcggtcgtcggagacgaacctgggaacggcgacggcggatgtgcgacggacgcgagcgggtggatccagtggtcgtccaatcctgtgatatccggtgacgacgacgtctaccactccctccacttttcagcttggagaagatgggagctctcaactgggccaaagtagttcatgagcaccaagggtggcgcctcattagctgtatctggctccatgctggcctagttcacttggttgtcaacatgctaagcttgctcttcattggaatccgccttgagcaacaatttgggtttgttttctgacttgcaagtgcgcactggtgtcatctacttgatatctggctttgggggcagtgtgttgtctgcacttttcttacacagtaactacatctctgttggtgcctctggggctttgtttggcctccttggatctatgctttcagagcttattatgaactggactatctattccaacaaggcagcggcaatcataactctactttttataattgtaattaatctggccattgggatattacctcatgctgataattttgctcaccttggtggatttgcttctggatttcttattggatctgtgctgctggcaagacctcaatttggttggatggaacgcagcgagctacctcagactaatcaacctccaaagtacaaatcgtaccagtatgtcttgtgggttgctgcactcctcttgctggtagttgggtttgccattatcttggtcatgctcttcaaaggtaagaatgggaacgacagctgccactggtgccattacctgaactgcgtaccaacgtccagatggaagtgcgatacctgaattccgcgaactatatgctccactagtgttcgtgtgtttgtggaaatgtacgaccaaatgttccacttgaccatcctgcgcttcttttgcccggattctccctggttccatgaaatacaaatgttccagaattgtagcacgagcttataactgtt

SEQ ID NO: 41359 - DNA, 3078 bp, Zea Mays
gcctatctgatccagcgaccagcgtggcagcacgccagcgttcgcgaggcggcgagggcacctgtgtcatttccggcgtctgtcgttctcgcgcggcccaccggtgatggcccacggcccgcgagaggggaggaggagagcaataagcaagcaccacatcgccaccacttgaattaccgcacacggctccgctgcttcgcgactcctctccggctctccgcacaggactccaaccgcctcgccgttgcatcgccgcgggcgtcaacctaggctgctgccggtaccggtgcgtccccagccatggctcggccgccgcaggaggcgatcgacaccttcgtcagcatcaccggcgccgacgaggtcaccgcagtccgcgtgctcgagcaccagaatcaatcagaatcctgtgcctgccactgccagttatgatgacatgatggagctggatgaaccacttgatcccatgttcaacagacctttgttccctagaactttgggcaacccttttgcccttttggatccaggttttgctgacataactgctggtgatatatttggacgtggaccccgagttacacaacctagggacgtgaggcagatacctattgaagttaaggacagcaatactcaaacaggcagttctggtcagggtcccattattgaggatgttactggacgtgaatctttctatggtccagaggtccatgggaccgttatagttgacgaagatgatgaagacttgccattaacactatctgctcaggatcctaagatcccaagcagtgctttgcacccaaaccatttcatgcctagtgcgcctccagtggttgatgttagtgaccataacaatgatatagaagaggagatgattaaggcagcaattgaagcttcaaaaagggaagctgacgggatgaaaaatgttctaagtagtggtcaatctgaaaacatgtcacgtggcagaggtgatcatgagcttgctcgggcggtttctttgtccttggaggcgaggactaactacaggagaagtgggaacttctgagcaaacagtagatgaagagaacttccaagaggacaatgaagatggtgaagaacaacctttagttaggactcgttctaggcgacttcgaggcagaactattgagccagcagaaactgttcaaagggctgacagcccgccctcaagtccccaacctcatgttcaaattggtcatcagcgtaatgtggggtttccttcagtagagtggggtggtatttcttctgaagagcgtgatgaagctcttatgcttgaggctgcaatgtttggtgggattcctgaaggagcaccatatccattttccttcccagcccatggcaggtcgactcactatcccctagtagcacgtcctccatcaccatcattaacggcacagcggttgttaagggagcagcaggtactgagcagtattcatctgctggagagtagtacaactactgtatatgactagcaatatttcaattgcaggatgatgagtatcttgctgctctccaagctgatcgagaaaaagagttgaaggctgtgcaggaggctgaacttcgcagggtagaggaagctgcagcaagagaggctgctcttgaacgtcaaaagaaagaagaggaggagaagctaaagaaacaacgtgaggaagaggagttggaatccaagcttgcagccaaacaagcatcactacctaaggagccactacaaaatgacgagggggctgtcacagtggtagtccgcatgcctgatggtagtcgtcgaggacggcgctttctcaaatctgacaggcttcagtatctttttgatttcatagacatcagccggactttcaaaccaggaacttatagactggcgaggtcttatcccaggcgtgccttcactgaattggagagccagatgtcactgagcgatctcggtctcactagcaagcaggaagctctgttcctagaaaaactgtctgcgtagagtacaaggttctggagttatggtcgagtagtatatgcacttataaaatcggtcatttagatcgtgcctggcgtgtgttcatgaaaatactgcagcggttgaatgattactgatctctagagatcccgtcgccatcttctgtgctctgaaacggaggtgtttcgatctgactgtgcagatgggcagttctacattcagatttcagaacaactgtagctcttgcggttttaagacttgagtatggtttactttggagatagtggtttagaccatccgtgttggtctcctgagcggtattcttacgtgatcacgtgtcaaaacgaacagaatcctttgttgcagtcattatagttaaccgtctcgctggaactcgcaacatgtatagcatggtcatgcatggtttggttttacttattttattattattatgctgatgatatagaccgcaagacagagtctgaatatcaaaagaagaagacgacgacgacgacaacgttggagctcgactgctctcactgtgaaatggaaacacttcttattcctctcccctcctgccatccattgcagcacgcgtgccaggtccctgcttcaagcggctgcatggtgaacacgaaccgcaggaaaacataagattaataagcttagcatagcaccgagatgaagagacgaagccgttgcggcctggctacaagcttacagcagttggcttgggcgaggtggcaccggccgggcaggctgttgatgatgcccatggtgctgcaggcgcactcgtgcgacacggcgctcagcgcgctgcagcagtccgcgctggggtccggcgcgccgggcaccaggtacgcgcggcacgccaggaggcggttcagctgcggcaggcactgcccgccggcctgcgccccggcgccgcgcagcaccgacgacgggccggtgccgccgccgaggaccagcaggacgaggcacgcggcgaggagtgcgcggggggcggtggctgcttctagcgccattgttgcctcgtcttgtgggggctggggctgcggctgctttctgctctgctggcttgctgtgtgggtgtggccaggatgcctggtgcacgctatttg

SEQ ID NO: 41360 - DNA, 2517 bp, Zea Mays
gtgactgcaaggcggccagagagagagagaggccgcacgaaatccaaagcagctaggccagatcggcgaagggagtgagtgacgccactcagagcttgctcgagccaccaaagaggccaagagcttagcttttacctaaagcagctgaggtacctcaccatcaccaccaccgacaccaactgcgccgaggccggaggcggagtagagccagaccagaatggtattggggggaggccctctaggcgccatcattggccgctacccctcctcctccgccgccgccggtgacgatgaacaaggggacccgggacccggaggaggcgtcattcgccatgaccgcaagtgccgggactggcccttcctcgtcctcttcgccgccttctgggttgccatgattgtcaactccagcttcggattcaaccagggcaacccactcaggctgacatacggactggactacaaagggaacatatgtggcagcaggcatgccgatcctgatttgtatcagttagatgttcgctattgggtgaaccccaaccaggtctaccaaagtggcctcaaaaccagtcacatcgagctacctgatgctaaaaccatctgcctgatggaatgcccacttcctgccgaagatggcttgaattttgtttgtgattatccagaaggtgacatacgcctctctgtcgacgactggattgacagggactacgattacttcgagtacctcacaccagacatgaggaatagttctcttcagctgcagggtccatgttaccctgtcatatttccaagtgtaaatgtctactggagctgccagtttattgcacgggcatccaatgcctctttaaagcattggaaggacatgggtggtgtcaccatcgacgaaaacatgctaatagacagaacaattcatgatgcaattaatagcaaatctgccgtcatgaaggagataaatcaccttcatgctgcttccgtcttgatgacagtgataatgatacttgctttcctgacttcaatagctatcgctcggcgcattatgaaagcaacatcagtcctaaaggttgctgcaaaggtcgttggcgaagtgcaggcacttattatttttccagtcgtgccatacttgatcctcgctatcttttacactttctggttttcagcagcacttcatcttttcagcgccggtcaagttatacaaaatgattgcaatacagattgctgttcctacgatctgaaacttggcaaagtaaattgtgacagatgttgtggctacactatccattacaccccacatattggcatcgccattcttttccatctttttggctgttactgggcaacacagtttttcatcgggtgttcttcgactataattgccggatcggttgcttcatactactgggcacgcggtgaaatatcgcacgatatccctttccataccgtggtatcttccctgaagcgcttgttgcgctatagcctgggatctgtggctctgggctcactgatagtgtccatcgtagagtgggtgcgattcatactagaatcactacgccgcaggctgaaatttgttgactctgcccgcggaagccggttcgggaagacggtatcatcctcatcccagtgctgcttaggctgcatcgattggaccctgaaatcggtgaatcgaaatgcctatgtcatgattgccatcacagggaaaggattctgcaaggcttccgtgctagcgactgggctgatcatgaacaacgtgttgcgcgtcgggaaggtgaatgtcattggggatgtgatcctcctgttgggcaaactttgtgttagcctgttgtgtgcgctgtttgccttccttatgctggacgagcacaagtacagatctgggcataacaagatctcatcaccgctggtccccgtgctgctgtcgtgggcgctgggctatatagttgcgaagcttttcttcgcagtggtggaggtgtcgatcgacacaatggtcctgtcattctgccaggactcggaagagcatcaggggaacgcgcggtatgctcccccgctgctgatggagacattggacgaggagagcgagttgcgaaggctgacacaggggccatgatcgatcttccaaataggagacactgaactgaatggctgtgatgttggttgcatgtcttttttatatgaatcatcactggggttgatggatggagctataggtgcaagcatgtctttttatatgtatcagctaaatacgaggaatagaatagaatagggcttagtgctggaattgaaacccaccgtctgtaatgtatgttcggctttatttgatatgtcttttttgtttatatattgttagactatgtgtgtggaccgacaccactgttgggctgccgacccattagggttagggttgtgagtctatatattgcactctatcttatatcaatacatcaaccaatttaggacttgttcggttagctctcaatccatgtggattgagtgagattcatggattgagtgggattggatgtgtttaaa

SEQ ID NO: 41361 - DNA, 1746 bp, Zea Mays
cttggcccttggcctcctttcgtcgagagagagagagctgtgctggctgctgctgccccgggtccgtcgggacgggtagatgaggaggaagagaacagctcgtgactgactgactccctccctcagcgtgagtgggttgcggacgaccacatccatccgttcccaccattcccttctcccacctcgcctcctccccttgcccttgcccttccacagccggaatcagggggtaatgggccagatgggaggacccgacggcgacggcgacggcggcgcgggcccgcaccaccagtaccactaccaggcgcttctcgccgccgtgcagaaccccagccagggcctgcacccctttcccctccccttccacgtgcctctgcacgcaggagcgggagcacccgccgccggaccaggacctggagctgatgctgatgcctccacacacaatgccaatgccgctcaccactctcaacctccaagaggtttcaccgattggagcgcgtccaacagtgccttcgccgccgttgcctcacagcccgcacctgctaccaccaatacacccttccattacaacctctcccagtcttatgccctatggacccattacatgcttaacaagaatgtatcctactctacttaccctacaccacatgaggagcatccccacccattgcgccatacccacatccaggagaatccccacccattgcgccatacccacatcccggataaggattcaggttgtgcatctagccttggatttgactctttcactacaatgtcccttggaccaaatatttgttcccacatgacgcccatggaaggatctatatctgccaaagaacccgagaattcagaggatttgcctgcaatagttaggagcagtgatgaaatggacactagaaacagtggcaaagttcatcgtgacacagttggcactcttcctgagtcgaagcagagccatgaaagttgtgcttccgtgaataataagttcaactctggagagtaccaagtcattttgcgcaaggagttgacaaagagtgatgtcgcaaattccggacgaattgtgcttcccaagaaggatgctgaggctggtcttccaccattggtgcaaggggatcctctgatactgcagatggatgacatggtgcttccaattatatggaaatttaagtatagattttggccaaacaacaaaagcagaatgtatatcttggaagctgcaggtgaattcgtgaagacacatggccttcagattatccgtggggagaagtccattcagcagacaaacccctagacacaatttgatgtgactgtgcaccatcagatatggcgtccgaggatacaccatatgttcacgttccagttgttatcgacttttctaatgtctcaccgtcacactgagataagtcgaaaaaggagatacaccgtgtggatggagaaaaggagaagaaattttgggagacattggaagtgctgccagtgagcctacgtctaagctcagaacaaatggtttatgttttttcccctaattcggtcgtatttggatgcttgagtcctgcattgcatgatgaagaacattctcagtctctctttttttgtaaatattttaattcaggatctataaggtaaaggaagtggtttggaagcagatttctgattcagcgttctcttgtctcattcattttaccaacatttttgttaaatttgtgattgtgctatgctcgtagggcgtatgtctattgtccc

SEQ ID NO: 41362 - DNA, 1788 bp, Zea Mays
cttggcccttggcctcctttcgtcgagagagagagagctgtgctggctgctgctgccccgggtccgtcgggacgggtagatgaggaggaagagaacagctcgtgactgactgactccctccctcagcgtgagtgggttgcggacgaccacatccatccgttcccaccattcccttctcccacctcgcctcctccccttgcccttgcccttccacagccggaatcagggggtaatgggccagatgggaggacccgacggcgacggcgacggcggcgcgggcccgcaccaccagtaccactaccaggcgcttctcgccgccgtgcagaaccccagccagggcctgcacccctttcccctccccttccacgtgcctctgcacgcaggagcgggagcacccgccgccggacctggagctgatgctgatgcctccacacacaatgccaatgccgctcaccactctcaacctccaagaggtttcaccgattggagcgcgtccaacagtgccttcgccgccgttgcctcacagcccgcacctgctaccaccaatacacccttccattacaacctctcccagtcttatgccctatggacccattacatgcttaacaagaatgtatcctactctacttaccctacaccacatgaggagcatccccacccattgcgccatacccacatccaggagaatccccacccattgcgccatacccacatcccggataaggattcaggttgtgcatctagccttggatttgactctttcactacaatgtcccttggaccaaatatttgttcccacatgacgcccatggaaggatctatatctgccaaagaacccgagaattcagaggatttgcctgcaatagttaggagcagtgatgaaatggacactagaaacagtggcaaagttcatcgtgacacagttggcactcttcctgagtcgaagcagagccatgaaagttgtgcttccgtgaataataagttcaactctggagagtaccaagtcattttgcgcaaggagttgacaaagagtgatgtcgcaaattccggacgaattgtgcttcccaagaaggatgctgaggctggtcttccaccattggtgcaaggggatcctctgatactgcagatggatgacatggtgcttccaattatatggaaatttaagtatagattttggccaaacaacaaaagcagaatgtatatcttggaagctgcaggtgaattcgtgaagacacatggccttcaggcaggggatgcgctcattatctacaaaaactccgtgcctggcaaatttattatccgtggggagaagtccattcagcagacaaacccctagacacaatttgatgtgactgtgcaccatcagatatggcgtccgaggatacaccatatgttcacgttccagttgttatcgacttttctaatgtctcaccgtcacactgagataagtcgaaaaaggagatacaccgtgtggatggagaaaaggagaagaaattttgggagacattggaagtgctgccagtgagcctacgtctaagctcagaacaaatggtttatgttttttcccctaattcggtcgtatttggatgcttgagtcctgcattgcatgatgaagaacattctcagtctctctttttttgtaaatattttaattcaggatctataaggtaaaggaagtggtttggaagcagatttctgattcagcgttctcttgtctcattcattttaccaacatttttgttaaatttgtgattgtgctatgctcgtagggcgtatgtctattgtccc

SEQ ID NO: 41363 - DNA, 1517 bp, Zea Mays
cttggcccttggcctcctttcgtcgagagagagagagctgtgctggctgctgctgccccgggtccgtcgggacgggtagatgaggaggaagagaacagctcgtgactgactgactccctccctcagcgaccaggacctggagctgatgctgatgcctccacacacaatgccaatgccgctcaccactctcaacctccaagaggtttcaccgattggagcgcgtccaacagtgccttcgccgccgttgcctcacagcccgcacctgctaccaccaatacacccttccattacaacctctcccagtcttatgccctatggacccattacatgcttaacaagaatgtatcctactctacttaccctacaccacatgaggagcatccccacccattgcgccatacccacatccaggagaatccccacccattgcgccatacccacatcccggataaggattcaggttgtgcatctagccttggatttgactctttcactacaatgtcccttggaccaaatatttgttcccacatgacgcccatggaaggatctatatctgccaaagaacccgagaattcagaggatttgcctgcaatagttaggagcagtgatgaaatggacactagaaacagtggcaaagttcatcgtgacacagttggcactcttcctgagtcgaagcagagccatgaaagttgtgcttccgtgaataataagttcaactctggagagtaccaagtcattttgcgcaaggagttgacaaagagtgatgtcgcaaattccggacgaattgtgcttcccaagaaggatgctgaggctggtcttccaccattggtgcaaggggatcctctgatactgcagatggatgacatggtgcttccaattatatggaaatttaagtatagattttggccaaacaacaaaagcagaatgtatatcttggaagctgcaggtgaattcgtgaagacacatggccttcaggcaggggatgcgctcattatctacaaaaactccgtgcctggcaaatttattatccgtggggagaagtccattcagcagacaaacccctagacacaatttgatgtgactgtgcaccatcagatatggcgtccgaggatacaccatatgttcacgttccagttgttatcgacttttctaatgtctcaccgtcacactgagataagtcgaaaaaggagatacaccgtgtggatggagaaaaggagaagaaattttgggagacattggaagtgctgccagtgagcctacgtctaagctcagaacaaatggtttatgttttttcccctaattcggtcgtatttggatgcttgagtcctgcattgcatgatgaagaacattctcagtctctctttttttgtaaatattttaattcaggatctataaggtaaaggaagtggtttggaagcagatttctgattcagcgttctcttgtctcattcattttaccaacatttttgttaaatttgtgattgtgctatgctcgtagggcgtatgtctattgtccc

SEQ ID NO: 41364 - DNA, 1452 bp, Zea Mays
cttccttcctcaccggatggtcgggtgtttggatggattagggagggagggcaccacctggagaccaggacctggagctgatgctgatgcctccacacacaatgccaatgccgctcaccactctcaacctccaagaggtttcaccgattggagcgcgtccaacagtgccttcgccgccgttgcctcacagcccgcacctgctaccaccaatacacccttccattacaacctctcccagtcttatgccctatggacccattacatgcttaacaagaatgtatcctactctacttaccctacaccacatgaggagcatccccacccattgcgccatacccacatccaggagaatccccacccattgcgccatacccacatcccggataaggattcaggttgtgcatctagccttggatttgactctttcactacaatgtcccttggaccaaatatttgttcccacatgacgcccatggaaggatctatatctgccaaagaacccgagaattcagaggatttgcctgcaatagttaggagcagtgatgaaatggacactagaaacagtggcaaagttcatcgtgacacagttggcactcttcctgagtcgaagcagagccatgaaagttgtgcttccgtgaataataagttcaactctggagagtaccaagtcattttgcgcaaggagttgacaaagagtgatgtcgcaaattccggacgaattgtgcttcccaagaaggatgctgaggctggtcttccaccattggtgcaaggggatcctctgatactgcagatggatgacatggtgcttccaattatatggaaatttaagtatagattttggccaaacaacaaaagcagaatgtatatcttggaagctgcaggtgaattcgtgaagacacatggccttcaggcaggggatgcgctcattatctacaaaaactccgtgcctggcaaatttattatccgtggggagaagtccattcagcagacaaacccctagacacaatttgatgtgactgtgcaccatcagatatggcgtccgaggatacaccatatgttcacgttccagttgttatcgacttttctaatgtctcaccgtcacactgagataagtcgaaaaaggagatacaccgtgtggatggagaaaaggagaagaaattttgggagacattggaagtgctgccagtgagcctacgtctaagctcagaacaaatggtttatgttttttcccctaattcggtcgtatttggatgcttgagtcctgcattgcatgatgaagaacattctcagtctctctttttttgtaaatattttaattcaggatctataaggtaaaggaagtggtttggaagcagatttctgattcagcgttctcttgtctcattcattttaccaacatttttgttaaatttgtgattgtgctatgctcgtagggcgtatgtctattgtccc

SEQ ID NO: 41365 - DNA, 4866 bp, Zea Mays
aggacctgagcacggcacgacacaacagcgcacgggagagacggacccagaccgcagtggcacaggcgcacagcagaaaggcgagggagaggagagccgcccgcatccgcgcaccgcaccgcaccgcgccgcgccgttcagagagggagaggaggggacgcgaggaggaagaagaagcaggcaaacagcagcagaaggcagaagccccgtcccatccccggcagccccctccatccaagtgatttcaagtagccaccgagaagcggagaagatcagcaagcccgaggactggaaacgtaagccaacgccaaaaaagttcttcgtctgcttctacggcaccggggagattgcctttgtacctctggcagatcttgaggaatttactgagaagaaaaagaacgatctgttagatcgagctcttaaagttcaaagaaaatatgttcaacaatttaatgttgctgtggagcagatctgcaaggcttataatgaattgccaaaaacatctgaagccgcaaatgtagcattgcctgatcagagtgaaaagactacagagcacctggtgaggtcacctgatattggtgggactccaggactgggacaaatggaagatgatccccctactgattgctcaagtacttcagggcaagggtcagggaccgaggaggatgtcaaagatggtggtcatgaaataggtgataattctttggcagttcctcaaaagaaagcatctttacaacaggatcctaagcatcccaagacaaagaagtctgctgcatcaaagtctggttttgacatgtacacagaacaggagcattcaccaacatctctgcgggcagaaaggcagattgaagaggtgaaaattgaagaagagagctgtcatctagaaggttttgttttggaacctaacttggaggtggtttgcgcccttgaagtgccaaagaattttaaatccaacaagctgttgaggaatgctgaaagtaaggaaaatgagcatgttggtgttggtagtcctactggaaggattgctgttgaggccgcatctgatgttgtattaaacatgagtgctgaagaagagagcagagaatttaagaagtcaaaaatcatgacaaaacaatcactgactactggttcagagaaaagggataataaaattgtccatggaaagcctgacaagcaattgactggaaaatcatctgcagggttttctctcaatcagaaatctctgacaggtagcgggcagcacaagatggacagtagtgctgatacacgtccggcaaagaaggcaagacttatggacagggctggtgaaacagataagacagttgccaagagtgagacgaagttaaacatcaattatgaaaatcataatgctgtgaaacatgagcaatctactgctgtggaaacatgtaaaaacacaattcttaagactggtatcggtgatgatagggcacggaagtcaggtggtgctgtatcacccatatcaaagcttcattctgagatcatggaaccagcatctggttcttctgtaactcagtctactgttgctgattctcttaaaaagggttccagcaggaaggaggatgtctcacgtgttgataggaaattggttaaacctaagagaagagcgtgtcgttttgatgatgacgaggatgaaggacagcaaacaccacttcatagaacttctgccaaatctctctctacgcatatagtcccaactgagaaaccaggtagtcggggaaattttgcttcgcatgttggcaacgcttctggaaaaaaaccaggccctgccagagaagagaaatcaagaagtgttaggatgtcacctgtgaagcatgagccagttttttcttcaccgagtcaggataaagtgcatgctagacaccagttaatggggagaaatctgatcacagggtcggttgagactcctgtcattggtaacaaaatgagcctggttgatggcaaatcctctgctcaagtaaaaatgccggcatgctctgaggtgaagaaacttcatagtacttctaaaccattgcaagtaacatctgggaaatcccattcccgaaactatcctgcttcagaaaagatcgccttggtgcccaagtcagaagaaacaaaggctaaatctaaaccagctacatctgttgagcataaggtggccaccactttgtcaactgaacggactgggaagcgggaccacctgaaagaggaaagatcaagttctgttgataaagcagcttattctgaacctaaccctgactcggccaagtcaataaaacatcttattgcagctgcccaagcaaggaggaaccttatggcttctgctcttgcaaaatttgatgggtcttcgactgataatagtgctattacctctacatcatatgcaattgctcgtgatgctttggagggaatgatagagactttatcaaggacaaaggatagtataggccgtgcaacacgccatgcaattgagtgctctaaatatggcattgctggagagattgtcgagcttctcatacagaaattggagaacgagcataatttgcatcgcagaattgacctcctttttcttgtggattccataacacaatgttcccattctcatagaggagttgccggggcttcatatgttcccactgttcaagcggcattgcctcgtcttttcggtgctgctgctccacctggagctggtgctcgtgaaaaccggcgccagtgccttaaagttttaagattgtggcttgagagaaagattatgccagaagacatactccgaaagtacatgggtgacattgaggtgccaaatgatgatactagcactagtttaatgttaaagcgaccatcccgttctgaacgttctgtagatgatcctattagggagatggatgacatgcttgttgatgaatatggaagcaatgcaacttttgagctttctggaattttatcatcaaaagtgtttgaagatgatgaagacttccctcaaaacaatgggtcatcatcatttgtttcacggcctgttgaaggtggtgtcatacatgaaactgaagataatattgctccagcatctgttgaggaacacattattagagtagaacatgtagctactgatgctgctatggaagatgctttagagttacttggcaacaaccaacagactcatggagctgtcattattgaacatgactctagtcaaggtccaggttcagagcaggcattgatcgcccagaatgagcttccccctctacctgatggccctccaccacttccatcagattcaccaccacctccacctcctttgcctccttcaccaccacccgctacaccgccaccaccacctccactctctccagcttcaccacttccgccaccacctcccccactaccatctggaccacctcctcagcctgcaccaccacctctgccaacccaggacccacctcttccttctattccgctgcctgtttcttcatctccgttgtcattgggttatcagcctccagcgccagagtacttcatgacgcccaatggtaatcaattggcccagatgacagtaaacacatcaattcaagctattggaaatacaacaaccttcattcctggtggaccagttaatggacaagctgcagttaattttgttacttcaatgccggcagaatttggaaatactagcgtatttatggcgcaagcttctaatggtaattaccagtttcggccaactggtgtaccttttcagcaagggaatttcagtgcctttccatctgcacaaacacctccagttcatccccattctcgtatggcacacatgaatcccatgggccaacaagctgttgcacctccacacaatccttatgctgcacagtcctttccaaacagtcagagccattatccatctgaagaacattggcggatggcatctggtaacttcagtccagatgaccagcataattggatagcaagtggcagatcattaccttgctcagaagggccatttgtgcatgatggatattcaagatcaaacattgacagatcttcaatgaatcctatgaatcatcaacatactgttctgaatcatttgccatctggagcaccactaccaggccatatttctcagatgctaccagccaggtctgatatgcacactcttaattgctggaggccctcttgatagagttgtaaactgaacttcttgtttgtgattttgacatggaaagctcagggcattggaggcaatttgaattgagttcaacaactggtggctgttagtctgagatggagatgcacttgccagggtttaacgatgagatctgtcatagtatgtggaatggacattttacaatgtaactagtcctgacaacagtatccagcagacaatctctcttagtgtgagctcatcttttcacatgacgcaaatgtcctccagttttttagatgttgcttccagtatggatcaggacagcgaactgttcctatgctatggtagtaaatatcttgtgcagatacattaattataaatagaggtctggtagtaaataccaggaactggtatcatcaaggcattttgtcacggtgcctatgctatggttcgcttttttctcttaactgttgtgctcaatttgcgaaattcatttcaaatttcagttagctaatcacatatattctcaacaaccgtattttatgtttggtgtttagactagaattgtgcttagacaacatgtacatcactgagtttagatttaagagcggaagttagttttgattctgttaggacggcgaaatatgtgctgatatttaagagctctagtttattcttgtttccaaagactgctgatagcgttggttttctaagcgagtcataatgtgttcatatctgca

SEQ ID NO: 41366 - DNA, 5248 bp, Zea Mays
cacaggcgcacagcagaaaggcgagggagaggagagccgcccgcatccgcgcaccgcaccgcaccgcgccgcgccgttcagagagggagaggaggggacgcgaggaggaagaagaagcaggcaaacagcagcagaaggcagaagccccgtcccatccccggcagccccctccatccaagtgatttcaagtagccaccgagaagcggagaaggtgaccgcacctcacgcaatttgcccctgcccgtcgattccatcgcctcccgccgtcccttccctcctctagggttgtcttgtgggtgcccgtgcttcccaccctaggggcaggtccagggccgggccttctcttcgccccgcctccgctgctcttttctttgctgctagggttaggttagggttcgacgctgtggggaggggcatcctcctccctcgccgccgccgccgccgccaatgcctcccggcggtaggcgcggcgccaagcagcgctccaactggaccagggaaccccagctaggcgaccttgtcctcgccaagatcaagggatacccgtcctggccagctaagatcagcaagcccgaggactggaaacgtaagccaacgccaaaaaagttcttcgtctgcttctacggcaccggggagattgcctttgtacctctggcagatcttgaggaatttactgagaagaaaaagaacgatctgttagatcgagctcttaaagttcaaagaaaatatgttcaacaatttaatgttgctgtggagcagatctgcaaggcttataatgaattgccaaaaacatctgaagccgcaaatgtagcattgcctgatcagagtgaaaagactacagagcacctggtgaggtcacctgatattggtgggactccaggactgggacaaatggaagatgatccccctactgattgctcaagtacttcagggcaagggtcagggaccgaggaggatgtcaaagatggtggtcatgaaataggtgataattctttggcagttcctcaaaagaaagcatctttacaacaggatcctaagcatcccaagacaaagaagtctgctgcatcaaagtctggttttgacatgtacacagaacaggagcattcaccaacatctctgcgggcagaaaggcagattgaagaggtgaaaattgaagaagagagctgtcatctagaaggttttgttttggaacctaacttggaggtggtttgcgcccttgaagtgccaaagaattttaaatccaacaagctgttgaggaatgctgaaagtaaggaaaatgagcatgttggtgttggtagtcctactggaaggattgctgttgaggccgcatctgatgttgtattaaacatgagtgctgaagaagagagcagagaatttaagaagtcaaaaatcatgacaaaacaatcactgactactggttcagagaaaagggataataaaattgtccatggaaagcctgacaagcaattgactggaaaatcatctgcagggttttctctcaatcagaaatctctgacaggtagcgggcagcacaagatggacagtagtgctgatacacgtccggcaaagaaggcaagacttatggacagggctggtgaaacagataagacagttgccaagagtgagacgaagttaaacatcaattatgaaaatcataatgctgtgaaacatgagcaatctactgctgtggaaacatgtaaaaacacaattcttaagactggtatcggtgatgatagggcacggaagtcaggtggtgctgtatcacccatatcaaagcttcattctgagatcatggaaccagcatctggttcttctgtaactcagtctactgttgctgattctcttaaaaagggttccagcaggaaggaggatgtctcacgtgttgataggaaattggttaaacctaagagaagagcgtgtcgttttgatgatgacgaggatgaaggacagcaaacaccacttcatagaacttctgccaaatctctctctacgcatatagtcccaactgagaaaccaggtagtcggggaaattttgcttcgcatgttggcaacgcttctggaaaaaaaccaggccctgccagagaagagaaatcaagaagtgttaggatgtcacctgtgaagcatgagccagttttttcttcaccgagtcaggataaagtgcatgctagacaccagttaatggggagaaatctgatcacagggtcggttgagactcctgtcattggtaacaaaatgagcctggttgatggcaaatcctctgctcaagtaaaaatgccggcatgctctgaggtgaagaaacttcatagtacttctaaaccattgcaagtaacatctgggaaatcccattcccgaaactatcctgcttcagaaaagatcgccttggtgcccaagtcagaagaaacaaaggctaaatctaaaccagctacatctgttgagcataaggtggccaccactttgtcaactgaacggactgggaagcgggaccacctgaaagaggaaagatcaagttctgttgataaagcagcttattctgaacctaaccctgactcggccaagtcaataaaacatcttattgcagctgcccaagcaaggaggaaccttatggcttctgctcttgcaaaatttgatgggtcttcgactgataatagtgctattacctctacatcatatggtttgccaagactaagccctagtcctgtttttcgcattccatccccacctagaattgcttttcctgagagtcctggtcaacgtattctgaaaagcccaatggagcttgataatggtcatggaaagagtcccaaatctaggcaggccagcggttcacctagtggtggttctgatgcagcaattgctcgtgatgctttggagggaatgatagagactttatcaaggacaaaggatagtataggccgtgcaacacgccatgcaattgagtgctctaaatatggcattgctggagagattgtcgagcttctcatacagaaattggagaacgagcataatttgcatcgcagaattgacctcctttttcttgtggattccataacacaatgttcccattctcatagagtgggtcacttggctgcctggctttgtaggttttaagattgtggcttgagagaaagattatgccagaagacatactccgaaagtacatgggtgacattgaggtgccaaatgatgatactagcactagtttaatgttaaagcgaccatcccgttctgaacgttctgtagatgatcctattagggagatggatgacatgcttgttgatgaatatggaagcaatgcaacttttgagctttctggaattttatcatcaaaagtgtttgaagatgatgaagacttccctcaaaacaatgggtcatcatcatttgtttcacggcctgttgaaggtggtgtcatacatgaaactgaagataatattgctccagcatctgttgaggaacacattattagagtagaacatgtagctactgatgctgctatggaagatgctttagagttacttggcaacaaccaacagactcatggagctgtcattattgaacatgactctagtcaaggtccaggttcagagcaggcattgatcgcccagaatgagcttccccctctacctgatggccctccaccacttccatcagattcaccaccacctccacctcctttgcctccttcaccaccacccgctacaccgccaccaccacctccactctctccagcttcaccacttccgccaccacctcccccactaccatctggaccacctcctcagcctgcaccaccacctctgccaacccaggacccacctcttccttctattccgctgcctgtttcttcatctccgttgtcattgggttatcagcctccagcgccagagtacttcatgacgcccaatggtaatcaattggcccagatgacagtaaacacatcaattcaagctattggaaatacaacaaccttcattcctggtggaccagttaatggacaagctgcagttaattttgttacttcaatgccggcagaatttggaaatactagcgtatttatggcgcaagcttctaatggtaattaccagtttcggccaactggtgtaccttttcagcaagggaatttcagtgcctttccatctgcacaaacacctccagttcatccccattctcgtatggcacacatgaatcccatgggccaacaagctgttgcacctccacacaatccttatgctgcacagtcctttccaaacagtcagagccattatccatctgaagaacattggcggatggcatctggtaacttcagtccagatgaccagcataattggatagcaagtggcagatcattaccttgctcagaagggccatttgtgcatgatggatattcaagatcaaacattgacagatcttcaatgaatcctatgaatcatcaacatactgttctgaatcatttgccatctggagcaccactaccaggccatatttctcagatgctaccagccaggtctgatatgcacactcttaattgctggaggccctcttgatagagttgtaaactgaacttcttgtttgtgattttgacatggaaagctcagggcattggaggcaatttgaattgagttcaacaactggtggctgttagtctgagatggagatgcacttgccagggtttaacgatgagatctgtcatagtatgtggaatggacattttacaatgtaactagtcctgacaacagtatccagcagacaatctctcttagtgtgagctcatcttttcacatgacgcaaatgtcctccagttttttagatgttgcttccagtatggatcaggacagcgaactgttcctatgctatggtagtaaatatcttgtgcagatacattaattataaatagaggtctggtagtaaataccaggaactggtatcatcaaggcattttgtcacggtgcctatgctatggttcgcttttttctcttaactgttgtgctcaatttgcgaaattcatttcaaatttcagttagctaatcacatatattctcaacaaccgtattttatgtttggtgtttagactagaattgtgcttagacaacatgtacatcactgagtttagatttaagagcggaagttagttttgattctgttaggacggcgaaatatgtgctgatatttaagagctctagtttattcttgtttccaaagactgctgatagcgttggttttctaagcgagtcataatgtgttcatatctgca

SEQ ID NO: 41367 - DNA, 5040 bp, Zea Mays
cacaggcgcacagcagaaaggcgagggagaggagagccgcccgcatccgcgcaccgcaccgcaccgcgccgcgccgttcagagagggagaggaggggacgcgaggaggaagaagaagcaggcaaacagcagcagaaggcagaagccccgtcccatccccggcagccccctccatccaagtgatttcaagtagccaccgagaagcggagaaggtgaccgcacctcacgcaatttgcccctgcccgtcgattccatcgcctcccgccgtcccttccctcctctagggttgtcttgtgggtgcccgtgcttcccaccctaggggcaggtccagggccgggccttctcttcgccccgcctccgctgctcttttctttgctgctagggttaggttagggttcgacgctgtggggaggggcatcctcctccctcgccgccgccgccgccgccaatgcctcccggcggtaggcgcggcgccaagcagcgctccaactggaccagggaaccccagctaggcgaccttgtcctcgccaagatcaagggatacccgtcctggccagctaagatcagcaagcccgaggactggaaacgtaagccaacgccaaaaaagttcttcgtctgcttctacggcaccggggagattgcctttgtacctctggcagatcttgaggaatttactgagaagaaaaagaacgatctgttagatcgagctcttaaagttcaaagaaaatatgttcaacaatttaatgttgctgtggagcagatctgcaaggcttataatgaattgccaaaaacatctgaagccgcaaatgtagcattgcctgatcagagtgaaaagactacagagcacctggtgaggtcacctgatattggtgggactccaggactgggacaaatggaagatgatccccctactgattgctcaagtacttcagggcaagggtcagggaccgaggaggatgtcaaagatggtggtcatgaaataggtgataattctttggcagttcctcaaaagaaagcatctttacaacaggatcctaagcatcccaagacaaagaagtctgctgcatcaaagtctggttttgacatgtacacagaacaggagcattcaccaacatctctgcgggcagaaaggcagattgaagaggtgaaaattgaagaagagagctgtcatctagaaggttttgttttggaacctaacttggaggtggtttgcgcccttgaagtgccaaagaattttaaatccaacaagctgttgaggaatgctgaaagtaaggaaaatgagcatgttggtgttggtagtcctactggaaggattgctgttgaggccgcatctgatgttgtattaaacatgagtgctgaagaagagagcagagaatttaagaagtcaaaaatcatgacaaaacaatcactgactactggttcagagaaaagggataataaaattgtccatggaaagcctgacaagcaattgactggaaaatcatctgcagggttttctctcaatcagaaatctctgacaggtagcgggcagcacaagatggacagtagtgctgatacacgtccggcaaagaaggcaagacttatggacagggctggtgaaacagataagacagttgccaagagtgagacgaagttaaacatcaattatgaaaatcataatgctgtgaaacatgagcaatctactgctgtggaaacatgtaaaaacacaattcttaagactggtatcggtgatgatagggcacggaagtcaggtggtgctgtatcacccatatcaaagcttcattctgagatcatggaaccagcatctggttcttctgtaactcagtctactgttgctgattctcttaaaaagggttccagcaggaaggaggatgtctcacgtgttgataggaaattggttaaacctaagagaagagcgtgtcgttttgatgatgacgaggatgaaggacagcaaacaccacttcatagaacttctgccaaatctctctctacgcatatagtcccaactgagaaaccaggtagtcggggaaattttgcttcgcatgttggcaacgcttctggaaaaaaaccaggccctgccagagaagagaaatcaagaagtgttaggatgtcacctgtgaagcatgagccagttttttcttcaccgagtcaggataaagtgcatgctagacaccagttaatggggagaaatctgatcacagggtcggttgagactcctgtcattggtaacaaaatgagcctggttgatggcaaatcctctgctcaagtaaaaatgccggcatgctctgaggtgaagaaacttcatagtacttctaaaccattgcaagtaacatctgggaaatcccattcccgaaactatcctgcttcagaaaagatcgccttggtgcccaagtcagaagaaacaaaggctaaatctaaaccagctacatctgttgagcataaggtggccaccactttgtcaactgaacggactgggaagcgggaccacctgaaagaggaaagatcaagttctgttgataaagcagcttattctgaacctaaccctgactcggccaagtcaataaaacatcttattgcagctgcccaagcaaggaggaaccttatggcttctgctcttgcaaaatttgatgggtcttcgactgataatagtgctattacctctacatcatatgcaattgctcgtgatgctttggagggaatgatagagactttatcaaggacaaaggatagtataggccgtgcaacacgccatgcaattgagtgctctaaatatggcattgctggagagattgtcgagcttctcatacagaaattggagaacgagcataatttgcatcgcagaattgacctcctttttcttgtggattccataacacaatgttcccattctcatagaggagttgccggggcttcatatgttcccactgttcaagcggcattgcctcgtcttttcggtgctgctgctccacctggagctggtgctcgtgaaaaccggcgccagtgccttaaagttttaagattgtggcttgagagaaagattatgccagaagacatactccgaaagtacatgggtgacattgagcaatgcaacttttgagctttctggaattttatcatcaaaagtgtttgaagatgatgaagacttccctcaaaacaatgggtcatcatcatttgtttcacggcctgttgaaggtggtgtcatacatgaaactgaagataatattgctccagcatctgttgaggaacacattattagagtagaacatgtagctactgatgctgctatggaagatgctttagagttacttggcaacaaccaacagactcatggagctgtcattattgaacatgactctagtcaaggtccaggttcagagcaggcattgatcgcccagaatgagcttccccctctacctgatggccctccaccacttccatcagattcaccaccacctccacctcctttgcctccttcaccaccacccgctacaccgccaccaccacctccactctctccagcttcaccacttccgccaccacctcccccactaccatctggaccacctcctcagcctgcaccaccacctctgccaacccaggacccacctcttccttctattccgctgcctgtttcttcatctccgttgtcattgggttatcagcctccagcgccagagtacttcatgacgcccaatggtaatcaattggcccagatgacagtaaacacatcaattcaagctattggaaatacaacaaccttcattcctggtggaccagttaatggacaagctgcagttaattttgttacttcaatgccggcagaatttggaaatactagcgtatttatggcgcaagcttctaatggtaattaccagtttcggccaactggtgtaccttttcagcaagggaatttcagtgcctttccatctgcacaaacacctccagttcatccccattctcgtatggcacacatgaatcccatgggccaacaagctgttgcacctccacacaatccttatgctgcacagtcctttccaaacagtcagagccattatccatctgaagaacattggcggatggcatctggtaacttcagtccagatgaccagcataattggatagcaagtggcagatcattaccttgctcagaagggccatttgtgcatgatggatattcaagatcaaacattgacagatcttcaatgaatcctatgaatcatcaacatactgttctgaatcatttgccatctggagcaccactaccaggccatatttctcagatgctaccagccaggtctgatatgcacactcttaattgctggaggccctcttgatagagttgtaaactgaacttcttgtttgtgattttgacatggaaagctcagggcattggaggcaatttgaattgagttcaacaactggtggctgttagtctgagatggagatgcacttgccagggtttaacgatgagatctgtcatagtatgtggaatggacattttacaatgtaactagtcctgacaacagtatccagcagacaatctctcttagtgtgagctcatcttttcacatgacgcaaatgtcctccagttttttagatgttgcttccagtatggatcaggacagcgaactgttcctatgctatggtagtaaatatcttgtgcagatacattaattataaatagaggtctggtagtaaataccaggaactggtatcatcaaggcattttgtcacggtgcctatgctatggttcgcttttttctcttaactgttgtgctcaatttgcgaaattcatttcaaatttcagttagctaatcacatatattctcaacaaccgtattttatgtttggtgtttagactagaattgtgcttagacaacatgtacatcactgagtttagatttaagagcggaagttagttttgattctgttaggacggcgaaatatgtgctgatatttaagagctctagtttattcttgtttccaaagactgctgatagcgttggttttctaagcgagtcataatgtgttcatatctgca

SEQ ID NO: 41368 - DNA, 5156 bp, Zea Mays
cacaggcgcacagcagaaaggcgagggagaggagagccgcccgcatccgcgcaccgcaccgcaccgcgccgcgccgttcagagagggagaggaggggacgcgaggaggaagaagaagcaggcaaacagcagcagaaggcagaagccccgtcccatccccggcagccccctccatccaagtgatttcaagtagccaccgagaagcggagaaggtgaccgcacctcacgcaatttgcccctgcccgtcgattccatcgcctcccgccgtcccttccctcctctagggttgtcttgtgggtgcccgtgcttcccaccctaggggcaggtccagggccgggccttctcttcgccccgcctccgctgctcttttctttgctgctagggttaggttagggttcgacgctgtggggaggggcatcctcctccctcgccgccgccgccgccgccaatgcctcccggcggtaggcgcggcgccaagcagcgctccaactggaccagggaaccccagctaggcgaccttgtcctcgccaagatcaagggatacccgtcctggccagctaagatcagcaagcccgaggactggaaacgtaagccaacgccaaaaaagttcttcgtctgcttctacggcaccggggagattgcctttgtacctctggcagatcttgaggaatttactgagaagaaaaagaacgatctgttagatcgagctcttaaagttcaaagaaaatatgttcaacaatttaatgttgctgtggagcagatctgcaaggcttataatgaattgccaaaaacatctgaagccgcaaatgtagcattgcctgatcagagtgaaaagactacagagcacctggtgaggtcacctgatattggtgggactccaggactgggacaaatggaagatgatccccctactgattgctcaagtacttcagggcaagggtcagggaccgaggaggatgtcaaagatggtggtcatgaaataggtgataattctttggcagttcctcaaaagaaagcatctttacaacaggatcctaagcatcccaagacaaagaagtctgctgcatcaaagtctggttttgacatgtacacagaacaggagcattcaccaacatctctgcgggcagaaaggcagattgaagaggtgaaaattgaagaagagagctgtcatctagaaggttttgttttggaacctaacttggaggtggtttgcgcccttgaagtgccaaagaattttaaatccaacaagctgttgaggaatgctgaaagtaaggaaaatgagcatgttggtgttggtagtcctactggaaggattgctgttgaggccgcatctgatgttgtattaaacatgagtgctgaagaagagagcagagaatttaagaagtcaaaaatcatgacaaaacaatcactgactactggttcagagaaaagggataataaaattgtccatggaaagcctgacaagcaattgactggaaaatcatctgcagggttttctctcaatcagaaatctctgacaggtagcgggcagcacaagatggacagtagtgctgatacacgtccggcaaagaaggcaagacttatggacagggctggtgaaacagataagacagttgccaagagtgagacgaagttaaacatcaattatgaaaatcataatgctgtgaaacatgagcaatctactgctgtggaaacatgtaaaaacacaattcttaagactggtatcggtgatgatagggcacggaagtcaggtggtgctgtatcacccatatcaaagcttcattctgagatcatggaaccagcatctggttcttctgtaactcagtctactgttgctgattctcttaaaaagggttccagcaggaaggaggatgtctcacgtgttgataggaaattggttaaacctaagagaagagcgtgtcgttttgatgatgacgaggatgaaggacagcaaacaccacttcatagaacttctgccaaatctctctctacgcatatagtcccaactgagaaaccaggtagtcggggaaattttgcttcgcatgttggcaacgcttctggaaaaaaaccaggccctgccagagaagagaaatcaagaagtgttaggatgtcacctgtgaagcatgagccagttttttcttcaccgagtcaggataaagtgcatgctagacaccagttaatggggagaaatctgatcacagggtcggttgagactcctgtcattggtaacaaaatgagcctggttgatggcaaatcctctgctcaagtaaaaatgccggcatgctctgaggtgaagaaacttcatagtacttctaaaccattgcaagtaacatctgggaaatcccattcccgaaactatcctgcttcagaaaagatcgccttggtgcccaagtcagaagaaacaaaggctaaatctaaaccagctacatctgttgagcataaggtggccaccactttgtcaactgaacggactgggaagcgggaccacctgaaagaggaaagatcaagttctgttgataaagcagcttattctgaacctaaccctgactcggccaagtcaataaaacatcttattgcagctgcccaagcaaggaggaaccttatggcttctgctcttgcaaaatttgatgggtcttcgactgataatagtgctattacctctacatcatatgcaattgctcgtgatgctttggagggaatgatagagactttatcaaggacaaaggatagtataggccgtgcaacacgccatgcaattgagtgctctaaatatggcattgctggagagattgtcgagcttctcatacagaaattggagaacgagcataatttgcatcgcagaattgacctcctttttcttgtggattccataacacaatgttcccattctcatagaggagttgccggggcttcatatgttcccactgttcaagcggcattgcctcgtcttttcggtgctgctgctccacctggagctggtgctcgtgaaaaccggcgccagtgccttaaagttttaagattgtggcttgagagaaagattatgccagaagacatactccgaaagtacatgggtgacattgaggtgccaaatgatgatactagcactagtttaatgttaaagcgaccatcccgttctgaacgttctgtagatgatcctattagggagatggatgacatgcttgttgatgaatatggaagcaatgcaacttttgagctttctggaattttatcatcaaaagtgtttgaagatgatgaagacttccctcaaaacaatgggtcatcatcatttgtttcacggcctgttgaaggtggtgtcatacatgaaactgaagataatattgctccagcatctgttgaggaacacattattagagtagaacatgtagctactgatgctgctatggaagatgctttagagttacttggcaacaaccaacagactcatggagctgtcattattgaacatgactctagtcaaggtccaggttcagagcaggcattgatcgcccagaatgagcttccccctctacctgatggccctccaccacttccatcagattcaccaccacctccacctcctttgcctccttcaccaccacccgctacaccgccaccaccacctccactctctccagcttcaccacttccgccaccacctcccccactaccatctggaccacctcctcagcctgcaccaccacctctgccaacccaggacccacctcttccttctattccgctgcctgtttcttcatctccgttgtcattgggttatcagcctccagcgccagagtacttcatgacgcccaatggtaatcaattggcccagatgacagtaaacacatcaattcaagctattggaaatacaacaaccttcattcctggtggaccagttaatggacaagctgcagttaattttgttacttcaatgccggcagaatttggaaatactagcgtatttatggcgcaagcttctaatggtaattaccagtttcggccaactggtgtaccttttcagcaagggaatttcagtgcctttccatctgcacaaacacctccagttcatccccattctcgtatggcacacatgaatcccatgggccaacaagctgttgcacctccacacaatccttatgctgcacagtcctttccaaacagtcagagccattatccatctgaagaacattggcggatggcatctggtaacttcagtccagatgaccagcataattggatagcaagtggcagatcattaccttgctcagaagggccatttgtgcatgatggatattcaagatcaaacattgacagatcttcaatgaatcctatgaatcatcaacatactgttctgaatcatttgccatctggagcaccactaccaggccatatttctcagatgctaccagccaggtctgatatgcacactcttaattgctggaggccctcttgatagagttgtaaactgaacttcttgtttgtgattttgacatggaaagctcagggcattggaggcaatttgaattgagttcaacaactggtggctgttagtctgagatggagatgcacttgccagggtttaacgatgagatctgtcatagtatgtggaatggacattttacaatgtaactagtcctgacaacagtatccagcagacaatctctcttagtgtgagctcatcttttcacatgacgcaaatgtcctccagttttttagatgttgcttccagtatggatcaggacagcgaactgttcctatgctatggtagtaaatatcttgtgcagatacattaattataaatagaggtctggtagtaaataccaggaactggtatcatcaaggcattttgtcacggtgcctatgctatggttcgcttttttctcttaactgttgtgctcaatttgcgaaattcatttcaaatttcagttagctaatcacatatattctcaacaaccgtattttatgtttggtgtttagactagaattgtgcttagacaacatgtacatcactgagtttagatttaagagcggaagttagttttgattctgttaggacggcgaaatatgtgctgatatttaagagctctagtttattcttgtttccaaagactgctgatagcgttggttttctaagcgagtcataatgtgttcatatctgca

SEQ ID NO: 41369 - DNA, 5328 bp, Zea Mays
cacaggcgcacagcagaaaggcgagggagaggagagccgcccgcatccgcgcaccgcaccgcaccgcgccgcgccgttcagagagggagaggaggggacgcgaggaggaagaagaagcaggcaaacagcagcagaaggcagaagccccgtcccatccccggcagccccctccatccaagtgatttcaagtagccaccgagaagcggagaaggtgaccgcacctcacgcaatttgcccctgcccgtcgattccatcgcctcccgccgtcccttccctcctctagggttgtcttgtgggtgcccgtgcttcccaccctaggggcaggtccagggccgggccttctcttcgccccgcctccgctgctcttttctttgctgctagggttaggttagggttcgacgctgtggggaggggcatcctcctccctcgccgccgccgccgccgccaatgcctcccggcggtaggcgcggcgccaagcagcgctccaactggaccagggaaccccagctaggcgaccttgtcctcgccaagatcaagggatacccgtcctggccagctaagcaagcccgaggactggaaacgtaagccaacgccaaaaaagttcttcgtctgcttctacggcaccggggagattgcctttgtacctctggcagatcttgaggaatttactgagaagaaaaagaacgatctgttagatcgagctcttaaagttcaaagaaaatatgttcaacaatttaatgttgctgtggagcagatctgcaaggcttataatgaattgccaaaaacatctgaagccgcaaatgtagcattgcctgatcagagtgaaaagactacagagcacctggtgaggtcacctgatattggtgggactccaggactgggacaaatggaagatgatccccctactgattgctcaagtacttcagggcaagggtcagggaccgaggaggatgtcaaagatggtggtcatgaaataggtgataattctttggcagttcctcaaaagaaagcatctttacaacaggatcctaagcatcccaagacaaagaagtctgctgcatcaaagtctggttttgacatgtacacagaacaggagcattcaccaacatctctgcgggcagaaaggcagattgaagaggtgaaaattgaagaagagagctgtcatctagaaggttttgttttggaacctaacttggaggtggtttgcgcccttgaagtgccaaagaattttaaatccaacaagctgttgaggaatgctgaaagtaaggaaaatgagcatgttggtgttggtagtcctactggaaggattgctgttgaggccgcatctgatgttgtattaaacatgagtgctgaagaagagagcagagaatttaagaagtcaaaaatcatgacaaaacaatcactgactactggttcagagaaaagggataataaaattgtccatggaaagcctgacaagcaattgactggaaaatcatctgcagggttttctctcaatcagaaatctctgacaggtagcgggcagcacaagatggacagtagtgctgatacacgtccggcaaagaaggcaagacttatggacagggctggtgaaacagataagacagttgccaagagtgagacgaagttaaacatcaattatgaaaatcataatgctgtgaaacatgagcaatctactgctgtggaaacatgtaaaaacacaattcttaagactggtatcggtgatgatagggcacggaagtcaggtggtgctgtatcacccatatcaaagcttcattctgagatcatggaaccagcatctggttcttctgtaactcagtctactgttgctgattctcttaaaaagggttccagcaggaaggaggatgtctcacgtgttgataggaaattggttaaacctaagagaagagcgtgtcgttttgatgatgacgaggatgaaggacagcaaacaccacttcatagaacttctgccaaatctctctctacgcatatagtcccaactgagaaaccaggtagtcggggaaattttgcttcgcatgttggcaacgcttctggaaaaaaaccaggccctgccagagaagagaaatcaagaagtgttaggatgtcacctgtgaagcatgagccagttttttcttcaccgagtcaggataaagtgcatgctagacaccagttaatggggagaaatctgatcacagggtcggttgagactcctgtcattggtaacaaaatgagcctggttgatggcaaatcctctgctcaagtaaaaatgccggcatgctctgaggtgaagaaacttcatagtacttctaaaccattgcaagtaacatctgggaaatcccattcccgaaactatcctgcttcagaaaagatcgccttggtgcccaagtcagaagaaacaaaggctaaatctaaaccagctacatctgttgagcataaggtggccaccactttgtcaactgaacggactgggaagcgggaccacctgaaagaggaaagatcaagttctgttgataaagcagcttattctgaacctaaccctgactcggccaagtcaataaaacatcttattgcagctgcccaagcaaggaggaaccttatggcttctgctcttgcaaaatttgatgggtcttcgactgataatagtgctattacctctacatcatatggtttgccaagactaagccctagtcctgtttttcgcattccatccccacctagaattgcttttcctgagagtcctggtcaacgtattctgaaaagcccaatggagcttgataatggtcatggaaagagtcccaaatctaggcaggccagcggttcacctagtggtggttctgatgcagcaattgctcgtgatgctttggagggaatgatagagactttatcaaggacaaaggatagtataggccgtgcaacacgccatgcaattgagtgctctaaatatggcattgctggagagattgtcgagcttctcatacagaaattggagaacgagcataatttgcatcgcagaattgacctcctttttcttgtggattccataacacaatgttcccattctcatagaggagttgccggggcttcatatgttcccactgttcaagcggcattgcctcgtcttttcggtgctgctgctccacctggagctggtgctcgtgaaaaccggcgccagtgccttaaagttttaagattgtggcttgagagaaagattatgccagaagacatactccgaaagtacatgggtgacattgaggtgccaaatgatgatactagcactagtttaatgttaaagcgaccatcccgttctgaacgttctgtagatgatcctattagggagatggatgacatgcttgttgatgaatatggaagcaatgcaacttttgagctttctggaattttatcatcaaaagtgtttgaagatgatgaagacttccctcaaaacaatgggtcatcatcatttgtttcacggcctgttgaaggtggtgtcatacatgaaactgaagataatattgctccagcatctgttgaggaacacattattagagtagaacatgtagctactgatgctgctatggaagatgctttagagttacttggcaacaaccaacagactcatggagctgtcattattgaacatgactctagtcaaggtccaggttcagagcaggcattgatcgcccagaatgagcttccccctctacctgatggccctccaccacttccatcagattcaccaccacctccacctcctttgcctccttcaccaccacccgctacaccgccaccaccacctccactctctccagcttcaccacttccgccaccacctcccccactaccatctggaccacctcctcagcctgcaccaccacctctgccaacccaggacccacctcttccttctattccgctgcctgtttcttcatctccgttgtcattgggttatcagcctccagcgccagagtacttcatgacgcccaatggtaatcaattggcccagatgacagtaaacacatcaattcaagctattggaaatacaacaaccttcattcctggtggaccagttaatggacaagctgcagttaattttgttacttcaatgccggcagaatttggaaatactagcgtatttatggcgcaagcttctaatggtaattaccagtttcggccaactggtgtaccttttcagcaagggaatttcagtgcctttccatctgcacaaacacctccagttcatccccattctcgtatggcacacatgaatcccatgggccaacaagctgttgcacctccacacaatccttatgctgcacagtcctttccaaacagtcagagccattatccatctgaagaacattggcggatggcatctggtaacttcagtccagatgaccagcataattggatagcaagtggcagatcattaccttgctcagaagggccatttgtgcatgatggatattcaagatcaaacattgacagatcttcaatgaatcctatgaatcatcaacatactgttctgaatcatttgccatctggagcaccactaccaggccatatttctcagatgctaccagccaggtctgatatgcacactcttaattgctggaggccctcttgatagagttgtaaactgaacttcttgtttgtgattttgacatggaaagctcagggcattggaggcaatttgaattgagttcaacaactggtggctgttagtctgagatggagatgcacttgccagggtttaacgatgagatctgtcatagtatgtggaatggacattttacaatgtaactagtcctgacaacagtatccagcagacaatctctcttagtgtgagctcatcttttcacatgacgcaaatgtcctccagttttttagatgttgcttccagtatggatcaggacagcgaactgttcctatgctatggtagtaaatatcttgtgcagatacattaattataaatagaggtctggtagtaaataccaggaactggtatcatcaaggcattttgtcacggtgcctatgctatggttcgcttttttctcttaactgttgtgctcaatttgcgaaattcatttcaaatttcagttagctaatcacatatattctcaacaaccgtattttatgtttggtgtttagactagaattgtgcttagacaacatgtacatcactgagtttagatttaagagcggaagttagttttgattctgttaggacggcgaaatatgtgctgatatttaagagctctagtttattcttgtttccaaagactgctgatagcgttggttttctaagcgagtcataatgtgttcatatctgca

SEQ ID NO: 41370 - DNA, 5220 bp, Zea Mays
cacaggcgcacagcagaaaggcgagggagaggagagccgcccgcatccgcgcaccgcaccgcaccgcgccgcgccgttcagagagggagaggaggggacgcgaggaggaagaagaagcaggcaaacagcagcagaaggcagaagccccgtcccatccccggcagccccctccatccaagtgatttcaagtagccaccgagaagcggagaaggtgaccgcacctcacgcaatttgcccctgcccgtcgattccatcgcctcccgccgtcccttccctcctctagggttgtcttgtgggtgcccgtgcttcccaccctaggggcaggtccagggccgggccttctcttcgccccgcctccgctgctcttttctttgctgctagggttaggttagggttcgacgctgtggggaggggcatcctcctccctcgccgccgccgccgccgccaatgcctcccggcggtaggcgcggcgccaagcagcgctccaactggaccagggaaccccagctaggcgaccttgtcctcgccaagatcaagggatacccgtcctggccagctaagatcagcaagcccgaggactggaaacgtaagccaacgccaaaaaagttcttcgtctgcttctacggcaccggggagattgcctttgtacctctggcagatcttgaggaatttactgagaagaaaaagaacgatctgttagatcgagctcttaaagttcaaagaaaatatgttcaacaatttaatgttgctgtggagcagatctgcaaggcttataatgaattgccaaaaacatctgaagccgcaaatgtagcattgcctgatcagagtgaaaagactacagagcacctggtgaggtcacctgatattggtgggactccaggactgggacaaatggaagatgatccccctactgattgctcaagtacttcagggcaagggtcagggaccgaggaggatgtcaaagatggtggtcatgaaataggtgataattctttggcagttcctcaaaagaaagcatctttacaacaggatcctaagcatcccaagacaaagaagtctgctgcatcaaagtctggttttgacatgtacacagaacaggagcattcaccaacatctctgcgggcagaaaggcagattgaagaggtgaaaattgaagaagagagctgtcatctagaaggttttgttttggaacctaacttggaggtggtttgcgcccttgaagtgccaaagaattttaaatccaacaagctgttgaggaatgctgaaagtaaggaaaatgagcatgttggtgttggtagtcctactggaaggattgctgttgaggccgcatctgatgttgtattaaacatgagtgctgaagaagagagcagagaatttaagaagtcaaaaatcatgacaaaacaatcactgactactggttcagagaaaagggataataaaattgtccatggaaagcctgacaagcaattgactggaaaatcatctgcagggttttctctcaatcagaaatctctgacaggtagcgggcagcacaagatggacagtagtgctgatacacgtccggcaaagaaggcaagacttatggacagggctggtgaaacagataagacagttgccaagagtgagacgaagttaaacatcaattatgaaaatcataatgctgtgaaacatgagcaatctactgctgtggaaacatgtaaaaacacaattcttaagactggtatcggtgatgatagggcacggaagtcaggtggtgctgtatcacccatatcaaagcttcattctgagatcatggaaccagcatctggttcttctgtaactcagtctactgttgctgattctcttaaaaagggttccagcaggaaggaggatgtctcacgtgttgataggaaattggttaaacctaagagaagagcgtgtcgttttgatgatgacgaggatgaaggacagcaaacaccacttcatagaacttctgccaaatctctctctacgcatatagtcccaactgagaaaccaggtagtcggggaaattttgcttcgcatgttggcaacgcttctggaaaaaaaccaggccctgccagagaagagaaatcaagaagtgttaggatgtcacctgtgaagcatgagccagttttttcttcaccgagtcaggataaagtgcatgctagacaccagttaatggggagaaatctgatcacagggtcggttgagactcctgtcattggtaacaaaatgagcctggttgatggcaaatcctctgctcaagtaaaaatgccggcatgctctgaggtgaagaaacttcatagtacttctaaaccattgcaagtaacatctgggaaatcccattcccgaaactatcctgcttcagaaaagatcgccttggtgcccaagtcagaagaaacaaaggctaaatctaaaccagctacatctgttgagcataaggtggccaccactttgtcaactgaacggactgggaagcgggaccacctgaaagaggaaagatcaagttctgttgataaagcagcttattctgaacctaaccctgactcggccaagtcaataaaacatcttattgcagctgcccaagcaaggaggaaccttatggcttctgctcttgcaaaatttgatgggtcttcgactgataatagtgctattacctctacatcatatggtttgccaagactaagccctagtcctgtttttcgcattccatccccacctagaattgcttttcctgagagtcctggtcaacgtattctgaaaagcccaatggagcttgataatggtcatggaaagagtcccaaatctaggcaggccagcggttcacctagtggtggttctgatgcagcaattgctcgtgatgctttggagggaatgatagagactttatcaaggacaaaggatagtataggccgtgcaacacgccatgcaattgagtgctctaaatatggcattgctggagagattgtcgagcttctcatacagaaattggagaacgagcataatttgcatcgcagaattgacctcctttttcttgtggattccataacacaatgttcccattctcatagaggttttaagattgtggcttgagagaaagattatgccagaagacatactccgaaagtacatgggtgacattgaggtgccaaatgatgatactagcactagtttaatgttaaagcgaccatcccgttctgaacgttctgtagatgatcctattagggagatggatgacatgcttgttgatgaatatggaagcaatgcaacttttgagctttctggaattttatcatcaaaagtgtttgaagatgatgaagacttccctcaaaacaatgggtcatcatcatttgtttcacggcctgttgaaggtggtgtcatacatgaaactgaagataatattgctccagcatctgttgaggaacacattattagagtagaacatgtagctactgatgctgctatggaagatgctttagagttacttggcaacaaccaacagactcatggagctgtcattattgaacatgactctagtcaaggtccaggttcagagcaggcattgatcgcccagaatgagcttccccctctacctgatggccctccaccacttccatcagattcaccaccacctccacctcctttgcctccttcaccaccacccgctacaccgccaccaccacctccactctctccagcttcaccacttccgccaccacctcccccactaccatctggaccacctcctcagcctgcaccaccacctctgccaacccaggacccacctcttccttctattccgctgcctgtttcttcatctccgttgtcattgggttatcagcctccagcgccagagtacttcatgacgcccaatggtaatcaattggcccagatgacagtaaacacatcaattcaagctattggaaatacaacaaccttcattcctggtggaccagttaatggacaagctgcagttaattttgttacttcaatgccggcagaatttggaaatactagcgtatttatggcgcaagcttctaatggtaattaccagtttcggccaactggtgtaccttttcagcaagggaatttcagtgcctttccatctgcacaaacacctccagttcatccccattctcgtatggcacacatgaatcccatgggccaacaagctgttgcacctccacacaatccttatgctgcacagtcctttccaaacagtcagagccattatccatctgaagaacattggcggatggcatctggtaacttcagtccagatgaccagcataattggatagcaagtggcagatcattaccttgctcagaagggccatttgtgcatgatggatattcaagatcaaacattgacagatcttcaatgaatcctatgaatcatcaacatactgttctgaatcatttgccatctggagcaccactaccaggccatatttctcagatgctaccagccaggtctgatatgcacactcttaattgctggaggccctcttgatagagttgtaaactgaacttcttgtttgtgattttgacatggaaagctcagggcattggaggcaatttgaattgagttcaacaactggtggctgttagtctgagatggagatgcacttgccagggtttaacgatgagatctgtcatagtatgtggaatggacattttacaatgtaactagtcctgacaacagtatccagcagacaatctctcttagtgtgagctcatcttttcacatgacgcaaatgtcctccagttttttagatgttgcttccagtatggatcaggacagcgaactgttcctatgctatggtagtaaatatcttgtgcagatacattaattataaatagaggtctggtagtaaataccaggaactggtatcatcaaggcattttgtcacggtgcctatgctatggttcgcttttttctcttaactgttgtgctcaatttgcgaaattcatttcaaatttcagttagctaatcacatatattctcaacaaccgtattttatgtttggtgtttagactagaattgtgcttagacaacatgtacatcactgagtttagatttaagagcggaagttagttttgattctgttaggacggcgaaatatgtgctgatatttaagagctctagtttattcttgtttccaaagactgctgatagcgttggttttctaagcgagtcataatgtgttcatatctgca

SEQ ID NO: 41371 - DNA, 4929 bp, Zea Mays
cacaggcgcacagcagaaaggcgagggagaggagagccgcccgcatccgcgcaccgcaccgcaccgcgccgcgccgttcagagagggagaggaggggacgcgaggaggaagaagaagcaggcaaacagcagcagaaggcagaagccccgtcccatccccggcagccccctccatccaagtgatttcaagtagccaccgagaagcggagaaggtgaccgcacctcacgcaatttgcccctgcccgtcgattccatcgcctcccgccgtcccttccctcctctagggttgtcttgtgggtgcccgtgcttcccaccctaggggcaggtccagggccgggccttctcttcgccccgcctccgctgctcttttctttgctgctagggttaggttagggttcgacgctgtggggaggggcatcctcctccctcgccgccgccgccgccgccaatgcctcccggcggtaggcgcggcgccaagcagcgctccaactggaccagggaaccccagctaggcgaccttgtcctcgccaagatcaagggatacccgtcctggccagctaagatcagcaagcccgaggactggaaacgtaagccaacgccaaaaaagttcttcgtctgcttctacggcaccggggagattgcctttgtacctctggcagatcttgaggaatttactgagaagaaaaagaacgatctgttagatcgagctcttaaagttcaaagaaaatatgttcaacaatttaatgttgctgtggagcagatctgcaaggcttataatgaattgccaaaaacatctgaagccgcaaatgtagcattgcctgatcagagtgaaaagactacagagcacctggtgaggtcacctgatattggtgggactccaggactgggacaaatggaagatgatccccctactgattgctcaagtacttcagggcaagggtcagggaccgaggaggatgtcaaagatggtggtcatgaaataggtgataattctttggcagttcctcaaaagaaagcatctttacaacaggatcctaagcatcccaagacaaagaagtctgctgcatcaaagtctggttttgacatgtacacagaacaggagcattcaccaacatctctgcgggcagaaaggcagattgaagaggtgaaaattgaagaagagagctgtcatctagaaggttttgttttggaacctaacttggaggtggtttgcgcccttgaagtgccaaagaattttaaatccaacaagctgttgaggaatgctgaaagtaaggaaaatgagcatgttggtgttggtagtcctactggaaggattgctgttgaggccgcatctgatgttgtattaaacatgagtgctgaagaagagagcagagaatttaagaagtcaaaaatcatgacaaaacaatcactgactactggttcagagaaaagggataataaaattgtccatggaaagcctgacaagcaattgactggaaaatcatctgcagggttttctctcaatcagaaatctctgacaggtagcgggcagcacaagatggacagtagtgctgatacacgtccggcaaagaaggcaagacttatggacagggctggtgaaacagataagacagttgccaagagtgagacgaagttaaacatcaattatgaaaatcataatgctgtgaaacatgagcaatctactgctgtggaaacatgtaaaaacacaattcttaagactggtatcggtgatgatagggcacggaagtcaggtggtgctgtatcacccatatcaaagcttcattctgagatcatggaaccagcatctggttcttctgtaactcagtctactgttgctgattctcttaaaaagggttccagcaggaaggaggatgtctcacgtgttgataggaaattggttaaacctaagagaagagcgtgtcgttttgatgatgacgaggatgaaggacagcaaacaccacttcatagaacttctgccaaatctctctctacgcatatagtcccaactgagaaaccaggtagtcggggaaattttgcttcgcatgttggcaacgcttctggaaaaaaaccaggccctgccagagaagagaaatcaagaagtgttaggatgtcacctgtgaagcatgagccagttttttcttcaccgagtcaggataaagtgcatgctagacaccagttaatggggagaaatctgatcacagggtcggttgagactcctgtcattggtaacaaaatgagcctggttgatggcaaatcctctgctcaagtaaaaatgccggcatgctctgaggtgaagaaacttcatagtacttctaaaccattgcaagtaacatctgggaaatcccattcccgaaactatcctgcttcagaaaagatcgccttggtgcccaagtcagaagaaacaaaggctaaatctaaaccagctacatctgttgagcataaggtggccaccactttgtcaactgaacggactgggaagcgggaccacctgaaagaggaaagatcaagttctgttgataaagcagcttattctgaacctaaccctgactcggccaagtcaataaaacatcttattgcagctgcccaagcaaggaggaaccttatggcttctgctcttgcaaaatttgatgggtcttcgactgataatagtgctattacctctacatcatatgcaattgctcgtgatgctttggagggaatgatagagactttatcaaggacaaaggatagtataggccgtgcaacacgccatgcaattgagtgctctaaatatggcattgctggagaggtcctttctctcacatacgccatctgcatcactgtttcattgttatttcactatccttattgtttctcttccagattgtcgagcttctcatacagaaattggagaacgagcataatttgcatcgcagaattgacctcctttttcttgtggattccataacacaatgttcccattctcatagagcaatgcaacttttgagctttctggaattttatcatcaaaagtgtttgaagatgatgaagacttccctcaaaacaatgggtcatcatcatttgtttcacggcctgttgaaggtggtgtcatacatgaaactgaagataatattgctccagcatctgttgaggaacacattattagagtagaacatgtagctactgatgctgctatggaagatgctttagagttacttggcaacaaccaacagactcatggagctgtcattattgaacatgactctagtcaaggtccaggttcagagcaggcattgatcgcccagaatgagcttccccctctacctgatggccctccaccacttccatcagattcaccaccacctccacctcctttgcctccttcaccaccacccgctacaccgccaccaccacctccactctctccagcttcaccacttccgccaccacctcccccactaccatctggaccacctcctcagcctgcaccaccacctctgccaacccaggacccacctcttccttctattccgctgcctgtttcttcatctccgttgtcattgggttatcagcctccagcgccagagtacttcatgacgcccaatggtaatcaattggcccagatgacagtaaacacatcaattcaagctattggaaatacaacaaccttcattcctggtggaccagttaatggacaagctgcagttaattttgttacttcaatgccggcagaatttggaaatactagcgtatttatggcgcaagcttctaatggtaattaccagtttcggccaactggtgtaccttttcagcaagggaatttcagtgcctttccatctgcacaaacacctccagttcatccccattctcgtatggcacacatgaatcccatgggccaacaagctgttgcacctccacacaatccttatgctgcacagtcctttccaaacagtcagagccattatccatctgaagaacattggcggatggcatctggtaacttcagtccagatgaccagcataattggatagcaagtggcagatcattaccttgctcagaagggccatttgtgcatgatggatattcaagatcaaacattgacagatcttcaatgaatcctatgaatcatcaacatactgttctgaatcatttgccatctggagcaccactaccaggccatatttctcagatgctaccagccaggtctgatatgcacactcttaattgctggaggccctcttgatagagttgtaaactgaacttcttgtttgtgattttgacatggaaagctcagggcattggaggcaatttgaattgagttcaacaactggtggctgttagtctgagatggagatgcacttgccagggtttaacgatgagatctgtcatagtatgtggaatggacattttacaatgtaactagtcctgacaacagtatccagcagacaatctctcttagtgtgagctcatcttttcacatgacgcaaatgtcctccagttttttagatgttgcttccagtatggatcaggacagcgaactgttcctatgctatggtagtaaatatcttgtgcagatacattaattataaatagaggtctggtagtaaataccaggaactggtatcatcaaggcattttgtcacggtgcctatgctatggttcgcttttttctcttaactgttgtgctcaatttgcgaaattcatttcaaatttcagttagctaatcacatatattctcaacaaccgtattttatgtttggtgtttagactagaattgtgcttagacaacatgtacatcactgagtttagatttaagagcggaagttagttttgattctgttaggacggcgaaatatgtgctgatatttaagagctctagtttattcttgtttccaaagactgctgatagcgttggttttctaagcgagtcataatgtgttcatatctgca

SEQ ID NO: 41372 - DNA, 4927 bp, Zea Mays
agaaaggcgagggagaggagagccgcccgcatccgcgcaccgcaccgcaccgcgccgcgccgttcagagagggagaggaggggacgcgaggaggaagaagaagcaggcaaacagcagcagaaggcagaagccccgtcccatccccggcagccccctccatccaagtgatttcaagtagccaccgagaagcggagaagatcagcaagcccgaggactggaaacgtaagccaacgccaaaaaagttcttcgtctgcttctacggcaccggggagattgcctttgtacctctggcagatcttgaggaatttactgagaagaaaaagaacgatctgttagatcgagctcttaaagttcaaagaaaatatgttcaacaatttaatgttgctgtggagcagatctgcaaggcttataatgaattgccaaaaacatctgaagccgcaaatgtagcattgcctgatcagagtgaaaagactacagagcacctggtgaggtcacctgatattggtgggactccaggactgggacaaatggaagatgatccccctactgattgctcaagtacttcagggcaagggtcagggaccgaggaggatgtcaaagatggtggtcatgaaataggtgataattctttggcagttcctcaaaagaaagcatctttacaacaggatcctaagcatcccaagacaaagaagtctgctgcatcaaagtctggttttgacatgtacacagaacaggagcattcaccaacatctctgcgggcagaaaggcagattgaagaggtgaaaattgaagaagagagctgtcatctagaaggttttgttttggaacctaacttggaggtggtttgcgcccttgaagtgccaaagaattttaaatccaacaagctgttgaggaatgctgaaagtaaggaaaatgagcatgttggtgttggtagtcctactggaaggattgctgttgaggccgcatctgatgttgtattaaacatgagtgctgaagaagagagcagagaatttaagaagtcaaaaatcatgacaaaacaatcactgactactggttcagagaaaagggataataaaattgtccatggaaagcctgacaagcaattgactggaaaatcatctgcagggttttctctcaatcagaaatctctgacaggtagcgggcagcacaagatggacagtagtgctgatacacgtccggcaaagaaggcaagacttatggacagggctggtgaaacagataagacagttgccaagagtgagacgaagttaaacatcaattatgaaaatcataatgctgtgaaacatgagcaatctactgctgtggaaacatgtaaaaacacaattcttaagactggtatcggtgatgatagggcacggaagtcaggtggtgctgtatcacccatatcaaagcttcattctgagatcatggaaccagcatctggttcttctgtaactcagtctactgttgctgattctcttaaaaagggttccagcaggaaggaggatgtctcacgtgttgataggaaattggttaaacctaagagaagagcgtgtcgttttgatgatgacgaggatgaaggacagcaaacaccacttcatagaacttctgccaaatctctctctacgcatatagtcccaactgagaaaccaggtagtcggggaaattttgcttcgcatgttggcaacgcttctggaaaaaaaccaggccctgccagagaagagaaatcaagaagtgttaggatgtcacctgtgaagcatgagccagttttttcttcaccgagtcaggataaagtgcatgctagacaccagttaatggggagaaatctgatcacagggtcggttgagactcctgtcattggtaacaaaatgagcctggttgatggcaaatcctctgctcaagtaaaaatgccggcatgctctgaggtgaagaaacttcatagtacttctaaaccattgcaagtaacatctgggaaatcccattcccgaaactatcctgcttcagaaaagatcgccttggtgcccaagtcagaagaaacaaaggctaaatctaaaccagctacatctgttgagcataaggtggccaccactttgtcaactgaacggactgggaagcgggaccacctgaaagaggaaagatcaagttctgttgataaagcagcttattctgaacctaaccctgactcggccaagtcaataaaacatcttattgcagctgcccaagcaaggaggaaccttatggcttctgctcttgcaaaatttgatgggtcttcgactgataatagtgctattacctctacatcatatggtttgccaagactaagccctagtcctgtttttcgcattccatccccacctagaattgcttttcctgagagtcctggtcaacgtattctgaaaagcccaatggagcttgataatggtcatggaaagagtcccaaatctaggcaggccagcggttcacctagtggtggttctgatgcagcaattgctcgtgatgctttggagggaatgatagagactttatcaaggacaaaggatagtataggccgtgcaacacgccatgcaattgagtgctctaaatatggcattgctggagaggtcctttctctcacatacgccatctgcatcactgtttcattgttatttcactatccttattgtttctcttccagattgtcgagcttctcatacagaaattggagaacgagcataatttgcatcgcagaattgacctcctttttcttgtggattccataacacaatgttcccattctcatagaggagttgccggggcttcatatgttcccactgttcaagcggcattgcctcgtcttttcggtgctgctgctccacctggagctggtgctcgtgaaaaccggcgccagtgccttaaagttttaagattgtggcttgagagaaagattatgccagaagacatactccgaaagtacatgggtgacattgagcaatgcaacttttgagctttctggaattttatcatcaaaagtgtttgaagatgatgaagacttccctcaaaacaatgggtcatcatcatttgtttcacggcctgttgaaggtggtgtcatacatgaaactgaagataatattgctccagcatctgttgaggaacacattattagagtagaacatgtagctactgatgctgctatggaagatgctttagagttacttggcaacaaccaacagactcatggagctgtcattattgaacatgactctagtcaaggtccaggttcagagcaggcattgatcgcccagaatgagcttccccctctacctgatggccctccaccacttccatcagattcaccaccacctccacctcctttgcctccttcaccaccacccgctacaccgccaccaccacctccactctctccagcttcaccacttccgccaccacctcccccactaccatctggaccacctcctcagcctgcaccaccacctctgccaacccaggacccacctcttccttctattccgctgcctgtttcttcatctccgttgtcattgggttatcagcctccagcgccagagtacttcatgacgcccaatggtaatcaattggcccagatgacagtaaacacatcaattcaagctattggaaatacaacaaccttcattcctggtggaccagttaatggacaagctgcagttaattttgttacttcaatgccggcagaatttggaaatactagcgtatttatggcgcaagcttctaatggtaattaccagtttcggccaactggtgtaccttttcagcaagggaatttcagtgcctttccatctgcacaaacacctccagttcatccccattctcgtatggcacacatgaatcccatgggccaacaagctgttgcacctccacacaatccttatgctgcacagtcctttccaaacagtcagagccattatccatctgaagaacattggcggatggcatctggtaacttcagtccagatgaccagcataattggatagcaagtggcagatcattaccttgctcagaagggccatttgtgcatgatggatattcaagatcaaacattgacagatcttcaatgaatcctatgaatcatcaacatactgttctgaatcatttgccatctggagcaccactaccaggccatatttctcagatgctaccagccaggtctgatatgcacactcttaattgctggaggccctcttgatagagttgtaaactgaacttcttgtttgtgattttgacatggaaagctcagggcattggaggcaatttgaattgagttcaacaactggtggctgttagtctgagatggagatgcacttgccagggtttaacgatgagatctgtcatagtatgtggaatggacattttacaatgtaactagtcctgacaacagtatccagcagacaatctctcttagtgtgagctcatcttttcacatgacgcaaatgtcctccagttttttagatgttgcttccagtatggatcaggacagcgaactgttcctatgctatggtagtaaatatcttgtgcagatacattaattataaatagaggtctggtagtaaataccaggaactggtatcatcaaggcattttgtcacggtgcctatgctatggttcgcttttttctcttaactgttgtgctcaatttgcgaaattcatttcaaatttcagttagctaatcacatatattctcaacaaccgtattttatgtttggtgtttagactagaattgtgcttagacaacatgtacatcactgagtttagatttaagagcggaagttagttttgattctgttaggacggcgaaatatgtgctgatatttaagagctctagtttattcttgtttccaaagactgctgatagcgttggttttctaagcgagtcataatgtgttcatatctgca

SEQ ID NO: 41373 - DNA, 1869 bp, Zea Mays
agtgaacttgctattaggaaggacatgcttcaaattaatgaacaatgcaacttttgagctttctggaattttatcatcaaaagtgtttgaagatgatgaagacttccctcaaaacaatgggtcatcatcatttgtttcacggcctgttgaaggtggtgtcatacatgaaactgaagataatattgctccagcatctgttgaggaacacattattagagtagaacatgtagctactgatgctgctatggaagatgctttagagttacttggcaacaaccaacagactcatggagctgtcattattgaacatgactctagtcaaggtccaggttcagagcaggcattgatcgcccagaatgagcttccccctctacctgatggccctccaccacttccatcagattcaccaccacctctgccaacccaggacccacctcttccttctattccgctgcctgtttcttcatctccgttgtcattgggttatcagcctccagcgccagagtacttcatgacgcccaatggtaatcaattggcccagatgacagtaaacacatcaattcaagctattggaaatacaacaaccttcattcctggtggaccagttaatggacaagctgcagttaattttgttacttcaatgccggcagaatttggaaatactagcgtatttatggcgcaagcttctaatggtaattaccagtttcggccaactggtgtaccttttcagcaagggaatttcagtgcctttccatctgcacaaacacctccagttcatccccattctcgtatggcacacatgaatcccatgggccaacaagctgttgcacctccacacaatccttatgctgcacagtcctttccaaacagtcagagccattatccatctgaagaacattggcggatggcatctggtaacttcagtccagatgaccagcataattggatagcaagtggcagatcattaccttgctcagaagggccatttgtgcatgatggatattcaagatcaaacattgacagatcttcaatgaatcctatgaatcatcaacatactgttctgaatcatttgccatctggagcaccactaccaggccatatttctcagatgctaccagccaggtctgatatgcacactcttaattgctggaggccctcttgatagagttgtaaactgaacttcttgtttgtgattttgacatggaaagctcagggcattggaggcaatttgaattgagttcaacaactggtggctgttagtctgagatggagatgcacttgccagggtttaacgatgagatctgtcatagtatgtggaatggacattttacaatgtaactagtcctgacaacagtatccagcagacaatctctcttagtgtgagctcatcttttcacatgacgcaaatgtcctccagttttttagatgttgcttccagtatggatcaggacagcgaactgttcctatgctatggtagtaaatatcttgtgcagatacattaattataaatagaggtctggtagtaaataccaggaactggtatcatcaaggcattttgtcacggtgcctatgctatggttcgcttttttctcttaactgttgtgctcaatttgcgaaattcatttcaaatttcagttagctaatcacatatattctcaacaaccgtattttatgtttggtgtttagactagaattgtgcttagacaacatgtacatcactgagtttagatttaagagcggaagttagttttgattctgttaggacggcgaaatatgtgctgatatttaagagctctagtttattcttgtttccaaagactgctgatagcgttggttttctaagcgagtcataatgtgttcatatctgca

SEQ ID NO: 41374 - DNA, 1364 bp, Zea Mays
cagcctccagcgccagagtacttcatgacgcccaatatgacagtaaacacatcaattcaagctattggaaatacaacaaccttcattcctggtggaccagttaatggacaagctgcagttaattttgttacttcaatgccggcagaatttggaaatactagcgtatttatggcgcaagcttctaatggtaattaccagtttcggccaactggtgtaccttttcagcaagggaatttcagtgcctttccatctgcacaaacacctccagttcatccccattctcgtatggcacacatgaatcccatgggccaacaagctgttgcacctccacacaatccttatgctgcacagtcctttccaaacagtcagagccattatccatctgaagaacattggcggatggcatctggtaacttcagtccagatgaccagcataattggatagcaagtggcagatcattaccttgctcagaagggccatttgtgcatgatggatattcaagatcaaacattgacagatcttcaatgaatcctatgaatcatcaacatactgttctgaatcatttgccatctggagcaccactaccaggccatatttctcagatgctaccagccaggtctgatatgcacactcttaattgctggaggccctcttgatagagttgtaaactgaacttcttgtttgtgattttgacatggaaagctcagggcattggaggcaatttgaattgagttcaacaactggtggctgttagtctgagatggagatgcacttgccagggtttaacgatgagatctgtcatagtatgtggaatggacattttacaatgtaactagtcctgacaacagtatccagcagacaatctctcttagtgtgagctcatcttttcacatgacgcaaatgtcctccagttttttagatgttgcttccagtatggatcaggacagcgaactgttcctatgctatggtagtaaatatcttgtgcagatacattaattataaatagaggtctggtagtaaataccaggaactggtatcatcaaggcattttgtcacggtgcctatgctatggttcgcttttttctcttaactgttgtgctcaatttgcgaaattcatttcaaatttcagttagctaatcacatatattctcaacaaccgtattttatgtttggtgtttagactagaattgtgcttagacaacatgtacatcactgagtttagatttaagagcggaagttagttttgattctgttaggacggcgaaatatgtgctgatatttaagagctctagtttattcttgtttccaaagactgctgatagcgttggttttctaagcgagtcataatgtgttcatatctgca

SEQ ID NO: 41375 - DNA, 1542 bp, Zea Mays
ttttttttcataattaaaacacaatttgtttttctctccctacctaccacaggcacaggcacagcccacccacgggagggaaggtctctccctctttctcttcgtcttcttcctcctccttttggtttccttttgattgattgatctagtagaacacagaaaggagagagaaagagaggagaggcaacacagaaacaagagaagaagaagaagaaggggagatcgagatcgatcacgcaccgggggagcagatccttcgcctcgccatcagggataaggattcatgcgaaatgccacctgaacttggaatgtcttctagaactgttgctggtgctgttgtaaataggaggcctcgccgcctgtttgggagatcatcagagaggaagaacccactcaaccttcagtttgagcgtcaagtagctcgcctcgaggcaaggcagcagcaacagaggatcaaggagcttgttagcagtgcaaatgtttctgaccaccgggtttttggggacactgaaaaattgcaaaatgcgaaattgtgtgagcttcatccagcttcctggttctgtgttgcctggtatcctgtttatcgtgtgcctcgtgggaatttccgtgcggcatttcttacttatcattcactggggaagttggttcataaaaaatgctccatggatacgaatgacgggcatacacaagtagtttcaccagttgttggtctccagagttacaacgacaagggagagcagtggtttcagctgagatgcccagatttgaagcaattgccaatagaagattctttaaaaaccagtcctgctgaagttcataaagagaggctgaggacgctgaagatgggtgcattggccatggcaagagctgttgtcccaaagggaagtggggagtcggtgaaccaccatcctgattacgagttcttcctgtctcgttgcgcctaggctaagcggttgtgatatgaaggaagaggggcttttctgcttctagctcctgaatgtagtagtgaccatgaaaatgaaaaaaaaacccagagtagtgactaaccagagaccggctatagatacagtttatcttagagagaggagagcctggggtgatgcatatcactgactgtataggagatagactcgaatattagatactctaacctgattccggattaccaatgcaaaccaagttggtgagctgttgaagtatggcagtacccgcgggatgggtgctttattggggctgggggcaaagatgagaagataccacagatgagatgacgctgcaggtgttcatcttttgtacaaagaccacaccagaggagcagcaagaaatttgctaccagcaagaaatttgttaacacatttgcgaggttgggcttttgttgtggcttgtttgctttgcagacttgcagtgttgctgtttctaatcatgatactgtgctgcttctgtttctaatcatgatattgtacatgaatgtgtcaacgtctggtgctgtgctgctagcaaacgcaagtgaaagcgtgcgagtaattagaggcgtgcaacctc

SEQ ID NO: 41376 - DNA, 3888 bp, Zea Mays
ttttttttcataattaaaacacaatttgtttttctctccctacctaccacaggcacaggcacagcccacccacgggagggaagaaaggagagagaaagagaggagaggcaacacagaaacaagagaagaagaagaagaaggggagatcgagatcgatcacgcaccgggggagcagatccttcgcctcgccatcagggataaggattcatgcgaaatgccacctgaacttggaatgtcttctagaactgttgctggtgctgttgtaaataggaggcctcgccgcctgtttgggagatcatcagagaggaagaacccactcaaccttcagtttgagcgtcaagtagctcgcctcgaggcaaggcagcagcaacagagattgcagaaaaaaatgtttgcaacaaagaattttacggtccacctggaagcaaaatgccattctaatgtttttcctctgccaatccttggtcggttatcctttgttaattaataattgtggtattcacttacttgccaggtgtgttattgtgacagttattcccttcaatttctgttacgacttcaaatcactatcgctcaccgagagtgcaagtgaggatccttcatctcgacctacatctccagaagagaaccctgaaacatcgtcctcaccatcgattttgttcctgcaccttaatgctcaagatgtatctcacagaagatggcaggataattcatcaaggctactggaagataagcccacaacatccaatagcatgtctgattcagatttcttagtcaacagctttaccaagccgagtgataatgcaaggccatcaagaaggaagagcaaaaagaaaagcaagaaacacaggcaacgctgtaggaagccgactgatggatctgaagctaaattcagagagggcaatggtgctgcctctgcagctgatgttggtgattgtgaagattcgacactttcgcctaagcatgttggtgacatacgctttgaggaaacttctcccagttcttctgtcaaggaagcttctgaagaggctcctgagagtgatgatgatgagtaccattgctgctcaggtggttcagtttcgagtgcgtcctactgtgatgagatggaactgtccaaatcaacaacttcgtgccctgcattgtgtggacaatgtcctagcagtaacttacagtatttggacaacactcaaaattctgcaccaacaggtccatctcaagaaacttgctatgctggcagtaaagcgaactgtaaccatgataccaagtccctgtttatattcagaaatgaacgtggatctgatccttgtgaggcaacagagttttgcagctctagcagtggatttgatgagaactggatagagaagtttgactatgatagtggcatttgttcgccaaaaagtgttggtacatatggtggagaccaggctgcccacttgtgcagtgacacaactggtgacaatgatttctgtcttgtaatatctagaaagagggccagaaaggagaagaaaatgtcattgtggaagagttatggagcgcatgcatccacacctgcacttgatcgaaataaaaaatatgttggccattcttcaatgcagatgaccaacgaattcaacagtaacgactggtcccatagacaaaatcatgttagcaggatacaccctcagcatggaaatgcactgaaaagctccaccaaaaatttcatgcagaggccaagcattggttgcagggagactcaatatgggtttccagctaaagaatccaagttaggagcaagtctcaatcattctacaggtccaagagaaaaaacttgtggaaaattaactggcggttttgataagacagcacaacagctttatttggacagagacctatccaatgctcttaacagcagtgaatcaatacgttgtgagacgagatcaatttcctcttctgaaccgacaactccaaagtctttaaaaggcaattatacttcagagtctggtgaatcaacagatattacaataggagctcttcccatgcagaaaagaagattgcaggatttagttcgaactgatgatgccagtgaaactatttctgggcgatcatcaccttgttctgagtcatcgacaactgaattaattgctggacatagtacagattcatctattgaagggaaccatggctgtcaagggctctgtaactctagaacacatctagcccagatgctcagggttgtaaacgatgcctgtaaagttcaggttggtgcagatgttctccttgctgctggttatccaatttctgatcttgagaaatttatatgctctgcaactcccgttattggtcgtgcaccttgcatgataagcaacacttgttcattggaccaagtagttagtgactcagtttgtcagcatgacatctctaatgtttccttgaggagaatatgggagtggtatgaagagccagggtgctatggattggaagtaaaagctcttagcaatctcagctctaaaacatccagcagcagcagttcagagttctttgcatactttgtgccttatctatctgctattcagttgtttgggttgtctaggaataacatgcatcacagttttggtgtgcaagggagggaattactgatatcatcaaatactgcaagctctatgagctctcatcctgtgcatgcaaaagcgcatacactgcttgaggaaagtaatgcatgcttgccagagtcatctttagttgtagaagatcctggagaactcatatttgagtactttgaaacagagcaaccttctctccggcctccattatttgaaaagatcaaggagcttgttagcagtgcaaatgtttctgaccaccgggtttttggggacactgaaaaattgcaaaatgcgaaattgtgtgagcttcatccagcttcctggttctgtgttgcctggtatcctgtttatcgtgtgcctcgtgggaatttccgtgcggcatttcttacttatcattcactggggaagttggttcataaaaaatgctccatggatacgaatgacgggcatacacaagtagtttcaccagttgttggtctccagagttacaacgacaagggagagcagtggtttcagctgagatgcccagatttgaagcaattgccaatagaagattctttaaaaaccagtcctgctgaagttcataaagagaggctgaggacgctgaagatgggtgcattggccatggcaagagctgttgtcccaaagggaagtggggagtcggtgaaccaccatcctgattacgagttcttcctgtctcgttgcgcctaggctaagcggttgtgatatgaaggaagaggggcttttctgcttctagctcctgaatgtagtagtgaccatgaaaatgaaaaaaaaacccagagtagtgactaaccagagaccggctatagatacagtttatcttagagagaggagagcctggggtgatgcatatcactgactgtataggagatagactcgaatattagatactctaacctgattccggattaccaatgcaaaccaagttggtgagctgttgaagtatggcagtacccgcgggatgggtgctttattggggctgggggcaaagatgagaagataccacagatgagatgacgctgcaggtgttcatcttttgtacaaagaccacaccagaggagcagcaagaaatttgctaccagcaagaaatttgttaacacatttgcgaggttgggcttttgttgtggcttgtttgctttgcagacttgcagtgttgctgtttctaatcatgatactgtgctgcttctgtttctaatcatgatattgtacatgaatgtgtcaacgtctggtgctgtgctgctagcaaacgcaagtgaaagcgtgcgagtaattagaggcgtgcaacctc

SEQ ID NO: 41377 - DNA, 3749 bp, Zea Mays
ttttttttcataattaaaacacaatttgtttttctctccctacctaccacaggcacaggcacagcccacccacgggagggaagaaaggagagagaaagagaggagaggcaacacagaaacaagagaagaagaagaagaaggggagatcgagatcgatcacgcaccgggggagcagatccttcgcctcgccatcagggataaggattcatgcgaaatgccacctgaacttggaatgtcttctagaactgttgctggtgctgttgtaaataggaggcctcgccgcctgtttgggagatcatcagagaggaagaacccactcaaccttcagtttgagcgtcaagtagctcgcctcgaggcaaggcagcagcaacagaggtgtgttattgtgacagttattcccttcaatttctgttacgacttcaaatcactatcgctcaccgagagtgcaagtgaggatccttcatctcgacctacatctccagaagagaaccctgaaacatcgtcctcaccatcgattttgttcctgcaccttaatgctcaagatgtatctcacagaagatggcaggataattcatcaaggctactggaagataagcccacaacatccaatagcatgtctgattcagatttcttagtcaacagctttaccaagccgagtgataatgcaaggccatcaagaaggaagagcaaaaagaaaagcaagaaacacaggcaacgctgtaggaagccgactgatggatctgaagctaaattcagagagggcaatggtgctgcctctgcagctgatgttggtgattgtgaagattcgacactttcgcctaagcatgttggtgacatacgctttgaggaaacttctcccagttcttctgtcaaggaagcttctgaagaggctcctgagagtgatgatgatgagtaccattgctgctcaggtggttcagtttcgagtgcgtcctactgtgatgagatggaactgtccaaatcaacaacttcgtgccctgcattgtgtggacaatgtcctagcagtaacttacagtatttggacaacactcaaaattctgcaccaacaggtccatctcaagaaacttgctatgctggcagtaaagcgaactgtaaccatgataccaagtccctgtttatattcagaaatgaacgtggatctgatccttgtgaggcaacagagttttgcagctctagcagtggatttgatgagaactggatagagaagtttgactatgatagtggcatttgttcgccaaaaagtgttggtacatatggtggagaccaggctgcccacttgtgcagtgacacaactggtgacaatgatttctgtcttgtaatatctagaaagagggccagaaaggagaagaaaatgtcattgtggaagagttatggagcgcatgcatccacacctgcacttgatcgaaataaaaaatatgttggccattcttcaatgcagatgaccaacgaattcaacagtaacgactggtcccatagacaaaatcatgttagcaggatacaccctcagcatggaaatgcactgaaaagctccaccaaaaatttcatgcagaggccaagcattggttgcagggagactcaatatgggtttccagctaaagaatccaagttaggagcaagtctcaatcattctacaggtccaagagaaaaaacttgtggaaaattaactggcggttttgataagacagcacaacagctttatttggacagagacctatccaatgctcttaacagcagtgaatcaatacgttgtgagacgagatcaatttcctcttctgaaccgacaactccaaagtctttaaaaggcaattatacttcagagtctggtgaatcaacagatattacaataggagctcttcccatgcagaaaagaagattgcaggatttagttcgaactgatgatgccagtgaaactatttctgggcgatcatcaccttgttctgagtcatcgacaactgaattaattgctggacatagtacagattcatctattgaagggaaccatggctgtcaagggctctgtaactctagaacacatctagcccagatgctcagggttgtaaacgatgcctgtaaagttcaggttggtgcagatgttctccttgctgctggttatccaatttctgatcttgagaaatttatatgctctgcaactcccgttattggtcgtgcaccttgcatgataagcaacacttgttcattggaccaagtagttagtgactcagtttgtcagcatgacatctctaatgtttccttgaggagaatatgggagtggtatgaagagccagggtgctatggattggaagtaaaagctcttagcaatctcagctctaaaacatccagcagcagcagttcagagttctttgcatactttgtgccttatctatctgctattcagttgtttgggttgtctaggaataacatgcatcacagttttggtgtgcaagggagggaattactgatatcatcaaatactgcaagctctatgagctctcatcctgtgcatgcaaaagcgcatacactgcttgaggaaagtaatgcatgcttgccagagtcatctttagttgtagaagatcctggagaactcatatttgagtactttgaaacagagcaaccttctctccggcctccattatttgaaaagatcaaggagcttgttagcagtgcaaatgtttctgaccaccgggtttttggggacactgaaaaattgcaaaatgcgaaattgtgtgagcttcatccagcttcctggttctgtgttgcctggtatcctgtttatcgtgtgcctcgtgggaatttccgtgcggcatttcttacttatcattcactggggaagttggttcataaaaaatgctccatggatacgaatgacgggcatacacaagtagtttcaccagttgttggtctccagagttacaacgacaagggagagcagtggtttcagctgagatgcccagatttgaagcaattgccaatagaagattctttaaaaaccagtcctgctgaagttcataaagagaggctgaggacgctgaagatgggtgcattggccatggcaagagctgttgtcccaaagggaagtggggagtcggtgaaccaccatcctgattacgagttcttcctgtctcgttgcgcctaggctaagcggttgtgatatgaaggaagaggggcttttctgcttctagctcctgaatgtagtagtgaccatgaaaatgaaaaaaaaacccagagtagtgactaaccagagaccggctatagatacagtttatcttagagagaggagagcctggggtgatgcatatcactgactgtataggagatagactcgaatattagatactctaacctgattccggattaccaatgcaaaccaagttggtgagctgttgaagtatggcagtacccgcgggatgggtgctttattggggctgggggcaaagatgagaagataccacagatgagatgacgctgcaggtgttcatcttttgtacaaagaccacaccagaggagcagcaagaaatttgctaccagcaagaaatttgttaacacatttgcgaggttgggcttttgttgtggcttgtttgctttgcagacttgcagtgttgctgtttctaatcatgatactgtgctgcttctgtttctaatcatgatattgtacatgaatgtgtcaacgtctggtgctgtgctgctagcaaacgcaagtgaaagcgtgcgagtaattagaggcgtgcaacctc

SEQ ID NO: 41378 - DNA, 3756 bp, Zea Mays
cacaatttgtttttctctccctacctaccacaggcacaggcacagcccacccacgggagggaaggataaggattcatgcgaaatgccacctgaacttggaatgtcttctagaactgttgctggtgctgttgtaaataggaggcctcgccgcctgtttgggagatcatcagagaggaagaacccactcaaccttcagtttgagcgtcaagtagctcgcctcgaggcaaggcagcagcaacagagattgcagaaaaaaatgtttgcaacaaagaattttacggtccacctggaagcaaaatgccattctaatgtttttcctctgccaatccttggtcggttatcctttgttaattaataattgtggtattcacttacttgccaggtgtgttattgtgacagttattcccttcaatttctgttacgacttcaaatcactatcgctcaccgagagtgcaagtgaggatccttcatctcgacctacatctccagaagagaaccctgaaacatcgtcctcaccatcgattttgttcctgcaccttaatgctcaagatgtatctcacagaagatggcaggataattcatcaaggctactggaagataagcccacaacatccaatagcatgtctgattcagatttcttagtcaacagctttaccaagccgagtgataatgcaaggccatcaagaaggaagagcaaaaagaaaagcaagaaacacaggcaacgctgtaggaagccgactgatggatctgaagctaaattcagagagggcaatggtgctgcctctgcagctgatgttggtgattgtgaagattcgacactttcgcctaagcatgttggtgacatacgctttgaggaaacttctcccagttcttctgtcaaggaagcttctgaagaggctcctgagagtgatgatgatgagtaccattgctgctcaggtggttcagtttcgagtgcgtcctactgtgatgagatggaactgtccaaatcaacaacttcgtgccctgcattgtgtggacaatgtcctagcagtaacttacagtatttggacaacactcaaaattctgcaccaacaggtccatctcaagaaacttgctatgctggcagtaaagcgaactgtaaccatgataccaagtccctgtttatattcagaaatgaacgtggatctgatccttgtgaggcaacagagttttgcagctctagcagtggatttgatgagaactggatagagaagtttgactatgatagtggcatttgttcgccaaaaagtgttggtacatatggtggagaccaggctgcccacttgtgcagtgacacaactggtgacaatgatttctgtcttgtaatatctagaaagagggccagaaaggagaagaaaatgtcattgtggaagagttatggagcgcatgcatccacacctgcacttgatcgaaataaaaaatatgttggccattcttcaatgcagatgaccaacgaattcaacagtaacgactggtcccatagacaaaatcatgttagcaggatacaccctcagcatggaaatgcactgaaaagctccaccaaaaatttcatgcagaggccaagcattggttgcagggagactcaatatgggtttccagctaaagaatccaagttaggagcaagtctcaatcattctacaggtccaagagaaaaaacttgtggaaaattaactggcggttttgataagacagcacaacagctttatttggacagagacctatccaatgctcttaacagcagtgaatcaatacgttgtgagacgagatcaatttcctcttctgaaccgacaactccaaagtctttaaaaggcaattatacttcagagtctggtgaatcaacagatattacaataggagctcttcccatgcagaaaagaagattgcaggatttagttcgaactgatgatgccagtgaaactatttctgggcgatcatcaccttgttctgagtcatcgacaactgaattaattgctggacatagtacagattcatctattgaagggaaccatggctgtcaagggctctgtaactctagaacacatctagcccagatgctcagggttgtaaacgatgcctgtaaagttcaggttggtgcagatgttctccttgctgctggttatccaatttctgatcttgagaaatttatatgctctgcaactcccgttattggtcgtgcaccttgcatgataagcaacacttgttcattggaccaagtagttagtgactcagtttgtcagcatgacatctctaatgtttccttgaggagaatatgggagtggtatgaagagccagggtgctatggattggaagtaaaagctcttagcaatctcagctctaaaacatccagcagcagcagttcagagttctttgcatactttgtgccttatctatctgctattcagttgtttgggttgtctaggaataacatgcatcacagttttggtgtgcaagggagggaattactgatatcatcaaatactgcaagctctatgagctctcatcctgtgcatgcaaaagcgcatacactgcttgaggaaagtaatgcatgcttgccagagtcatctttagttgtagaagatcctggagaactcatatttgagtactttgaaacagagcaaccttctctccggcctccattatttgaaaagatcaaggagcttgttagcagtgcaaatgtttctgaccaccgggtttttggggacactgaaaaattgcaaaatgcgaaattgtgtgagcttcatccagcttcctggttctgtgttgcctggtatcctgtttatcgtgtgcctcgtgggaatttccgtgcggcatttcttacttatcattcactggggaagttggttcataaaaaatgctccatggatacgaatgacgggcatacacaagtagtttcaccagttgttggtctccagagttacaacgacaagggagagcagtggtttcagctgagatgcccagatttgaagcaattgccaatagaagattctttaaaaaccagtcctgctgaagttcataaagagaggctgaggacgctgaagatgggtgcattggccatggcaagagctgttgtcccaaagggaagtggggagtcggtgaaccaccatcctgattacgagttcttcctgtctcgttgcgcctaggctaagcggttgtgatatgaaggaagaggggcttttctgcttctagctcctgaatgtagtagtgaccatgaaaatgaaaaaaaaacccagagtagtgactaaccagagaccggctatagatacagtttatcttagagagaggagagcctggggtgatgcatatcactgactgtataggagatagactcgaatattagatactctaacctgattccggattaccaatgcaaaccaagttggtgagctgttgaagtatggcagtacccgcgggatgggtgctttattggggctgggggcaaagatgagaagataccacagatgagatgacgctgcaggtgttcatcttttgtacaaagaccacaccagaggagcagcaagaaatttgctaccagcaagaaatttgttaacacatttgcgaggttgggcttttgttgtggcttgtttgctttgcagacttgcagtgttgctgtttctaatcatgatactgtgctgcttctgtttctaatcatgatattgtacatgaatgtgtcaacgtctggtgctgtgctgctagcaaacgcaagtgaaagcgtgcgagtaattagaggcgtgcaacctc

SEQ ID NO: 41379 - DNA, 3585 bp, Zea Mays
ggcacaggcacagcccacccacgggagggaaggataaggattcatgcgaaatgccacctgaacttggaatgtcttctagaactgttgctggtgctgttgtaaataggaggcctcgccgcctgtttgggagatcatcagagaggaagaacccactcaaccttcagtttgagcgtcaagtagctcgcctcgaggcaaggcagcagcaacagaggtgtgttattgtgacagttattcccttcaatttctgttacgacttcaaatcactatcgctcaccgagagtgcaagtgaggatccttcatctcgacctacatctccagaagagaaccctgaaacatcgtcctcaccatcgattttgttcctgcaccttaatgctcaagatgtatctcacagaagatggcaggataattcatcaaggctactggaagataagcccacaacatccaatagcatgtctgattcagatttcttagtcaacagctttaccaagccgagtgataatgcaaggccatcaagaaggaagagcaaaaagaaaagcaagaaacacaggcaacgctgtaggaagccgactgatggatctgaagctaaattcagagagggcaatggtgctgcctctgcagctgatgttggtgattgtgaagattcgacactttcgcctaagcatgttggtgacatacgctttgaggaaacttctcccagttcttctgtcaaggaagcttctgaagaggctcctgagagtgatgatgatgagtaccattgctgctcaggtggttcagtttcgagtgcgtcctactgtgatgagatggaactgtccaaatcaacaacttcgtgccctgcattgtgtggacaatgtcctagcagtaacttacagtatttggacaacactcaaaattctgcaccaacaggtccatctcaagaaacttgctatgctggcagtaaagcgaactgtaaccatgataccaagtccctgtttatattcagaaatgaacgtggatctgatccttgtgaggcaacagagttttgcagctctagcagtggatttgatgagaactggatagagaagtttgactatgatagtggcatttgttcgccaaaaagtgttggtacatatggtggagaccaggctgcccacttgtgcagtgacacaactggtgacaatgatttctgtcttgtaatatctagaaagagggccagaaaggagaagaaaatgtcattgtggaagagttatggagcgcatgcatccacacctgcacttgatcgaaataaaaaatatgttggccattcttcaatgcagatgaccaacgaattcaacagtaacgactggtcccatagacaaaatcatgttagcaggatacaccctcagcatggaaatgcactgaaaagctccaccaaaaatttcatgcagaggccaagcattggttgcagggagactcaatatgggtttccagctaaagaatccaagttaggagcaagtctcaatcattctacaggtccaagagaaaaaacttgtggaaaattaactggcggttttgataagacagcacaacagctttatttggacagagacctatccaatgctcttaacagcagtgaatcaatacgttgtgagacgagatcaatttcctcttctgaaccgacaactccaaagtctttaaaaggcaattatacttcagagtctggtgaatcaacagatattacaataggagctcttcccatgcagaaaagaagattgcaggatttagttcgaactgatgatgccagtgaaactatttctgggcgatcatcaccttgttctgagtcatcgacaactgaattaattgctggacatagtacagattcatctattgaagggaaccatggctgtcaagggctctgtaactctagaacacatctagcccagatgctcagggttgtaaacgatgcctgtaaagttcaggttggtgcagatgttctccttgctgctggttatccaatttctgatcttgagaaatttatatgctctgcaactcccgttattggtcgtgcaccttgcatgataagcaacacttgttcattggaccaagtagttagtgactcagtttgtcagcatgacatctctaatgtttccttgaggagaatatgggagtggtatgaagagccagggtgctatggattggaagtaaaagctcttagcaatctcagctctaaaacatccagcagcagcagttcagagttctttgcatactttgtgccttatctatctgctattcagttgtttgggttgtctaggaataacatgcatcacagttttggtgtgcaagggagggaattactgatatcatcaaatactgcaagctctatgagctctcatcctgtgcatgcaaaagcgcatacactgcttgaggaaagtaatgcatgcttgccagagtcatctttagttgtagaagatcctggagaactcatatttgagtactttgaaacagagcaaccttctctccggcctccattatttgaaaagatcaaggagcttgttagcagtgcaaatgtttctgaccaccgggtttttggggacactgaaaaattgcaaaatgcgaaattgtgtgagcttcatccagcttcctggttctgtgttgcctggtatcctgtttatcgtgtgcctcgtgggaatttccgtgcggcatttcttacttatcattcactggggaagttggttcataaaaaatgctccatggatacgaatgacgggcatacacaagtagtttcaccagttgttggtctccagagttacaacgacaagggagagcagtggtttcagctgagatgcccagatttgaagcaattgccaatagaagattctttaaaaaccagtcctgctgaagttcataaagagaggctgaggacgctgaagatgggtgcattggccatggcaagagctgttgtcccaaagggaagtggggagtcggtgaaccaccatcctgattacgagttcttcctgtctcgttgcgcctaggctaagcggttgtgatatgaaggaagaggggcttttctgcttctagctcctgaatgtagtagtgaccatgaaaatgaaaaaaaaacccagagtagtgactaaccagagaccggctatagatacagtttatcttagagagaggagagcctggggtgatgcatatcactgactgtataggagatagactcgaatattagatactctaacctgattccggattaccaatgcaaaccaagttggtgagctgttgaagtatggcagtacccgcgggatgggtgctttattggggctgggggcaaagatgagaagataccacagatgagatgacgctgcaggtgttcatcttttgtacaaagaccacaccagaggagcagcaagaaatttgctaccagcaagaaatttgttaacacatttgcgaggttgggcttttgttgtggcttgtttgctttgcagacttgcagtgttgctgtttctaatcatgatactgtgctgcttctgtttctaatcatgatattgtacatgaatgtgtcaacgtctggtgctgtgctgctagcaaacgcaagtgaaagcgtgcgagtaattagaggcgtgcaacctc

SEQ ID NO: 41380 - DNA, 1134 bp, Zea Mays
tatgaattatggcctaaagcaagagaacttattttgtgcccatgatcaaggagcttgttagcagtgcaaatgtttctgaccaccgggtttttggggacactgaaaaattgcaaaatgcgaaattgtgtgagcttcatccagcttcctggttctgtgttgcctggtatcctgtttatcgtgtgcctcgtgggaatttccgtgcggcatttcttacttatcattcactggggaagttggttcataaaaaatgctccatggatacgaatgacgggcatacacaagtagtttcaccagttgttggtctccagagttacaacgacaagggagagcagtggtttcagctgagatgcccagatttgaagcaattgccaatagaagattctttaaaaaccagtcctgctgaagttcataaagagaggctgaggacgctgaagatgggtgcattggccatggcaagagctgttgtcccaaagggaagtggggagtcggtgaaccaccatcctgattacgagttcttcctgtctcgttgcgcctaggctaagcggttgtgatatgaaggaagaggggcttttctgcttctagctcctgaatgtagtagtgaccatgaaaatgaaaaaaaaacccagagtagtgactaaccagagaccggctatagatacagtttatcttagagagaggagagcctggggtgatgcatatcactgactgtataggagatagactcgaatattagatactctaacctgattccggattaccaatgcaaaccaagttggtgagctgttgaagtatggcagtacccgcgggatgggtgctttattggggctgggggcaaagatgagaagataccacagatgagatgacgctgcaggtgttcatcttttgtacaaagaccacaccagaggagcagcaagaaatttgctaccagcaagaaatttgttaacacatttgcgaggttgggcttttgttgtggcttgtttgctttgcagacttgcagtgttgctgtttctaatcatgatactgtgctgcttctgtttctaatcatgatattgtacatgaatgtgtcaacgtctggtgctgtgctgctagcaaacgcaagtgaaagcgtgcgagtaattagaggcgtgcaacctc

SEQ ID NO: 41381 - DNA, 1289 bp, Zea Mays
agagattagaaacgaaattaggaaagggtaagagaagaaaaaggaaggagattagacgtacacgacaaagagacgaagacagtgtggaggggaggcagggtagcccccgcggcgccgctccgctcgaaatccccaaaaaggcaagatcaaatcaaatcagatctctccacccccagcccatccatggcgatcgtgtacgccctggtcgcgcggggcacggtggtgctggccgagttcgccgccgtctcgggcaacgccggcgccgtggcccgtcggatcctcgagaagctgccgcccgacgccgagtccaggctgtgcttcgcgcaggaccggaaggatcccctttctctacctggaggacatccaaatgaggttcatgaaaaactacggcagagtcgcccactctgcgctggcttacgccatgaacgatgagttctccagagtgctccatcagcaaatggagttcttctccagcaacccaagcgccgacacactcaaccgtctccgtggagaagtcagcgagatacacaccgtcatggtcgacaacatagagaaaattcttgacagaggcgatcgcatctcgctccttgtcgacaagacatccaccatgcaagacagcgcctttcacttccgcaagcaatccaagaggctccgtagagctctttggatgaagaatgccaagcttctagttgtgttgacagttgtcatagtagtgctgctctacttgatcatttctgctttctgtggaggcctttccttgtcatcatgcagatcatgagtaacacaccagatggctttgcccctcccttaaatggagggtagaacaccatggaatgatgcctgctgtgttgagcaccggagcttccggaggcaaaaaaaaaaggagatcgatggataccactgtggtttccagtaacttggatcagtttgtacagtggacgagtggagttggccgttgctgtttttgatgtcgccatggttgtgggtgaactcaaaccttaaatcgtggtgtgcttagcatctttcttggcgtgtcaaactgtcgttgtgacttgtgagggatgggactagtgagttgggttttgtagagttacttggttatcaatgtgcagacatatatgtatgccgcgatgagtgttagtacatgcctactatggttatcggtgtacgaaagtgtcttagctgctgttgtttgagactgccatggatggatgtggttgtgttttgaaggagctgcccttgtggccatgtgatgaataaaagcacgtaaagcaagcagactagcagag

SEQ ID NO: 41382 - DNA, 1339 bp, Zea Mays
agagattagaaacgaaattaggaaagggtaagagaagaaaaaggaaggagattagacgtacacgacaaagagacgaagacagtgtggaggggaggcagggtagcccccgcggcgccgctccgctcgaaatccccaaaaaggcaagatcaaatcaaatcagatctctccacccccagcccatccatggcgatcgtgtacgccctggtcgcgcggggcacggtggtgctggccgagttcgccgccgtctcgggcaacgccggcgccgtggcccgtcggatcctcgagaagctgccgcccgacgccgagtccaggctgtgcttcgcgcaggaccggtacatcttccacgtcctccgatccgacgccgccggcatcaccttcctctgaaggatcccctttctctacctggaggacatccaaatgaggttcatgaaaaactacggcagagtcgcccactctgcgctggcttacgccatgaacgatgagttctccagagtgctccatcagcaaatggagttcttctccagcaacccaagcgccgacacactcaaccgtctccgtggagaagtcagcgagatacacaccgtcatggtcgacaacatagagaaaattcttgacagaggcgatcgcatctcgctccttgtcgacaagacatccaccatgcaagacagcgcctttcacttccgcaagcaatccaagaggctccgtagagctctttggatgaagaatgccaagcttctagttgtgttgacagttgtcatagtagtgctgctctacttgatcatttctgctttctgtggaggcctttccttgtcatcatgcagatcatgagtaacacaccagatggctttgcccctcccttaaatggagggtagaacaccatggaatgatgcctgctgtgttgagcaccggagcttccggaggcaaaaaaaaaaggagatcgatggataccactgtggtttccagtaacttggatcagtttgtacagtggacgagtggagttggccgttgctgtttttgatgtcgccatggttgtgggtgaactcaaaccttaaatcgtggtgtgcttagcatctttcttggcgtgtcaaactgtcgttgtgacttgtgagggatgggactagtgagttgggttttgtagagttacttggttatcaatgtgcagacatatatgtatgccgcgatgagtgttagtacatgcctactatggttatcggtgtacgaaagtgtcttagctgctgttgtttgagactgccatggatggatgtggttgtgttttgaaggagctgcccttgtggccatgtgatgaataaaagcacgtaaagcaagcagactagcagag

SEQ ID NO: 41383 - DNA, 646 bp, Zea Mays
gctgtttctcttccttctatgaatatcgaagacattatatatagagttgtgttgacagttgtcatagtagtgctgctctacttgatcatttctgctttctgtggaggcctttccttgtcatcatgcagatcatgagtaacacaccagatggctttgcccctcccttaaatggagggtagaacaccatggaatgatgcctgctgtgttgagcaccggagcttccggaggcaaaaaaaaaaggagatcgatggataccactgtggtttccagtaacttggatcagtttgtacagtggacgagtggagttggccgttgctgtttttgatgtcgccatggttgtgggtgaactcaaaccttaaatcgtggtgtgcttagcatctttcttggcgtgtcaaactgtcgttgtgacttgtgagggatgggactagtgagttgggttttgtagagttacttggttatcaatgtgcagacatatatgtatgccgcgatgagtgttagtacatgcctactatggttatcggtgtacgaaagtgtcttagctgctgttgtttgagactgccatggatggatgtggttgtgttttgaaggagctgcccttgtggccatgtgatgaataaaagcacgtaaagcaagcagactagcagag

SEQ ID NO: 41384 - DNA, 2217 bp, Zea Mays
tcagcgtccattctccatggccatcgtcgtcgtcgtcttccacaatccaatcggtgctcaccccgccggccggccggccggagcacctctataaatactagcctagggtaccccggaccggccggccggccggctgcacgcacgcatcctccgcctgccgcacccgccaccgcaagaagagggttcaaaatactcaagatggctccgccggcacggccgccacgtgctggggaggacttggaggagggcacaggcgagagctccccacctcctcggtcgccacgtgcgtccaaccccgactgccacgaggtgcagaggaagatctgcgagcgcctccgccagacggggcggcacgaccgtacgctcgccgaccccaccttcaacgcccgcttcgcccgccacctcgagaggttgccgcggaggtacctactcgacctcgacctggacgacaagctcgaggatgtcttgctgcactgggggattctcgacgagtgcgccgaccccaataagcgacccgtctttcgcgcgcggttcataaagtataagacagttcctagggaggatgacggcattggtcatgatcaagatcacgaggagccgtgtcaaaagttgttggaggacctcagtttggaaagaagaaagatcgcggacagaaatgattccctgtctatctcctctaggggcgatttgaaaactgtcctccttcatgagatcattttctcctccatcgacaagcccaagctcctaagtcggctaactgcgttgctctctgaggttggactgaatatccaggaagctcatgtgtactccacgaaggatggtttttgtttggatgtttttgttgttgatggctggaagacagaggagactgatgagctgatcgcggcgattaaggagacattaacacaaaaaaatgcatcaccatctaattcaacaaattcttcgacgccggagaaaatagttgacctacaacaacaggttggagattatgaaattgacttaagcatgctaactaggggggacaagatcgcatctggatcatccgcagactttggtgttaatcatgaaaatattctgcaattttatggggcatgcacaaaacatccaaactattgcattgtaacagaatacatgcctggagggaatatatatgactttcttcacaagcaaaataacttcttggacctccataaaattctaagatttgctatcgatatctcaaaaggaatggattatctgcaccagaataacattatacacagagatttgaagtctgcaaatcttctgctaggccatgaccaagttgttaagatcgcagactttggtgtggcgcgacatggaagtcagcaggggcagatgactgctgaaactggaacctaccgatggatggcaccagagataattaatcataagccgtatgaccacaaagcggatgtattcagctttgccattgttctttgggagctggcaacttcaatggtcccatatgacaacatgacacccttgcaagctgcattaggagtaagacagggattgcgcttggacattccgggcagcgtgcacccaagattgaccaagctgattcgacagtgctggaacgaagatcctgatgcgcgtctgacttttgcagagattactaaagaactccaagatagtctacaccatatcgaggcacccaagggagccagccgtcgatctagagcaaagatgcagaagaaataagagggcaaggtttcctacttttttttgggtgtgttacactagttgcagtatgagtgtttaaggtgtatgtcgcggttataaatattttaaggccaaggaagtgttaaaaaccgaccttagctcagttggtagagcggaggactgtagtggattgcagatgaaatccttaggtcgctggttcgaatccggcaggtcggagttgtttttaaaataacatttttttgctcaacaatgttaggctactcgcctactcacctgtcgctactctgtactcactacggttaaagtcgtgctctttttcttaacatttttacaaatgtcattttgcacaaaaaaaggaaaaaggggatgcatatgtggtcacattattatttgcataaaagccatgcagatcaatattcaggaacagaaaggccaaacgcctgcgaaagttgttgtgagagaccgttgcttaataaaaggcaaaacagaatgtaactatcccgtgaacaaaaa

SEQ ID NO: 41385 - DNA, 2295 bp, Zea Mays
atggccatcgtcgtcgtcgtcttccacaatccaatcggtgctcaccccgccggccggccggccggagcacctctataaatactagcctagggtaccccggaccggccggccggccggctgcacgcacgcatcctccgcctgccgcacccgccaccgcaagaagagggttcaaaatactcaagatggctccgccggcacggccgccacgtgctggggaggacttggaggagggcacaggcgagagctccccacctcctcggtcgccacgtgcgtccaaccccgactgccacgaggtgcagaggaagatctgcgagcgcctccgccagacggggcggcacgaccgtacgctcgccgaccccaccttcaacgcccgcttcgcccgccacctcgagaggttgccgcggaggtacctactcgacctcgacctggacgacaagctcgaggatgtcttgctgcactgggggattctcgacgagtgcgccgaccccaataagcgacccgtctttcgcgcgcggttcataaagtataagacagttcctagggaggatgacggcattggtcatgatcaagatcacgaggagccgtgtcaaaagttgttggaggacctcagtttggaaagaagaaagatcgcggacagaaatgattccctgtctatctcctctaggggcgatttgaaaactgtcctccttcatgagatcattttctcctccatcgacaagcccaagctcctaagtcggctaactgcgttgctctctgaggttggactgaatatccaggaagctcatgtgtactccacgaaggatggtttttgtttggatgtttttgttgttgatggctggaagacagaggagactgatgagctgatcgcggcgattaaggagacattaacacaaaaaaatgcatcaccatctaattcaacaaattcttcgacgccggagaaaatagttgacctacaacaacaggttggagattatgaaattgacttaagcatgctaactaggggggacaagatcgcatctggatcatccgcagacttatatcgaggaacttataaaggccatgatgttgctatcaagtgtctcagatctctatatctcaacaatccttcagaagttgagtttctgcaggaatggtgttaatcatgaaaatattctgcaattttatggggcatgcacaaaacatccaaactattgcattgtaacagaatacatgcctggagggaatatatatgactttcttcacaagcaaaataacttcttggacctccataaaattctaagatttgctatcgatatctcaaaaggaatggattatctgcaccagaataacattatacacagagatttgaagtctgcaaatcttctgctaggccatgaccaagttgttaagatcgcagactttggtgtggcgcgacatggaagtcagcaggggcagatgactgctgaaactggaacctaccgatggatggcaccagagataattaatcataagccgtatgaccacaaagcggatgtattcagctttgccattgttctttgggagctggcaacttcaatggtcccatatgacaacatgacacccttgcaagctgcattaggagtaagacagggattgcgcttggacattccgggcagcgtgcacccaagattgaccaagctgattcgacagtgctggaacgaagatcctgatgcgcgtctgacttttgcagagattactaaagaactccaagatagtctacaccatatcgaggcacccaagggagccagccgtcgatctagagcaaagatgcagaagaaataagagggcaaggtttcctacttttttttgggtgtgttacactagttgcagtatgagtgtttaaggtgtatgtcgcggttataaatattttaaggccaaggaagtgttaaaaaccgaccttagctcagttggtagagcggaggactgtagtggattgcagatgaaatccttaggtcgctggttcgaatccggcaggtcggagttgtttttaaaataacatttttttgctcaacaatgttaggctactcgcctactcacctgtcgctactctgtactcactacggttaaagtcgtgctctttttcttaacatttttacaaatgtcattttgcacaaaaaaaggaaaaaggggatgcatatgtggtcacattattatttgcataaaagccatgcagatcaatattcaggaacagaaaggccaaacgcctgcgaaagttgttgtgagagaccgttgcttaataaaaggcaaaacagaatgtaactatcccgtgaacaaaaa

SEQ ID NO: 41386 - DNA, 2132 bp, Zea Mays
atggccatcgtcgtcgtcgtcttccacaatccaatcggccggccggctgcacgcacgcatcctccgcctgccgcacccgccaccgcaagaagagggttcaaaatactcaagatggctccgccggcacggccgccacgtgctggggaggacttggaggagggcacaggcgagagctccccacctcctcggtcgccacgtgcgtccaaccccgactgccacgaggtgcagaggaagatctgcgagcgcctccgccagacggggcggcacgaccgtacgctcgccgaccccaccttcaacgcccgcttcgcccgccacctcgagaggttgccgcggaggtacctactcgacctcgacctggacgacaagctcgaggatgtcttgctgcactgggggattctcgacgagtgcgccgaccccaataagcgacccgtctttcgcgcgcggttcataaagtataagacagttcctagggaggatgacggcattggtcatgatcaagatcacgaggagccgtgtcaaaagttgttggaggacctcagtttggaaagaagaaagatcgcggacagaaatgattccctgtctatctcctctaggggcgatttgaaaactgtcctccttcatgagatcattttctcctccatcgacaagcccaagctcctaagtcggctaactgcgttgctctctgaggttggactgaatatccaggaagctcatgtgtactccacgaaggatggtttttgtttggatgtttttgttgttgatggctggaagacagaggagactgatgagctgatcgcggcgattaaggagacattaacacaaaaaaatgcatcaccatctaattcaacaaattcttcgacgccggagaaaatagttgacctacaacaacaggttggagattatgaaattgacttaagcatgctaactaggggggacaagatcgcatctggatcatccgcagacttgttggtgttaatcatgaaaatattctgcaattttatggggcatgcacaaaacatccaaactattgcattgtaacagaatacatgcctggagggaatatatatgactttcttcacaagcaaaataacttcttggacctccataaaattctaagatttgctatcgatatctcaaaaggaatggattatctgcaccagaataacattatacacagagatttgaagtctgcaaatcttctgctaggccatgaccaagttgttaagatcgcagactttggtgtggcgcgacatggaagtcagcaggggcagatgactgctgaaactggaacctaccgatggatggcaccagagataattaatcataagccgtatgaccacaaagcggatgtattcagctttgccattgttctttgggagctggcaacttcaatggtcccatatgacaacatgacacccttgcaagctgcattaggagtaagacagggattgcgcttggacattccgggcagcgtgcacccaagattgaccaagctgattcgacagtgctggaacgaagatcctgatgcgcgtctgacttttgcagagattactaaagaactccaagatagtctacaccatatcgaggcacccaagggagccagccgtcgatctagagcaaagatgcagaagaaataagagggcaaggtttcctacttttttttgggtgtgttacactagttgcagtatgagtgtttaaggtgtatgtcgcggttataaatattttaaggccaaggaagtgttaaaaaccgaccttagctcagttggtagagcggaggactgtagtggattgcagatgaaatccttaggtcgctggttcgaatccggcaggtcggagttgtttttaaaataacatttttttgctcaacaatgttaggctactcgcctactcacctgtcgctactctgtactcactacggttaaagtcgtgctctttttcttaacatttttacaaatgtcattttgcacaaaaaaaggaaaaaggggatgcatatgtggtcacattattatttgcataaaagccatgcagatcaatattcaggaacagaaaggccaaacgcctgcgaaagttgttgtgagagaccgttgcttaataaaaggcaaaacagaatgtaactatcccgtgaacaaaaa

SEQ ID NO: 41387 - DNA, 2731 bp, Zea Mays
atggccatcgtcgtcgtcgtcttccacaatccaatcggccggccggctgcacgcacgcatcctccgcctgccgcacccgccaccgcaagaagagggttcaaaatactcaagatggctccgccggcacggccgccacgtgctggggaggacttggaggagggcacaggcgagagctccccacctcctcggtcgccacgtgcgtccaaccccgactgccacgaggtgcagaggaagatctgcgagcgcctccgccagacggggcggcacgaccgtacgctcgccgaccccaccttcaacgcccgcttcgcccgccacctcgagaggttgccgcggaggtacctactcgacctcgacctggacgacaagctcgaggatgtcttgctgcactgggggattctcgacgagtgcgccgaccccaataagcgacccgtctttcgcgcgcggttcataaagtataagacagttcctagggaggatgacggcattggtcatgatcaagatcacgaggagccgtgtcaaaagttgttggaggacctcagtttggaaagaagaaagatcgcggacagaaatgattccctgtctatctcctctaggggcgatttgaaaactgtcctccttcatgagatcattttctcctccatcgacaagcccaagctcctaagtcggctaactgcgttgctctctgaggttggactgaatatccaggaagctcatgtgtactccacgaaggatggtttttgtttggatgtttttgttgttgatggctggaagacagaggagactgatgagctgatcgcggcgattaaggagacattaacacaaaaaaatgcatcaccatctaattcaacaaattcttcgacgccggagaaaatagttgacctacaacaacaggttggagattatgaaattgacttaagcatgctaactaggggggacaagatcgcatctggatcatccgcagacttatatcgaggaacttataaaggccatgatgttgctatcaagtgtctcagatctctatatctcaacaatccttcagaagttgagtttctgcaggaagtacttattctaagtggtgttaatcatgaaaatattctgcaattttatggggcatgcacaaaacatccaaactattgcattgtaacagaatacatgcctggagggaatatatatgactttcttcacaagcaaaataacttcttggacctccataaaattctaagatttgctatcgatatctcaaaaggaatggattatctgcaccagaataacattatacacagagatttgaagtctgcaaatcttctgctaggccatgaccaagttgttaagatcgcagactttggtgtggcgcgacatggaagtcagcaggggcagatgactgctgaaactggaacctaccgatggatggcaccagaggttagcaagtattgattcaagtgttgcatgtgaacttgagtttcctccggacttgtttggtgacaaggaaacccctccaatccccctcaattcccttgtcaccaaaggagctgttcaagagaattcttttcatctccaaggtttggtctagatgaatagaatgatttagcatgacattttgttagactctttgactctttagaagactattttaaactccttgaaattcagggcccaacccggcaaattggtttacatgtacgctttaattcatttttatttgttccacggtttaacattcagcagatgtgtttccattcttttcactgaaacaaacaggcaaacaaatgaagtttattttgtatctctatgtctcaggttcaggaagttctgttcccaaagataacaaatcctcttaccccccttaaaaaaagtttctaccttgaacattgtatttgaatagcgtgctcataagagtcggttgtcttgacagataattaatcataagccgtatgaccacaaagcggatgtattcagctttgccattgttctttgggagctggcaacttcaatggtcccatatgacaacatgacacccttgcaagctgcattaggagtaagacagggattgcgcttggacattccgggcagcgtgcacccaagattgaccaagctgattcgacagtgctggaacgaagatcctgatgcgcgtctgacttttgcagagattactaaagaactccaagatagtctacaccatatcgaggcacccaagggagccagccgtcgatctagagcaaagatgcagaagaaataagagggcaaggtttcctacttttttttgggtgtgttacactagttgcagtatgagtgtttaaggtgtatgtcgcggttataaatattttaaggccaaggaagtgttaaaaaccgaccttagctcagttggtagagcggaggactgtagtggattgcagatgaaatccttaggtcgctggttcgaatccggcaggtcggagttgtttttaaaataacatttttttgctcaacaatgttaggctactcgcctactcacctgtcgctactctgtactcactacggttaaagtcgtgctctttttcttaacatttttacaaatgtcattttgcacaaaaaaaggaaaaaggggatgcatatgtggtcacattattatttgcataaaagccatgcagatcaatattcaggaacagaaaggccaaacgcctgcgaaagttgttgtgagagaccgttgcttaataaaaggcaaaacagaatgtaactatcccgtgaacaaaaa

SEQ ID NO: 41388 - DNA, 2289 bp, Zea Mays
atggccatcgtcgtcgtcgtcttccacaatccaatcggtgctcaccccgccggccggccggccggagcacctctataaatactagcctagggtaccccggaccggccggccggccggctgcacgcacgcatcctccgcctgccgcacccgccaccgcaagaagagggttcaaaatactcaagatggctccgccggcacggccgccacgtgctggggaggacttggaggagggcacaggcgagagctccccacctcctcggtcgccacgtgcgtccaaccccgactgccacgaggtgcagaggaagatctgcgagcgcctccgccagacggggcggcacgaccgtacgctcgccgaccccaccttcaacgcccgcttcgcccgccacctcgagaggttgccgcggaggtacctactcgacctcgacctggacgacaagctcgaggatgtcttgctgcactgggggattctcgacgagtgcgccgaccccaataagcgacccgtctttcgcgcgcggttcataaagtataagacagttcctagggaggatgacggcattggtcatgatcaagatcacgaggagccgtgtcaaaagttgttggaggacctcagtttggaaagaagaaagatcgcggacagaaatgattccctgtctatctcctctaggggcgatttgaaaactgtcctccttcatgagatcattttctcctccatcgacaagcccaagctcctaagtcggggttggactgaatatccaggaagctcatgtgtactccacgaaggatggtttttgtttggatgtttttgttgttgatggctggaagacagaggagactgatgagctgatcgcggcgattaaggagacattaacacaaaaaaatgcatcaccatctaattcaacaaattcttcgacgccggagaaaatagttgacctacaacaacaggttggagattatgaaattgacttaagcatgctaactaggggggacaagatcgcatctggatcatccgcagacttatatcgaggaacttataaaggccatgatgttgctatcaagtgtctcagatctctatatctcaacaatccttcagaagttgagtttctgcaggaagtacttattctaagtggtgttaatcatgaaaatattctgcaattttatggggcatgcacaaaacatccaaactattgcattgtaacagaatacatgcctggagggaatatatatgactttcttcacaagcaaaataacttcttggacctccataaaattctaagatttgctatcgatatctcaaaaggaatggattatctgcaccagaataacattatacacagagatttgaagtctgcaaatcttctgctaggccatgaccaagttgttaagatcgcagactttggtgtggcgcgacatggaagtcagcaggggcagatgactgctgaaactggaacctaccgatggatggcaccagagataattaatcataagccgtatgaccacaaagcggatgtattcagctttgccattgttctttgggagctggcaacttcaatggtcccatatgacaacatgacacccttgcaagctgcattaggagtaagacagggattgcgcttggacattccgggcagcgtgcacccaagattgaccaagctgattcgacagtgctggaacgaagatcctgatgcgcgtctgacttttgcagagattactaaagaactccaagatagtctacaccatatcgaggcacccaagggagccagccgtcgatctagagcaaagatgcagaagaaataagagggcaaggtttcctacttttttttgggtgtgttacactagttgcagtatgagtgtttaaggtgtatgtcgcggttataaatattttaaggccaaggaagtgttaaaaaccgaccttagctcagttggtagagcggaggactgtagtggattgcagatgaaatccttaggtcgctggttcgaatccggcaggtcggagttgtttttaaaataacatttttttgctcaacaatgttaggctactcgcctactcacctgtcgctactctgtactcactacggttaaagtcgtgctctttttcttaacatttttacaaatgtcattttgcacaaaaaaaggaaaaaggggatgcatatgtggtcacattattatttgcataaaagccatgcagatcaatattcaggaacagaaaggccaaacgcctgcgaaagttgttgtgagagaccgttgcttaataaaaggcaaaacagaatgtaactatcccgtgaacaaaaa

SEQ ID NO: 41389 - DNA, 2352 bp, Zea Mays
atggccatcgtcgtcgtcgtcttccacaatccaatcggtgctcaccccgccggccggccggccggagcacctctataaatactagcctagggtaccccggaccggccggccggccggctgcacgcacgcatcctccgcctgccgcacccgccaccgcaagaagagggttcaaaatactcaagatggctccgccggcacggccgccacgtgctggggaggacttggaggagggcacaggcgagagctccccacctcctcggtcgccacgtgcgtccaaccccgactgccacgaggtgcagaggaagatctgcgagcgcctccgccagacggggcggcacgaccgtacgctcgccgaccccaccttcaacgcccgcttcgcccgccacctcgagaggttgccgcggaggtacctactcgacctcgacctggacgacaagctcgaggatgtcttgctgcactgggggattctcgacgagtgcgccgaccccaataagcgacccgtctttcgcgcgcggttcataaagtataagacagttcctagggaggatgacggcattggtcatgatcaagatcacgaggagccgtgtcaaaagttgttggaggacctcagtttggaaagaagaaagatcgcggacagaaatgattccctgtctatctcctctaggggcgatttgaaaactgtcctccttcatgagatcattttctcctccatcgacaagcccaagctcctaagtcggctaactgcgttgctctctgaggttggactgaatatccaggaagctcatgtgtactccacgaaggatggtttttgtttggatgtttttgttgttgatggctggaagacagaggagactgatgagctgatcgcggcgattaaggagacattaacacaaaaaaatgcatcaccatctaattcaacaaattcttcgacgccggagaaaatagttgacctacaacaacaggttggagattatgaaattgacttaagcatgctaactaggggggacaagatcgcatctggatcatccgcagacttatatcgaggaacttataaaggccatgatgttgctatcaagtgtctcagatctctatatctcaacaatccttcagaagttgagtttctgcaggaagtacttattctaagtggtgttaatcatgaaaatattctgcaattttatggggcatgcacaaaacatccaaactattgcattgtaacagaatacatgcctggagggaatatatatgactttcttcacaagcaaaataacttcttggacctccataaaattctaagatttgctatcgatatctcaaaaggaatggattatctgcaccagaataacattatacacagagatttgaagtctgcaaatcttctgctaggccatgaccaagttgttaagatcgcagactttggtgtggcgcgacatggaagtcagcaggggcagatgactgctgaaactggaacctaccgatggatggcaccagagataattaatcataagccgtatgaccacaaagcggatgtattcagctttgccattgttctttgggagctggcaacttcaatggtcccatatgacaacatgacacccttgcaagctgcattaggagtaagacaggtacggatttctgtcccagatacttgccaggccaattttctagggattgcgcttggacattccgggcagcgtgcacccaagattgaccaagctgattcgacagtgctggaacgaagatcctgatgcgcgtctgacttttgcagagattactaaagaactccaagatagtctacaccatatcgaggcacccaagggagccagccgtcgatctagagcaaagatgcagaagaaataagagggcaaggtttcctacttttttttgggtgtgttacactagttgcagtatgagtgtttaaggtgtatgtcgcggttataaatattttaaggccaaggaagtgttaaaaaccgaccttagctcagttggtagagcggaggactgtagtggattgcagatgaaatccttaggtcgctggttcgaatccggcaggtcggagttgtttttaaaataacatttttttgctcaacaatgttaggctactcgcctactcacctgtcgctactctgtactcactacggttaaagtcgtgctctttttcttaacatttttacaaatgtcattttgcacaaaaaaaggaaaaaggggatgcatatgtggtcacattattatttgcataaaagccatgcagatcaatattcaggaacagaaaggccaaacgcctgcgaaagttgttgtgagagaccgttgcttaataaaaggcaaaacagaatgtaactatcccgtgaacaaaaa

SEQ ID NO: 41390 - DNA, 4665 bp, Zea Mays
atggccatcgtcgtcgtcgtcttccacaatccaatcggtgctcaccccgccggccggccggccggagcacctctataaatactagcctagggtaccccggaccggccggccggccggctgcacgcacgcatcctccgcctgccgcacccgccaccgcaagaagagggttcaaaatactcaagatggctccgccggcacggccgccacgtgctggggaggacttggaggagggcacaggcgagagctccccacctcctcggtcgccacgtgcgtccaaccccgactgccacgaggtgcagaggaagatctgcgagcgcctccgccagacggggcggcacgaccgtacgctcgccgaccccaccttcaacgcccgcttcgcccgccacctcgagaggttgccgcggaggtacctactcgacctcgacctggacgacaagctcgaggatgtcttgctgcactgggggattctcgacgagtgcgccgaccccaataagcgacccgtctttcgcgcgcggttcataaagtataagacagttcctagggaggatgacggcattggtcatgatcaagatcacgaggagccgtgtcaaaagttgttggaggacctcagtttggaaagaagaaagatcgcggacagaaatgattccctgtctatctcctctaggggcgatttgaaaactgtcctccttcatgagatcattttctcctccatcgacaagcccaagctcctaagtcggctaactgcgttgctctctgaggttggactgaatatccaggaagctcatgtgtactccacgaaggatggtttttgtttggatgtttttgttgttgatggctggaagacagaggagactgatgagctgatcgcggcgattaaggagacattaacacaaaaaaatgcatcaccatctaattcaacaaattcttcgacgccggagaaaatagttgacctacaacaacaggttggagattatgaaattgacttaagcatgctaactaggggggacaagatcgcatctggatcatccgcagacttatatcgaggaacttataaaggccatgatgttgctatcaagtgtctcagatctctatatctcaacaatccttcagaagttgagtttctgcaggaagtacttattctaaggcaagattttgctatacataattgttagactgtgtgtgtgggccggcaccactgttagactgtcgacctattagggttagggttaagtctctctctatatgtacccccttctctatgcaatacatcaagcacttcattctctcacatggtatcagattaggttttcctagccgccaccccttttcacctcagcaggacaccagccgtcagggcctgccggcgccgccgtcctcgtgaggttcatcgttccctcccgggggcgaccccctccccctggcttccccctcccgtcgaagacccttccgacgccgacactctgctcaccctcaagtcctccctcatccgcccgccgacagtggggcatagcctctgatggtccgagtcatgcctccggatctgccccgcgcctgccgttcgggccgcactggctgcctcgacccgccaccggatccgccccacacccgcgccaggccgtcgcgcccacggttccacacgcagtcgcggccccacccttgcctctgctatgtcggaggcgcgactgcccccccttccccagcctcggcgcggtggcccctccccgcggactccctccctcccggcaacgcacccgaccccgcggcggcttcccctgctgcgaccggagcggccccgcctcgtgcaacaaccgccaaggcctcacgggcgcgcgtgcagcagccgccgcgagcttgccctggtatggtcggggatcccctgcgagcccccttctcgaggctctacgacgcagcctaggacgtggtcgccgtcctcaaccgcgcggtcgtggcctagatccggcgcacgtgctccccttcgcccggccgacaagcctcctcttcctcccctggcagcggcacggatcgagtcgtcactcttcgacgcgtcctcgctcccctccccaacgtcatcgccgacgaccgtgatgaccaggctcctctgactgcaccttcacgcttcttctgtcatcgacatcacccatcccctgccaggcccggcgcaagcccctgcccggctggacccgtcccgtcgctctcccgttcatcgccttagttggatccgtcgctgccgtggccttctatgctggattcaccattgatgcgtgcgaccttcccggctagatccgtcgtccctttggttgggtcgccatcttctcggctgaatccatcgttgtcgtggccttcccggccggatccgccgctaccccttctattctgcagtgggtgcggccaccatgaccggtgcagacgcgtgcgctaccgtcggcctccctagcggggctcctcgacattcgaatgatcgaagaagctagaaggtcggccttgcggtgctcttttgttgtgtcgccctgctgcccgttgacgctagaacgtccaccgctcccgaagaataggctattgctgcgtgtctcccgaccacggccacctcaacttcggctacctcggcatccaggggctatcgtcttcttggagtccacaccggtctctactacattcgcaccttcacggcgctgcgactgcggggggatttgaacccgtcggctcctaccttcggcttctactctagtttcatcgtgtgcggtgcccccgttgcgactgcggaaggatgttagactgtgtgtgtgggccggcaccactgttgggctgccgacccatcagatggtgttaatcatgaaaatattctgcaattttatggggcatgcacaaaacatccaaactattgcattgtaacagaatacatgcctggagggaatatatatgactttcttcacaagcaaaataacttcttggacctccataaaattctaagatttgctatcgatatctcaaaaggaatggattatctgcaccagaataacattatacacagagatttgaagtctgcaaatcttctgctaggccatgaccaagttgttaagatcgcagactttggtgtggcgcgacatggaagtcagcaggggcagatgactgctgaaactggaacctaccgatggatggcaccagaggtatggttgagatcttgtttctttccctcgtggagaagtggtttgtctttcattagtatagtatagtatttcattcttttcattctgacttgtagtttattgttcatctaacagaaacttctaattgttactaaatgtggcaaaaattttatccaatcttttatatttagttaatattctatatgcaaggttagcaagtattgattcaagtgttgcatgtgaacttgagtttcctccggacttgtttggtgacaaggaaacccctccaatccccctcaattcccttgtcaccaaaggagctgttcaagagaattcttttcatctccaaggtttggtctagatgaatagaatgatttagcatgacattttgttagactctttgactctttagaagactattttaaactccttgaaattcagggcccaacccggcaaattggtttacatgtacgctttaattcatttttatttgttccacggtttaacattcagcagatgtgtttccattcttttcactgaaacaaacaggcaaacaaatgaagtttattttgtatctctatgtctcaggttcaggaagttctgttcccaaagataacaaatcctcttaccccccttaaaaaaagtttctaccttgaacattgtatttgaatagcgtgctcataagagtcggttgtcttgacagataattaatcataagccgtatgaccacaaagcggatgtattcagctttgccattgttctttgggagctggcaacttcaatggtcccatatgacaacatgacacccttgcaagctgcattaggagtaagacagggattgcgcttggacattccgggcagcgtgcacccaagattgaccaagctgattcgacagtgctggaacgaagatcctgatgcgcgtctgacttttgcagagattactaaagaactccaagatagtctacaccatatcgaggcacccaagggagccagccgtcgatctagagcaaagatgcagaagaaataagagggcaaggtttcctacttttttttgggtgtgttacactagttgcagtatgagtgtttaaggtgtatgtcgcggttataaatattttaaggccaaggaagtgttaaaaaccgaccttagctcagttggtagagcggaggactgtagtggattgcagatgaaatccttaggtcgctggttcgaatccggcaggtcggagttgtttttaaaataacatttttttgctcaacaatgttaggctactcgcctactcacctgtcgctactctgtactcactacggttaaagtcgtgctctttttcttaacatttttacaaatgtcattttgcacaaaaaaaggaaaaaggggatgcatatgtggtcacattattatttgcataaaagccatgcagatcaatattcaggaacagaaaggccaaacgcctgcgaaagttgttgtgagagaccgttgcttaataaaaggcaaaacagaatgtaactatcccgtgaacaaaaa

SEQ ID NO: 41391 - DNA, 883 bp, Zea Mays
ccaatccccctcaattcccttgtcaccaaaggagctgttcaagagaattcttttcatctccaagataattaatcataagccgtatgaccacaaagcggatgtattcagctttgccattgttctttgggagctggcaacttcaatggtcccatatgacaacatgacacccttgcaagctgcattaggagtaagacagggattgcgcttggacattccgggcagcgtgcacccaagattgaccaagctgattcgacagtgctggaacgaagatcctgatgcgcgtctgacttttgcagagattactaaagaactccaagatagtctacaccatatcgaggcacccaagggagccagccgtcgatctagagcaaagatgcagaagaaataagagggcaaggtttcctacttttttttgggtgtgttacactagttgcagtatgagtgtttaaggtgtatgtcgcggttataaatattttaaggccaaggaagtgttaaaaaccgaccttagctcagttggtagagcggaggactgtagtggattgcagatgaaatccttaggtcgctggttcgaatccggcaggtcggagttgtttttaaaataacatttttttgctcaacaatgttaggctactcgcctactcacctgtcgctactctgtactcactacggttaaagtcgtgctctttttcttaacatttttacaaatgtcattttgcacaaaaaaaggaaaaaggggatgcatatgtggtcacattattatttgcataaaagccatgcagatcaatattcaggaacagaaaggccaaacgcctgcgaaagttgttgtgagagaccgttgcttaataaaaggcaaaacagaatgtaactatcccgtgaacaaaaa

SEQ ID NO: 41392 - DNA, 714 bp, Zea Mays
atcaaatcggacatgcagcttcaggcacctcgcccgccccgaaagctcagcggttttactacattatcaagaagttggcagcagcagcggcagtagccatgggcatcctggaccacctgtcgcatctgtgcagcatcacggagacgaaggaggcgctcaagctcaggaagaagcggccgctgcagactgtgaacatcaaggtgaagatggactgcgaagggtgcgagcgccgcgtgaagagcgcggtgaagtcgatgcgcggcgtgacgagcgtggcggtgaacgccaagcagagcaagtgcacggtgaccggcaacgtggagcccgccaaggtgctggagcgcgtcaaggccaccggcaagaacgccgagatgtggccctacgtgccctacgcgctcaccacctacccctacgtcggcggcgcctacgacaagaaggcgcccgcgggattcgtccgcagcgcgccgcaggccatggcggaccccggcgcgccggagctcaagtacatgaacatgttcaacgacgacaacgtagacgcgtgcacagtcatgtagtttcttctcttcttctctttccgtggatcgatcggatatccctgtcactgtcatcaccggccggccggccggccttattattattcctactgaaaccaacgtcaattatatccgttcatgcatcttctcctccaaaaatcatttgaaaaaactcaaaaaa

SEQ ID NO: 41393 - DNA, 2651 bp, Zea Mays
atttcgggactgttcctcattcacgtgtctcctcccctcccctcccctccccttcccccatgacctgtccgtctcaatctccctcttccccgcaccaaatcgaagctacccctgttcctctgcgatttgggctcgtcctgtgtccttcctgttgctcaaaagctcgctcattcgatgtccctgtctgaaaggcgacaaatcccactggaattcggagcacagagctttgaatccaggggccaaaactttttgctcatctcccttgcggaaaagcgcctcctctgcgtctgaaagtcggatcttttttcacagattcgatttgaagttcccgagcagctcgaggaccgcggtgtcgcatagtccgtgatgttagggaaagctttggtagcttatcaagacggagccttgaggtcaggatttctggtttgcctggtctgtctggtggtcatcatagagggaaatctgttggatctgtgagtgacctgcgcgacagacctgtagtagttgatcaaagcaggtgggttggtcttcctcctgaattgcttcgagatgtaatgagaaggcttgaggaaggtgagagcaattggccatcccggaaaaatgttgttgcctgtgcagccgtctgtggaacatggagagagatatgcaaggatatagtgctgagcccggagttctgcgggaagctcacttttccagtatcacttaaacaggtaacaattaaatccagatggcaggggtggaatgttgcagacctctgttattgaatatcggcattgcagatactatttctgtgtcttaattaattatactctaacagttggataaataaatgtttgtgctgcccaaaatattatgaaccaatatactcctgtttgcatatacctgatgctgtcgaccactttatgtgtttacaaaatacttgtcgctacaacaccacaggatgccacaatgcctaaaaaccatggttacaatgctatcaagtactgacttaaggcgatttcgtatcttgcaatggagaagtagagatcagtttctgcagtataatatatatgtccacctgcagatgtttgcacccgtctaaatttgttttttcatgtatagccgggaccaagaaatggaataatccagtgtttcataaaaagggacaaatcgacatcaacttattatctttacctatgtcttagccctggtaagcatacaacatgtgcactgtttttctcattaatatccttctgaatgatcctacaaggtgacctcgaaatagagcagtaccggatttaacttctgcgtgtgccacgatgcatgcggatatacagtttcttgttccattaatgcttcttctcagttatctaacattgatgacaatggtaaatttaagaaggattagacttactctttgacacccttagtgagatcagataaactgttatcatgaataactttgcttaacgctttgatggtttggatcatctagttgtcctcagcgaggatgggaagtttctgctagcagctaagaggaatcgccgtacaacatatactgagtacatcatttctgtggatcctaaaagtatatcacgatcaagtgatggctgtgttggaaaaatgaggtcaaattttcttggcactaaattcatcgtgcatgacactcgagcaccacacaatgctgggagccttgtctcctgtgagcgcggcagccgcagaatctcctctaggagggtttcccccaaggtacccactgccagctaccccattgcccgggtgaactatgagctaaacctgcttggcacaagggggcccaggcgtatgaattgcacgatgcattccatcccagcctcaacgctggaccctcaaggcatggtgcctgagcctggccaacccaagcagatcttcgtccctggctcgtcgtccttcgaagattcctttcgcagtgcaaacaacaccccttccagctcaaggttctcggtcgcagaccgctccttggattggagctcctctcgattctcagagacgagcggattggctcagcaggacgacgatgacagtgaccaggctaaggagaggcctttggttctctgcaacaaggagccaaggtggcacgagcagctgcagtgttggtgcctcaacttccatggtcgggtgaccgtggcttctgtgaagaacttccagttgatagctgcaccacaactagattctgaaccgtcacagcaagctcagcagcaaacccagccttcgaattcgtcttcagcatcggatcatgacaaagtgatcctgcagtttggtaaggtcgccaatgacatgttcactatggactaccgatacccactctcggcattccaggccttcgccatctgtttgaccagcttcgacagcaagctggcttgtgaataaattgtacataaagaacaggaatacatgtagattgtatctctgcagtaagtatttacagtgtgtgtgctggtgtagtttattgccgcgttgattcagtcctttgttggctttagtctaagctcaaagctaagaatcggcactaattatgacttatgagctgcagttgtgtatcacttttatgtctgtaacttggtaacacgaattatcggcactaattatcacttttcagccttacacctgtgtaaagctatatattattggct

SEQ ID NO: 41394 - DNA, 1874 bp, Zea Mays
atttcgggactgttcctcattcacgtgtctcctcccctcccctcccctccccttcccccatgacctgtccgtctcaatctccctcttccccgcaccaaatcgaagctacccctgttcctctgcgatttgggctcgtcctgtgtccttcctgttgctcaaaagctcgctcattcgatgtccctgtctgaaaggcgacaaatcccactggaattcggagcacagagctttgaatccaggggccaaaactttttgctcatctcccttgcggaaaagcgcctcctctgcgtctgaaagtcggatcttttttcacagattcgatttgaagttcccgagcagctcgaggaccgcggtgtcgcatagtccgtgatgttagggaaagctttggtagcttatcaagacggagccttgaggtcaggatttctggtttgcctggtctgtctggtggtcatcatagagggaaatctgttggatctgtgagtgacctgcgcgacagacctgtagtagttgatcaaagcagccgtctgtggaacatggagagagatatgcaaggatatagtgctgagcccggagttctgcgggaagctcacttttccagtatcacttaaacagccgggaccaagaaatggaataatccagtgtttcataaaaagggacaaatcgacatcaacttattatctttacctatgtcttagccctgttgtcctcagcgaggatgggaagtttctgctagcagctaagaggaatcgccgtacaacatatactgagtacatcatttctgtggatcctaaaagtatatcacgatcaagtgatggctgtgttggaaaaatgaggtcaaattttcttggcactaaattcatcgtgcatgacactcgagcaccacacaatgctgggagccttgtctcctgtgagcgcggcagccgcagaatctcctctaggagggtttcccccaaggtacccactgccagctaccccattgcccgggtgaactatgagctaaacctgcttggcacaagggggcccaggcgtatgaattgcacgatgcattccatcccagcctcaacgctggaccctcaaggcatggtgcctgagcctggccaacccaagcagatcttcgtccctggctcgtcgtccttcgaagattcctttcgcagtgcaaacaacaccccttccagctcaaggttctcggtcgcagaccgctccttggattggagctcctctcgattctcagagacgagcggattggctcagcaggacgacgatgacagtgaccaggctaaggagaggcctttggttctctgcaacaaggagccaaggtggcacgagcagctgcagtgttggtgcctcaacttccatggtcgggtgaccgtggcttctgtgaagaacttccagttgatagctgcaccacaactagattctgaaccgtcacagcaagctcagcagcaaacccagccttcgaattcgtcttcagcatcggatcatgacaaagtgatcctgcagtttggtaaggtcgccaatgacatgttcactatggactaccgatacccactctcggcattccaggccttcgccatctgtttgaccagcttcgacagcaagctggcttgtgaataaattgtacataaagaacaggaatacatgtagattgtatctctgcagtaagtatttacagtgtgtgtgctggtgtagtttattgccgcgttgattcagtcctttgttggctttagtctaagctcaaagctaagaatcggcactaattatgacttatgagctgcagttgtgtatcacttttatgtctgtaacttggtaacacgaattatcggcactaattatcacttttcagccttacacctgtgtaaagctatatattattggct

SEQ ID NO: 41395 - DNA, 2351 bp, Zea Mays
atttcgggactgttcctcattcacgtgtctcctcccctcccctcccctccccttcccccatgacctgtccgtctcaatctccctcttccccgcaccaaatcgaagctacccctgttcctctgcgatttgggctcgtcctgtgtccttcctgttgctcaaaagctcgctcattcgatgtccctgtctgaaaggcgacaaatcccactggaattcggagcacagagctttgaatccaggggccaaaactttttgctcatctcccttgcggaaaagcgcctcctctgcgtctgaaagtcggatcttttttcacagattcgatttgaagttcccgagcagctcgaggaccgcggtgtcggtaagacttgctttgaagatcttgatcaccacaagagatttgctgaatttccggtcactgtactttttccactggacatgtcctttcgcagcatagtccgtgatgttagggaaagctttggtagcttatcaagacggagccttgaggtcaggatttctggtttgcctggtctgtctggtggtcatcatagagggaaatctgttggatctgtgagtgacctgcgcgacagacctgtagtagttgatcaaagcaggtgggttggtcttcctcctgaattgcttcgagatgtaatgagaaggcttgaggaaggtgagagcaattggccatcccggaaaaatgttgttgcctgtgcagccgtctgtggaacatggagagagatatgcaaggatatagtgctgagcccggagttctgcgggaagctcacttttccagtatcacttaaacagccgggaccaagaaatggaataatccagtgtttcataaaaagggacaaatcgacatcaacttattatctttacctatgtcttagccctggtaagcatacaacatgtgcactgtttttctcattaatatccttctgaatgatcctacaaggtgacctcgaaatagagcagtaccggatttaacttctgcgtgtgccacgatgcatgcggatatacagtttcttgttccattaatgcttcttctcagttatctaacattgatgacaatggtaaatttaagaaggattagacttactctttgacacccttagtgagatcagataaactgttatcatgaataactttgcttaacgctttgatggtttggatcatctagttgtcctcagcgaggatgggaagtttctgctagcagctaagaggaatcgccgtacaacatatactgagtacatcatttctgtggatcctaaaagtatatcacgatcaagtgatggctgtgttggaaaaatgaggtcaaattttcttggcactaaattcatcgtgcatgacactcgagcaccacacaatgctgggagccttgtctcctgtgagcgcggcagccgcagaatctcctctaggagggtttcccccaaggtacccactgccagctaccccattgcccgggtgaactatgagctaaacctgcttggcacaagggggcccaggcgtatgaattgcacgatgcattccatcccagcctcaacgctggaccctcaaggcatggtgcctgagcctggccaacccaagcagatcttcgtccctggctcgtcgtccttcgaagattcctttcgcagtgcaaacaacaccccttccagctcaaggttctcggtcgcagaccgctccttggattggagctcctctcgattctcagagacgagcggattggctcagcaggacgacgatgacagtgaccaggctaaggagaggcctttggttctctgcaacaaggagccaaggtggcacgagcagctgcagtgttggtgcctcaacttccatggtcgggtgaccgtggcttctgtgaagaacttccagttgatagctgcaccacaactagattctgaaccgtcacagcaagctcagcagcaaacccagccttcgaattcgtcttcagcatcggatcatgacaaagtgatcctgcagtttggtaaggtcgccaatgacatgttcactatggactaccgatacccactctcggcattccaggccttcgccatctgtttgaccagcttcgacagcaagctggcttgtgaataaattgtacataaagaacaggaatacatgtagattgtatctctgcagtaagtatttacagtgtgtgtgctggtgtagtttattgccgcgttgattcagtcctttgttggctttagtctaagctcaaagctaagaatcggcactaattatgacttatgagctgcagttgtgtatcacttttatgtctgtaacttggtaacacgaattatcggcactaattatcacttttcagccttacacctgtgtaaagctatatattattggct

SEQ ID NO: 41396 - DNA, 2066 bp, Zea Mays
atttcgggactgttcctcattcacgtgtctcctcccctcccctcccctccccttcccccatgacctgtccgtctcaatctccctcttccccgcaccaaatcgaagctacccctgttcctctgcgatttgggctcgtcctgtgtccttcctgttgctcaaaagctcgctcattcgatgtccctgtctgaaaggcgacaaatcccactggaattcggagcacagagctttgaatccaggggccaaaactttttgctcatctcccttgcggaaaagcgcctcctctgcgtctgaaagtcggatcttttttcacagattcgatttgaagttcccgagcagctcgaggaccgcggtgtcggtaagacttgctttgaagatcttgatcaccacaagagatttgctgaatttccggtcactgtactttttccactggacatgtcctttcgcagcatagtccgtgatgttagggaaagctttggtagcttatcaagacggagccttgaggtcaggatttctggtttgcctggtctgtctggtggtcatcatagagggaaatctgttggatctgtgagtgacctgcgcgacagacctgtagtagttgatcaaagcaggtgggttggtcttcctcctgaattgcttcgagatgtaatgagaaggcttgaggaaggtgagagcaattggccatcccggaaaaatgttgttgcctgtgcagccgtctgtggaacatggagagagatatgcaaggatatagtgctgagcccggagttctgcgggaagctcacttttccagtatcacttaaacagccgggaccaagaaatggaataatccagtgtttcataaaaagggacaaatcgacatcaacttattatctttacctatgtcttagccctgttgtcctcagcgaggatgggaagtttctgctagcagctaagaggaatcgccgtacaacatatactgagtacatcatttctgtggatcctaaaagtatatcacgatcaagtgatggctgtgttggaaaaatgaggtcaaattttcttggcactaaattcatcgtgcatgacactcgagcaccacacaatgctgggagccttgtctcctgtgagcgcggcagccgcagaatctcctctaggagggtttcccccaaggtacccactgccagctaccccattgcccgggtgaactatgagctaaacctgcttggcacaagggggcccaggcgtatgaattgcacgatgcattccatcccagcctcaacgctggaccctcaaggcatggtgcctgagcctggccaacccaagcagatcttcgtccctggctcgtcgtccttcgaagattcctttcgcagtgcaaacaacaccccttccagctcaaggttctcggtcgcagaccgctccttggattggagctcctctcgattctcagagacgagcggattggctcagcaggacgacgatgacagtgaccaggctaaggagaggcctttggttctctgcaacaaggagccaaggtggcacgagcagctgcagtgttggtgcctcaacttccatggtcgggtgaccgtggcttctgtgaagaacttccagttgatagctgcaccacaactagattctgaaccgtcacagcaagctcagcagcaaacccagccttcgaattcgtcttcagcatcggatcatgacaaagtgatcctgcagtttggtaaggtcgccaatgacatgttcactatggactaccgatacccactctcggcattccaggccttcgccatctgtttgaccagcttcgacagcaagctggcttgtgaataaattgtacataaagaacaggaatacatgtagattgtatctctgcagtaagtatttacagtgtgtgtgctggtgtagtttattgccgcgttgattcagtcctttgttggctttagtctaagctcaaagctaagaatcggcactaattatgacttatgagctgcagttgtgtatcacttttatgtctgtaacttggtaacacgaattatcggcactaattatcacttttcagccttacacctgtgtaaagctatatattattggct

SEQ ID NO: 41397 - DNA, 2255 bp, Zea Mays
atttcgggactgttcctcattcacgtgtctcctcccctcccctcccctccccttcccccatgacctgtccgtctcaatctccctcttccccgcaccaaatcgaagctacccctgttcctctgcgatttgggctcgtcctgtgtccttcctgttgctcaaaagctcgctcattcgatgtccctgtctgaaaggcgacaaatcccactggaattcggagcacagagctttgaatccaggggccaaaactttttgctcatctcccttgcggaaaagcgcctcctctgcgtctgaaagtcggatcttttttcacagattcgatttgaagttcccgagcagctcgaggaccgcggtgtcgtccgtgatgttagggaaagctttggtagcttatcaagacggagccttgaggtcaggatttctggtttgcctggtctgtctggtggtcatcatagagggaaatctgttggatctgtgagtgacctgcgcgacagacctgtagtagttgatcaaagcaggtgggttggtcttcctcctgaattgcttcgagatgtaatgagaaggcttgaggaaggtgagagcaattggccatcccggaaaaatgttgttgcctgtgcagccgtctgtggaacatggagagagatatgcaaggatatagtgctgagcccggagttctgcgggaagctcacttttccagtatcacttaaacagccgggaccaagaaatggaataatccagtgtttcataaaaagggacaaatcgacatcaacttattatctttacctatgtcttagccctggtaagcatacaacatgtgcactgtttttctcattaatatccttctgaatgatcctacaaggtgacctcgaaatagagcagtaccggatttaacttctgcgtgtgccacgatgcatgcggatatacagtttcttgttccattaatgcttcttctcagttatctaacattgatgacaatggtaaatttaagaaggattagacttactctttgacacccttagtgagatcagataaactgttatcatgaataactttgcttaacgctttgatggtttggatcatctagttgtcctcagcgaggatgggaagtttctgctagcagctaagaggaatcgccgtacaacatatactgagtacatcatttctgtggatcctaaaagtatatcacgatcaagtgatggctgtgttggaaaaatgaggtcaaattttcttggcactaaattcatcgtgcatgacactcgagcaccacacaatgctgggagccttgtctcctgtgagcgcggcagccgcagaatctcctctaggagggtttcccccaaggtacccactgccagctaccccattgcccgggtgaactatgagctaaacctgcttggcacaagggggcccaggcgtatgaattgcacgatgcattccatcccagcctcaacgctggaccctcaaggcatggtgcctgagcctggccaacccaagcagatcttcgtccctggctcgtcgtccttcgaagattcctttcgcagtgcaaacaacaccccttccagctcaaggttctcggtcgcagaccgctccttggattggagctcctctcgattctcagagacgagcggattggctcagcaggacgacgatgacagtgaccaggctaaggagaggcctttggttctctgcaacaaggagccaaggtggcacgagcagctgcagtgttggtgcctcaacttccatggtcgggtgaccgtggcttctgtgaagaacttccagttgatagctgcaccacaactagattctgaaccgtcacagcaagctcagcagcaaacccagccttcgaattcgtcttcagcatcggatcatgacaaagtgatcctgcagtttggtaaggtcgccaatgacatgttcactatggactaccgatacccactctcggcattccaggccttcgccatctgtttgaccagcttcgacagcaagctggcttgtgaataaattgtacataaagaacaggaatacatgtagattgtatctctgcagtaagtatttacagtgtgtgtgctggtgtagtttattgccgcgttgattcagtcctttgttggctttagtctaagctcaaagctaagaatcggcactaattatgacttatgagctgcagttgtgtatcacttttatgtctgtaacttggtaacacgaattatcggcactaattatcacttttcagccttacacctgtgtaaagctatatattattggct

SEQ ID NO: 41398 - DNA, 2300 bp, Zea Mays
cgatagttgtggatcttcatttggctgggtatgcaaccatcccaagggttgaaaatcgttaaaaaaactcatgctcagtacgatttctggcaaagtcacgatctggtgtgttccatgttgtcgaggagatggatatacacgtaatcttttgacttgaggattgtcctgtggactcagcccatacaagaatccagtgatttgtgtacacagatatgctatgcgtatgaatttattctatatgttctttggcataatgtaagtgtaaccggtttttggcaatcaaaacgaatgccagttggtaaccattcaacatttcttttgttgtgtgagttagagagaggctatcactatactaaccttaatatcatcagaattgacataaatgtgatttacacgaagataaaatttgtggcagagatggctctaacacatcaatcagtcttcgatgcgaatgcttgttgctcatatggacttgtggttgtgataatgagttcatctccgtgcacattcgctatccttgtgattacagcagctaactgagcagtctctcgactgcaaaataaggtaaaatcaagagtgagcaaactaacaaaagtatctctaaaaacaaaaacatagagggaaattttttatgctttacctgttgctgtgatggtggagcaattcagcaccaaggatgatatctcgcatttcagattgtgttagtgcagaagtattgacattgtttttctttgcataatcagatagaatgaagtcccttagtgcacatacggcaccaaaggctccccatcagtagggttggagtaagggattaactgagacaagcctttctagacaactctcaccgctgcaacaggcctaggattcaaaaaatgtttggccatagattatctaaaaaatggacctaataaaagccttcatgttgttgtaaatagacctcccttcaccaactgctgcaactatagtactgaagttatcatctgcaagtaccatatctaaagcttctttggcaatctgagacaagttgatcggtcaaggcatcagacatcttctaatagaaacaaggaaaaacacgaatatattttcatgaagtgcctcagcgtgaatactcacatgcaaagctcgaaccttcaagctgaaaccatccctgagaagatattttctctgaagcttaaggactaaaactataaactaaacagatggctggttgtcagatatatttttcaaccacaatgaatagattaaagagcaacatgtatcagctccaaattttgaaatatgcatcagcaatatatacataccacatgtccatatctcagttttgagagcagatacatgttgcttgggtcatatgtgattgcgacttgcaataaaaaagaacataaaagtgaccatatcttaaatgcaaaatgcgtgctaatagaagcatttctatcaagcatgcagactgaaaacaccaaaccaaaacacagtgtcaatgcagtgatcagagtataaaaccaacaatgccaagcacaaaattgaagaggcaaacaactaaaatttcatagaaatccaggatacaaaggactgacataggttcttttttcacttatatttgagagcggagttgatacactgcaattagtgcttcaaaaatccctacaatagagcaacattgtgttagtttagtatttgaattcaaacgatttttaggaacctttttagttaaggatttatccaatgccttatgtttgaatgaaccataattgaattgcagtgttcgtgaatcctcattcctggactcacctgtaaaacaaagagacatttctaaatttttacagaagaacaaataaaaggactcaccagatggtggggatgggaatgcactggacagatcaacttaatctctggttgctgctgcatgtattaggttattttctagtctaaaaactatcattgaagatgaatgttgttttgctatgagccaatgatgatggatctatctatctatgcatcatataataatcatcaatgttccgtatatttatgtatttttctgacaatttgcaagtgacactcggccccttttgactctagtaagatacctttttatctgagatgtggtgccacaatatatgatataatagactgccaggttgacattattttgaactcgcaatcttgtcctgcctgttcactgtgaatggccaatcaagcaaagcacttgcctgtgtgatgtcctgtctggcatctgtagaagaattaagcatgtctttggtaagtgttgaattagaagaactgtacttcggcaattctag

SEQ ID NO: 41399 - DNA, 2592 bp, Zea Mays
ttctcctctcgctccgcgccccgtcgccgctgacgtggcgcccaccgcacgggaaaaaaatatttcagatattttccccaccgctccttcccctctccccttctcctcctgcgggcctcctcgcccagcggactcctactctgctgcgctccgctccgttccgttccgctcccctcctcgcggcagcaatcgaatgtctcccgacgtagacgccgccgtggcaaccgccgtcgctcccgggggaggctgcggcggtgacggagaggcgggcgccggcacgtcgtcgtccccggcgtccgcggcgaacgggcgggcgttggtgcggtgggaccagatcctcccgcgccgctccctgcgggtcctcctcgtcgagcacgacgactccacgcgccaggtcgtcaccgcgctgctccgcaagtgcggctaccgcgtggccgcggtcgcggacgggatgaaggcgtggggggtcatgcgcgagcgcgcctacgcgttcgaccttgtcctcaccgaggtcgccatgccctccctctccggcatccagctgctctccaggatcgtcgccgccgacgagtgcaagaacatccccgtcgtcatgatgtcatcccaagattctattggcacggtgctcaagtgtatgcagaagggtgcggtggacttccttgtgaaaccagtgagaaagaatgaactgcgtaacttatggcaacatgtgtggaggcggcatgcaatgaattgccagacaaatggatcagaaaataatgcagccagcaatcatattagtgccaacgttgctaatgggtcaaagacaggagaaaacagcgacgaggaaagtgatgcccaaagctttggtagcaagagggatactgaaattcatagtgttgaggcggtacaagatattcgtagagatgaagtggctggctcatccaaaaataacgaactacaaaataagtcttatgatggagtaaacacaaaagtggatgtgtcaaaatataccaatggtgctccaagtggaagtgagaagaatgtgcggtccaaatgccttaacggtattacttctgcaaaggtggctgagcaaattatggataatgccttgaggatcacggatgcaagttcacgccgtccaacaaatcttggcaatggtttggctatgactgagccagcagctgacagaaaatgtcaatcttcggtcatggaaaataatgctgtcacagaaaataaccctggtgataagtcgaagggtgctgcaataggtcatgctgattcttgcccctccgaatttatggtgaccaacttggggaaggaacaccatcttaatggttacaaaaaccaagaattcagggaaaaagatatctttaatcactcgaattcctctgccttttcaagatatggcaataaaaggatagaaccatcaggtgagattcagtttttcccttctccctgcgtcattgggcaagggcatgttaatggcaagaacccagttttccaacccaatggggtgttgctgcctcccaatgaacataatacagcccgtatactacccacagagtcctcttatgcactgtgattcagctggaatcaacaaggcagcaatccagcatgcctctgggcaacctaattaccatgaagctcccggtaaaccatctcatgttcttattgaacacaaacagtcagaggaaaaccaccagttgcatcattcaagacaaattcttcgggaatcaggagaaccaattgacatggcgagagctcacgtggatcgtgctaaccagactgcaagctgcagccaaggtatctgtaaaggaagtggatgcacatgtagtggtgaagccgatatcaacgcaaacacaatggttgccctagagagtggcaacgagagtggaatccaaaatggtgacaggtctcgccgtgaagctgcgttgatgaagtttcgcatgaaaaggaaagatagatgcttcgagaaaaaagttaggtatcatagcaggaagaagctcgcagagcaaaggccaagagttaagggacaatttgtaagccaaaagctgaactcagctacaacaacagacgcagaagctgactcgtgaccggcgtcaagtcatcactgtaacttattcttcccttcccaccaggtgtgggcaatcggacttgtaagactgaaggctggcagaagttttttcccttccatggttagcctttctgcacaatgggtgaactcttgtgtcgggtgtttggtgccgttgtggccttatttttgtaaagtgcatcaaattgacaaatgttcagaggggaatgggttgggggtttaggaaaacggtgcagctgccagatttcgcctatgtacttagatgtttgtggggggtgagaaagcagagcctgtacagcttattcacccattttgttgccattacactagtagtgacttgtactatgacaacagtagacattgttgtacagccttaccagtcagcagcgggtctttctcattttatttattagttattaatcctgtgggtaatcatgtcgataaggcgccgccctgtatgcagggacagttgttgatttgtttgatccaatccaatcatccagcgttttgcttgctcatca

SEQ ID NO: 41400 - DNA, 2798 bp, Zea Mays
ttctcctctcgctccgcgccccgtcgccgctgacgtggcgcccaccgcacgggaaaaaaatatttcagatattttccccaccgctccttcccctctccccttctcctcctgcgggcctcctcgcccagcggactcctactctgctgcgctccgctccgttccgttccgctcccctcctcgcggcagcaatcgaatgtctcccgacgtagacgccgccgtggcaaccgccgtcgctcccgggggaggctgcggcggtgacggagaggcgggcgccggcacgtcgtcgtccccggcgtccgcggcgaacgggcgggcgttggtgcggtgggaccagatcctcccgcgccgctccctgcgggtcctcctcgtcgagcacgacgactccacgcgccaggtcgtcaccgcgctgctccgcaagtgcggctaccgcgtggccgcggtcgcggacgggatgaaggcgtggggggtcatgcgcgagcgcgcctacgcgttcgaccttgtcctcaccgaggtcgccatgccctccctctccggcatccagctgctctccaggatcgtcgccgccgacgagtgcaagaacatccccgtcgtcatgatgtcatcccaagattctattggcacggtgctcaagtgtatgcagaagggtgcggtggacttccttgtgaaaccagtgagaaagaatgaactgcgtaacttatggcaacatgtgtggaggcggcatgcaatgaattgccagacaaatggatcagaaaataatgcagccagcaatcatattagtgccaacgttgctaatgggtcaaagacaggagaaaacagcgacgaggaaagtgatgcccaaagctttggtagcaagagggatactgaaattcatagtgttgaggcggtacaagatattcgtagagatgaagtggctggctcatccaaaaataacgaactacaaaataagtcttatgatggagtaaacacaaaagtggatgtgtcaaaatataccaatggtgctccaagtggaagtgagaagaatgtgcggtccaaatgccttaacggtattacttctgcaaaggtggctgagcaaattatggataatgccttgaggatcacggatgcaagttcacgccgtccaacaaatcttggcaatggtttggctatgactgagccagcagctgacagaaaatgtcaatcttcggtcatggaaaataatgctgtcacagaaaataaccctggtgataagtcgaagggtgctgcaataggtcatgctgattcttgcccctccgaatttatggtgaccaacttggggaaggaacaccatcttaatggttacaaaaaccaagaattcagggaaaaagatatctttaatcactcgaattcctctgccttttcaagatatggcaataaaaggatagaaccatcaggtgagattcagtttttcccttctccctgcgtcattgggcaagggcatgttaatggcaagaacccagttttccaacccaatggggtgttgctgcctcccaatgaacataatacaggtgagagtacaaggcaagctcgaatttctctggacagtaggacagagggtgctgccatcctgtgttccactagtgccagggaagatgctggtgcaaatagttcttcccatagaaaggacagtatgagccatccctcatatgggtttatacctgttccaattcctgttggtgccacgatgccgtaccattatggtgcgattctgcagcccgtatactacccacagagtcctcttatgcactgtgattcagctggaatcaacaaggcagcaatccagcatgcctctgggcaacctaattaccatgaagctcccggtaaaccatctcatgttcttattgaacacaaacagtcagaggaaaaccaccagttgcatcattcaagacaaattcttcgggaatcaggagaaccaattgacatggcgagagctcacgtggatcgtgctaaccagactgcaagctgcagccaaggtatctgtaaaggaagtggatgcacatgtagtggtgaagccgatatcaacgcaaacacaatggttgccctagagagtggcaacgagagtggaatccaaaatggtgacaggtctcgccgtgaagctgcgttgatgaagtttcgcatgaaaaggaaagatagatgcttcgagaaaaaagttaggtatcatagcaggaagaagctcgcagagcaaaggccaagagttaagggacaatttgtaagccaaaagctgaactcagctacaacaacagacgcagaagctgactcgtgaccggcgtcaagtcatcactgtaacttattcttcccttcccaccaggtgtgggcaatcggacttgtaagactgaaggctggcagaagttttttcccttccatggttagcctttctgcacaatgggtgaactcttgtgtcgggtgtttggtgccgttgtggccttatttttgtaaagtgcatcaaattgacaaatgttcagaggggaatgggttgggggtttaggaaaacggtgcagctgccagatttcgcctatgtacttagatgtttgtggggggtgagaaagcagagcctgtacagcttattcacccattttgttgccattacactagtagtgacttgtactatgacaacagtagacattgttgtacagccttaccagtcagcagcgggtctttctcattttatttattagttattaatcctgtgggtaatcatgtcgataaggcgccgccctgtatgcagggacagttgttgatttgtttgatccaatccaatcatccagcgttttgcttgctcatca

SEQ ID NO: 41401 - DNA, 2343 bp, Zea Mays
atgaaggcgtggggggtcatgcgcgagcgcgcctacgcgttcgaccttgtcctcaccgaggtcgccatgccctccctctccggcatccagctgctctccaggatcgtcgccgccgacgagtgcaagaacatccccgtctgatgtcatcccaagattctattggcacggtgctcaagtgtatgcagaagggtgcggtggacttccttgtgaaaccagtgagaaagaatgaactgcgtaacttatggcaacatgtgtggaggcggcatgcaatgaattgccagacaaatggatcagaaaataatgcagccagcaatcatattagtgccaacgttgctaatgggtcaaagacaggagaaaacagcgacgaggaaagtgatgcccaaagctttggtagcaagagggatactgaaattcatagtgttgaggcggtacaagatattcgtagagatgaagtggctggctcatccaaaaataacgaactacaaaataagtcttatgatggagtaaacacaaaagtggatgtgtcaaaatataccaatggtgctccaagtggaagtgagaagaatgtgcggtccaaatgccttaacggtattacttctgcaaaggtggctgagcaaattatggataatgccttgaggatcacggatgcaagttcacgccgtccaacaaatcttggcaatggtttggctatgactgagccagcagctgacagaaaatgtcaatcttcggtcatggaaaataatgctgtcacagaaaataaccctggtgataagtcgaagggtgctgcaataggtcatgctgattcttgcccctccgaatttatggtgaccaacttggggaaggaacaccatcttaatggttacaaaaaccaagaattcagggaaaaagatatctttaatcactcgaattcctctgccttttcaagatatggcaataaaaggatagaaccatcaggtgagattcagtttttcccttctccctgcgtcattgggcaagggcatgttaatggcaagaacccagttttccaacccaatggggtgttgctgcctcccaatgaacataatacaggtgagagtacaaggcaagctcgaatttctctggacagtaggacagagggtgctgccatcctgtgttccactagtgccagggaagatgctggtgcaaatagttcttcccatagaaaggacagtatgagccatccctcatatgggtttatacctgttccaattcctgttggtgccacgatgccgtaccattatggtgcgattctgcagcccgtatactacccacagagtcctcttatgcactgtgattcagctggaatcaacaaggcagcaatccagcatgcctctgggcaacctaattaccatgaagctcccggtaaaccatctcatgttcttattgaacacaaacagtcagaggaaaaccaccagttgcatcattcaagacaaattcttcgggaatcaggagaaccaattgacatggcgagagctcacgtggatcgtgctaaccagactgcaagctgcagccaaggtatctgtaaaggaagtggatgcacatgtagtggtgaagccgatatcaacgcaaacacaatggttgccctagagagtggcaacgagagtggaatccaaaatggtgacaggtctcgccgtgaagctgcgttgatgaagtttcgcatgaaaaggaaagatagatgcttcgagaaaaaagttaggtatcatagcaggaagaagctcgcagagcaaaggccaagagttaagggacaatttgtaagccaaaagctgaactcagctacaacaacagacgcagaagctgactcgtgaccggcgtcaagtcatcactgtaacttattcttcccttcccaccaggtgtgggcaatcggacttgtaagactgaaggctggcagaagttttttcccttccatggttagcctttctgcacaatgggtgaactcttgtgtcgggtgtttggtgccgttgtggccttatttttgtaaagtgcatcaaattgacaaatgttcagaggggaatgggttgggggtttaggaaaacggtgcagctgccagatttcgcctatgtacttagatgtttgtggggggtgagaaagcagagcctgtacagcttattcacccattttgttgccattacactagtagtgacttgtactatgacaacagtagacattgttgtacagccttaccagtcagcagcgggtctttctcattttatttattagttattaatcctgtgggtaatcatgtcgataaggcgccgccctgtatgcagggacagttgttgatttgtttgatccaatccaatcatccagcgttttgcttgctcatca

SEQ ID NO: 41402 - DNA, 2248 bp, Zea Mays
atttgattccatgtgatcggatgtgaattatcagcttacacagtgatgtcatcccaagattctattggcacggtgctcaagtgtatgcagaagggtgcggtggacttccttgtgaaaccagtgagaaagaatgaactgcgtaacttatggcaacatgtgtggaggcggcatgcaatgaattgccagacaaatggatcagaaaataatgcagccagcaatcatattagtgccaacgttgctaatgggtcaaagacaggagaaaacagcgacgaggaaagtgatgcccaaagctttggtagcaagagggatactgaaattcatagtgttgaggcggtacaagatattcgtagagatgaagtggctggctcatccaaaaataacgaactacaaaataagtcttatgatggagtaaacacaaaagtggatgtgtcaaaatataccaatggtgctccaagtggaagtgagaagaatgtgcggtccaaatgccttaacggtattacttctgcaaaggtggctgagcaaattatggataatgccttgaggatcacggatgcaagttcacgccgtccaacaaatcttggcaatggtttggctatgactgagccagcagctgacagaaaatgtcaatcttcggtcatggaaaataatgctgtcacagaaaataaccctggtgataagtcgaagggtgctgcaataggtcatgctgattcttgcccctccgaatttatggtgaccaacttggggaaggaacaccatcttaatggttacaaaaaccaagaattcagggaaaaagatatctttaatcactcgaattcctctgccttttcaagatatggcaataaaaggatagaaccatcaggtgagattcagtttttcccttctccctgcgtcattgggcaagggcatgttaatggcaagaacccagttttccaacccaatggggtgttgctgcctcccaatgaacataatacaggtgagagtacaaggcaagctcgaatttctctggacagtaggacagagggtgctgccatcctgtgttccactagtgccagggaagatgctggtgcaaatagttcttcccatagaaaggacagtatgagccatccctcatatgggtttatacctgttccaattcctgttggtgccacgatgccgtaccattatggtgcgattctgcagcccgtatactacccacagagtcctcttatgcactgtgattcagctggaatcaacaaggcagcaatccagcatgcctctgggcaacctaattaccatgaagctcccggtaaaccatctcatgttcttattgaacacaaacagtcagaggaaaaccaccagttgcatcattcaagacaaattcttcgggaatcaggagaaccaattgacatggcgagagctcacgtggatcgtgctaaccagactgcaagctgcagccaaggtatctgtaaaggaagtggatgcacatgtagtggtgaagccgatatcaacgcaaacacaatggttgccctagagagtggcaacgagagtggaatccaaaatggtgacaggtctcgccgtgaagctgcgttgatgaagtttcgcatgaaaaggaaagatagatgcttcgagaaaaaagttaggtatcatagcaggaagaagctcgcagagcaaaggccaagagttaagggacaatttgtaagccaaaagctgaactcagctacaacaacagacgcagaagctgactcgtgaccggcgtcaagtcatcactgtaacttattcttcccttcccaccaggtgtgggcaatcggacttgtaagactgaaggctggcagaagttttttcccttccatggttagcctttctgcacaatgggtgaactcttgtgtcgggtgtttggtgccgttgtggccttatttttgtaaagtgcatcaaattgacaaatgttcagaggggaatgggttgggggtttaggaaaacggtgcagctgccagatttcgcctatgtacttagatgtttgtggggggtgagaaagcagagcctgtacagcttattcacccattttgttgccattacactagtagtgacttgtactatgacaacagtagacattgttgtacagccttaccagtcagcagcgggtctttctcattttatttattagttattaatcctgtgggtaatcatgtcgataaggcgccgccctgtatgcagggacagttgttgatttgtttgatccaatccaatcatccagcgttttgcttgctcatca

SEQ ID NO: 41403 - DNA, 1056 bp, Zea Mays
atataagtagtaaagatatttagattatcaacaacttctccctcgttcgtcgttgcctccccctccgtttatttattttatataaataaaacaaaaaacaaaaccgcagcagctcctccactggcacactccccctctggcctctaccctgcctgccgtttccatctccatccagttctccgcacccacccacgaccacgacccacccacccactcctttccccaacccacggccgtggacgccagggtcttctacctcaagatgaagggggactaccaccgctacctcgccgagttcaagaccggcgccgagcgcaaggacgccgcggactccacgctcgccgcctaccaggccgcgcaggacatcgccgtcaaggagctgccgcccacgcatcccatcaggctcggcctcgccctcaacttctccgtcttctactacgagatcctcagctcgccggaccgcgcctgctcgctggccaagcaggccttcgacgaagctatttcagagctggatagtcttggggaagagtcgtacaaggatagcacactcatcatgcagcttcttcgtgacaacctcaccttgtggacttctgacatgcaggaggatggtggcgatgaaatgcgggatgcaaacaagcctgacgaggagcagtagtagccaaacatctccatcgatcatgccatgccatgccatgcttgtacaaggaccattttcgtgtgtcctttccttcaatcgtcgacctttcgttttgttgttatactgctattgtggaaccctgttactgttactgttagtgtatcctattggcaataatcaaatgtggtatggttgactactatactaatgggtgatcattattcatcatttgattaagttagataattgaatgcttgtgtgctatcactaccatgtgatggaatagaattcaccaggcaaatatattttataggacattttaattcagccggctaaggttgagtaaacaagtgtttgaccgggtttaggacattttgatccaaaatctcatcaatccagcccataccaaaacattcaag

SEQ ID NO: 41404 - DNA, 988 bp, Zea Mays
attttatataaataaaacaaaaaacaaaaccgcagcagctcctccactggcacactccccctctggcctctaccctgcctgccgtttccatctccatccagttctccgcacccacccacgaccacgacccacccacccactcctttccccaacccatggccgcggccgtggacgccagggtcttctacctcaagatgaagggggactaccaccgctacctcgccgagttcaagaccggcgccgagcgcaaggacgccgcggactccacgctcgccgcctaccaggccgcgcaggacatcgccgtcaaggagctgccgcccacgcatcccatcaggctcggcctcgccctcaacttctccgtcttctactacgagatcctcagctcgccggaccgcgcctgctcgctggccaagcaggccttcgacgaagctatttcagagctggatagtcttggggaagagtcgtacaaggatagcacactcatcatgcagcttcttcgtgacaacctcaccttgtggacttctgacatgcaggaggatggtggcgatgaaatgcgggatgcaaacaagcctgacgaggagcagtagtagccaaacatctccatcgatcatgccatgccatgccatgcttgtacaaggaccattttcgtgtgtcctttccttcaatcgtcgacctttcgttttgttgttatactgctattgtggaaccctgttactgttactgttagtgtatcctattggcaataatcaaatgtggtatggttgactactatactaatgggtgatcattattcatcatttgattaagttagataattgaatgcttgtgtgctatcactaccatgtgatggaatagaattcaccaggcaaatatattttataggacattttaattcagccggctaaggttgagtaaacaagtgtttgaccgggtttaggacattttgatccaaaatctcatcaatccagcccataccaaaacattcaag

SEQ ID NO: 41405 - DNA, 2544 bp, Zea Mays
atgacggggacgaacggtggcatggccaaggagggcggggacaacgacagcgctaggctctgcggctggactggaggtgtcattgttgccatcctgaaccgtgttgccatcctttcggtatgcggcagcacaaaaatctaaagagaccacgccttgaccatgtcctcaattccgtccatcttctcctctgtcttccccttttccttctaacgacaccaggagagaaatttcctcctgtgcgcgtgaaacaattttcctcctcgccacgagatcatctccaactcaatggaagacctaaaagttacggcttcatagtcccatcccaccacgaggggcacggtggtcggtgggttgagggttctcagctggctggagactggagcatatgttttctttcaagtccaggtagcagagtcagggtttcatgggggaatcagacgtgaaggaacagcagccgaacaggctgcaggaggagctgaggaaggagaaagagaaggcacgcgccctagacgagatacaagacctgcaaggcgaactggaggcagcaagagattcagagaagaagatgctgctgtcattgcaggctcaaacaaagcagcttgagcagaccaaagtatccctggaagaggccaagattgagatagcttcgctacgagacagtaggcagccgttcaagaatttcaggagaaggggtttgatgtcattctcctttgccgaccctggcgaggcggagacatggtcgctacagcgtgagctcaggttagctgtggaatccgaggagaagtgcaacaaggccatggatgacttggccattgccttgactgaacaaaccacagaggccagagaagcaaatgtgaagctttcattggcgcaagccgagttgaataatgcaaggacccaagtggagaccttgaaggcctcgctagaaagcacagagggcaagctccagttggcactggaagaggcagaccggctaaaagtcgagtcagatgaattggcagctgcctcaaaagaaaaagagagagggctcgttgattgcatcaagatgtttgaggaggacctaagtaaaggaaaggaagagaacgataagctgattgaatcacagagggtgaccagagatgagaattctcggctgagagagatgctgaagcatgcggtgggcgaagctaatgtagcaagagaatcgctggagattgccagagtggagaattctcgccttaacgaagagatgtttaagaaagagagtaccttgcagagtatcaaccaagaatatgaatccctcaagatcagcgaggcagccgcacagagtagcattaaagaattgaaggatatgattgatgctatgttcagttctgagtcgaccaaaacgtcagcagaagcatcacctcgtgaggccaagggaagcaagatgaaggaaacttctgtggcagcagattatgtgtattctgatgtcgaaagatctactcgtctggacgacataaaaaaccctggaaagcagaaaaagaagacaattctcagaaaatttggtgaaataatgaagaaaagaaactcctaaattgtaatctagtattacgaaagcagtatatcttccattttgtttgttcagatcccttgagcacacaggacagctagaatgccaagatttacaatgatgaaaagatgtgtggggtaacattttttttctttttttacttcatgccatggatttagactacaaagaatggagcatactgtacatacatgtcaaaatacagagaatgaaataagaaagtgtcatagcctttttttatggttttataagtttctgcattttagaatctctataaatccttggcctgctatatgcaactaagtagcccatgttcccagagtacagtatgcccaaattaccccatcgttctgggaaatatgttgataatgaggatatttaacttgtgtcaaggttctgcaaagagcatatttacaagttaattatgtgtgatttatggagcactggaatccgccaccaactggataggcctaagtaaaactgcataaaagtatttcattacgaggtttaaggaaaactaaaatgtctgtggaggacacactgtctgaagtaccatatcactttccattaggtaatttgtatttttcctagatgttgctgtgaaacctgcaaatatgcctaaagtaagttggatctagatttttgccgaaacactattaggtccaaggacaacacaaatgaatacgattattacctttaagaactgctcattataatttgtagctccaaccatcaagttttccaaaaacttgagtcccttcctttctttttttttcttgcaaagaattgtgtcatcataacaatagccactaaacttggctgtttaaaggacatgctggattgttggaatcctatgtggccgaggtgagagcaagtttggttctatggctagctttgccaggcaagcataaccttgcccacgatggtgagcagctttgcctcactcttgttagaaaagaaaatctggaaagcacaggcaccaaggcgatgctaac

SEQ ID NO: 41406 - DNA, 1781 bp, Zea Mays
atgacggggacgaacggtggcatggccaaggagggcggggacaacgacagcgctaggctctgcggctggactggaggtgtcattgttgccatcctgaaccgtgttgccatcctttcggtatgcggcagcacaaaaatctaaagagaccacgccttgaccatgtcctcaattccgtccatcttctcctctgtcttccccttttccttctaacgacaccaggagagaaatttcctcctgtgcgcgtgaaacaattttcctcctcgccacgagatcatctccaactcaatggaagacctaaaagttacggcttcatagtcccatcccaccacgaggggcacggtggtcggtgggttgagggttctcagctggctggagactggagcatatgttttctttcaagtccagagtcagggtttcatgggggaatcagacgtgaaggaacagcagccgaacaggctgcaggaggagctgaggaaggagaaagagaaggcacgcgccctagacgagatacaagacctgcaaggcgaactggaggcagcaagagattcagagaagaagatgctgctgtcattgcaggctcaaacaaagcagcttgagcagaccaaagtatccctggaagaggccaagattgagatagcttcgctacgagacagtaggcagccgttcaagaatttcaggagaaggggtttgatgtcattctcctttgccgaccctggcgaggcggagacatggtcgctacagcgtgagctcaggttagctgtggaatccgaggagaagtgcaacaaggccatggatgacttggccattgccttgactgaacaaaccacagaggccagagaagcaaatgtgaagctttcattggcgcaagccgagttgaataatgcaaggacccaagtggagaccttgaaggcctcgctagaaagcacagagggcaagctccagttggcactggaagaggcagaccggctaaaagtcgagtcagatgaattggcagctgcctcaaaagaaaaagagagagggctcgttgattgcatcaagatgtttgaggaggacctaagtaaaggaaaggaagagaacgataagctgattgaatcacagagggtgaccagagatgagaattctcggctgagagagatgctgaagcatgcggtgggcgaagctaatgtagcaagagaatcgctggagattgccagagtggagaattctcgccttaacgaagagatgtttaagaaagagagtaccttgcagagtatcaaccaagaatatgaatccctcaagatcagcgaggcagccgcacagagtagcattaaagaattgaaggatatgattgatgctatgttcagttctgagtcgaccaaaacgtcagcagaagcatcacctcgtgaggccaagggaagcaagatgaaggaaacttctgtggcagcagattatgtgtattctgatgtcgaaagatctactcgtctggacgacataaaaaaccctttaagaactgctcattataatttgtagctccaaccatcaagttttccaaaaacttgagtcccttcctttctttttttttcttgcaaagaattgtgtcatcataacaatagccactaaacttggctgtttaaaggacatgctggattgttggaatcctatgtggccgaggtgagagcaagtttggttctatggctagctttgccaggcaagcataaccttgcccacgatggtgagcagctttgcctcactcttgttagaaaagaaaatctggaaagcacaggcaccaaggcgatgctaac

SEQ ID NO: 41407 - DNA, 1491 bp, Zea Mays
atgacggggacgaacggtggcatggccaaggagggcggggacaacgacagcgctaggctctgcggctggactggaggtgtcattgttgccatcctgaaccgtgttgccatcctttcgtcagggtttcatgggggaatcagacgtgaaggaacagcagccgaacaggctgcaggaggagctgaggaaggagaaagagaaggcacgcgccctagacgagatacaagacctgcaaggcgaactggaggcagcaagagattcagagaagaagatgctgctgtcattgcaggctcaaacaaagcagcttgagcagaccaaagtatccctggaagaggccaagattgagatagcttcgctacgagacagtaggcagccgttcaagaatttcaggagaaggggtttgatgtcattctcctttgccgaccctggcgaggcggagacatggtcgctacagcgtgagctcaggttagctgtggaatccgaggagaagtgcaacaaggccatggatgacttggccattgccttgactgaacaaaccacagaggccagagaagcaaatgtgaagctttcattggcgcaagccgagttgaataatgcaaggacccaagtggagaccttgaaggcctcgctagaaagcacagagggcaagctccagttggcactggaagaggcagaccggctaaaagtcgagtcagatgaattggcagctgcctcaaaagaaaaagagagagggctcgttgattgcatcaagatgtttgaggaggacctaagtaaaggaaaggaagagaacgataagctgattgaatcacagagggtgaccagagatgagaattctcggctgagagagatgctgaagcatgcggtgggcgaagctaatgtagcaagagaatcgctggagattgccagagtggagaattctcgccttaacgaagagatgtttaagaaagagagtaccttgcagagtatcaaccaagaatatgaatccctcaagatcagcgaggcagccgcacagagtagcattaaagaattgaaggatatgattgatgctatgttcagttctgagtcgaccaaaacgtcagcagaagcatcacctcgtgaggccaagggaagcaagatgaaggaaacttctgtggcagcagattatgtgtattctgatgtcgaaagatctactcgtctggacgacataaaaaaccctttaagaactgctcattataatttgtagctccaaccatcaagttttccaaaaacttgagtcccttcctttctttttttttcttgcaaagaattgtgtcatcataacaatagccactaaacttggctgtttaaaggacatgctggattgttggaatcctatgtggccgaggtgagagcaagtttggttctatggctagctttgccaggcaagcataaccttgcccacgatggtgagcagctttgcctcactcttgttagaaaagaaaatctggaaagcacaggcaccaaggcgatgctaac

SEQ ID NO: 41408 - DNA, 2541 bp, Zea Mays
atgacggggacgaacggtggcatggccaaggagggcggggacaacgacagcgctaggctctgcggctggactggaggtgtcattgttgccatcctgaaccgtgttgccatcctttcggtatgcggcagcacaaaaatctaaagagaccacgccttgaccatgtcctcaattccgtccatcttctcctctgtcttccccttttccttctaacgacaccaggagagaaatttcctcctgtgcgcgtgaaacaattttcctcctcgccacgagatcatctccaactcaatggaagacctaaaagttacggcttcatagtcccatcccaccacgaggggcacggtggtcggtgggttgagggttctcagctggctggagactggagcatatgttttctttcaagtccaggcagagtcagggtttcatgggggaatcagacgtgaaggaacagcagccgaacaggctgcaggaggagctgaggaaggagaaagagaaggcacgcgccctagacgagatacaagacctgcaaggcgaactggaggcagcaagagattcagagaagaagatgctgctgtcattgcaggctcaaacaaagcagcttgagcagaccaaagtatccctggaagaggccaagattgagatagcttcgctacgagacagtaggcagccgttcaagaatttcaggagaaggggtttgatgtcattctcctttgccgaccctggcgaggcggagacatggtcgctacagcgtgagctcaggttagctgtggaatccgaggagaagtgcaacaaggccatggatgacttggccattgccttgactgaacaaaccacagaggccagagaagcaaatgtgaagctttcattggcgcaagccgagttgaataatgcaaggacccaagtggagaccttgaaggcctcgctagaaagcacagagggcaagctccagttggcactggaagaggcagaccggctaaaagtcgagtcagatgaattggcagctgcctcaaaagaaaaagagagagggctcgttgattgcatcaagatgtttgaggaggacctaagtaaaggaaaggaagagaacgataagctgattgaatcacagagggtgaccagagatgagaattctcggctgagagagatgctgaagcatgcggtgggcgaagctaatgtagcaagagaatcgctggagattgccagagtggagaattctcgccttaacgaagagatgtttaagaaagagagtaccttgcagagtatcaaccaagaatatgaatccctcaagatcagcgaggcagccgcacagagtagcattaaagaattgaaggatatgattgatgctatgttcagttctgagtcgaccaaaacgtcagcagaagcatcacctcgtgaggccaagggaagcaagatgaaggaaacttctgtggcagcagattatgtgtattctgatgtcgaaagatctactcgtctggacgacataaaaaaccctggaaagcagaaaaagaagacaattctcagaaaatttggtgaaataatgaagaaaagaaactcctaaattgtaatctagtattacgaaagcagtatatcttccattttgtttgttcagatcccttgagcacacaggacagctagaatgccaagatttacaatgatgaaaagatgtgtggggtaacattttttttctttttttacttcatgccatggatttagactacaaagaatggagcatactgtacatacatgtcaaaatacagagaatgaaataagaaagtgtcatagcctttttttatggttttataagtttctgcattttagaatctctataaatccttggcctgctatatgcaactaagtagcccatgttcccagagtacagtatgcccaaattaccccatcgttctgggaaatatgttgataatgaggatatttaacttgtgtcaaggttctgcaaagagcatatttacaagttaattatgtgtgatttatggagcactggaatccgccaccaactggataggcctaagtaaaactgcataaaagtatttcattacgaggtttaaggaaaactaaaatgtctgtggaggacacactgtctgaagtaccatatcactttccattaggtaatttgtatttttcctagatgttgctgtgaaacctgcaaatatgcctaaagtaagttggatctagatttttgccgaaacactattaggtccaaggacaacacaaatgaatacgattattacctttaagaactgctcattataatttgtagctccaaccatcaagttttccaaaaacttgagtcccttcctttctttttttttcttgcaaagaattgtgtcatcataacaatagccactaaacttggctgtttaaaggacatgctggattgttggaatcctatgtggccgaggtgagagcaagtttggttctatggctagctttgccaggcaagcataaccttgcccacgatggtgagcagctttgcctcactcttgttagaaaagaaaatctggaaagcacaggcaccaaggcgatgctaac

SEQ ID NO: 41409 - DNA, 692 bp, Zea Mays
gaagcccaacctgccactggaagagctcgtcccccgcaacaacacccggagcatcaacggcatcatccgggaattcggcaccggcctcgccccgcgccacccgcagctgcagctccacccgccgccttcttccatcacgccgtccaccgctcccccccgcaagagggtggcctacgaggcattccaggccaaggacgaggccgtggccgtggagatgacccgccgcggcggctctgggtgggctgtcgcgcagctctcggttgtggtgagggatttcggcgagggtgtcatgcggctggagcggcggcgcatggaggtgcagtgggagatcgagcgcgggtggcaggaggcggacgcccgccacgccaggatgctcaaggacgcgttgcgccagttccgcgacactgccgccgccgccgcctgcgtcttgccgccgaagaaggccaggagagaccatggagactcgtagtaataggctaatagcgattgatttgatcctgatgctgatggtgatgctagcagggaaggcatccccatccaccccaattggatgttcctccctcttctgtccatgtcgtatatgaatatgagtggtagtacagtactgatttgcagcagcattatgttcatttgtgacctcatttatgttaagcttgcgttgcgttatggtgaatggtggcgatggttttgga

SEQ ID NO: 41410 - DNA, 4269 bp, Zea Mays
ccacatcccccgtgaaggcgaggaggggccagcagcagtagggtagggtggaactggaactcaaagctgatacttcttccctagtctcctcggcgggcgacacgctcggatcgatccccgccgccgcagcctccctcaccctctccaatccaatccgcagctacccaatggcgacggagctgctccccgtggtggacctgcgcgtgctctcacagcccgacctggacgcgctcgccgccgcctccgcgcacgccctggcgccgcggacctgccccgacgccgacccgctcccgcctctcaagatcgaccgcgccgtcttcaacgagagcgccggttcccggaagcagaccttctcccgccgccgcctcgccgcctcgccctcgtccgcccgtcactcctcctccgcgcagacgtccaccgggcggaagaacgaccccgagggcgacctcgtcgcgtaccacctccgccgtctcttcgtccccgatgacccctcgctcccgccccctccagaaccgcaaaccctagccctactacaagagccctccccccctccgccgccggcccccgaccccgaccgggagaccaccaacgccaagggggtctccgttgaccttctcgggcttgcggcgatgccggagccctacgatgccgagctgcacaggcggacggccggtatggcctccggtaccgacctgcagggtttcatcgacagcctcgcaggggagtgggtaagccagaagaagcggaggaagaatgtggacgcgtccttcttcggggatcacctccctcgcgggtggaagctgcagctcgggctcaagcgaaacagtggatccatctgggtgcgctgcttcagctacgtgagccccaagggacgtcacttttctacttgcaaagaggtttctgcatacctcatgtcacttcttgggtatccagagctcaaaccagccgctaatcagtatgaaagcacaggacaacattactcgagtgccaacaatggtgatggttttaggtttcaaagatcaaattggtttaattacggacaagacaaatgtacagcaccacttgtcatgtcatgaaaagagggctaaaaggcgcagaactagcaagtttggtgagccagtagtgggaaaagatggtaaatttgaatgtcctatttgttttaagaccttcgaggaggaatcccggtactttggccatgttggagctcatgcaaggtatgaagggttgactcctgaagcatttgtggataagactacttatagaagggcaactaataatcacttggcagaaatttcatttggtcttcaagagttacctgaatcacatggacaaaacaataaggtttcttatggtgaaacagtctttcggcaccataatcattcaaatgaacatgttgacaataactctacggccactgagctttttagtacaaattatccagataatttcattagaccaaataaaacctggggtaggtctgaagaaggtccttccttcaatgatgcttcaagtgtatgtagatacacaaattttacgggccatgccgatttgacagttccagaaagagcatcaatctctaataatcaaagtgttagcaacattaatggttttttgggagtgtctatgtttagtgatcagccaggaagtaaccatgttatcagacctactgtctttggaacaaataatacggtggaaggaagagatgtcaacctcaattcatgtgtaaatacaatatcttttcctattgctaatgcaaataatgaaacatcagctggcctgaatgaagctaatcggttatctactactgcaaaatgttttagtggcagttctaataacaatgatggtgcatctagtgcatcttcccattgcggatcgaccaataaaatctatagttcgtatggcacaacaagcaaaacccaagctgttggctccagatgcatcagtggaagctatgagccttatggtgaagattgtggtgctcttaaagttaacccttttgccagcaagaacaatactgctgtgtatcagtctaaattgggcacacaacctgtctatgttgtggcaactagggcaaattgttttgcttctggttcgatgcagacaaataacagtgataaagaacttgcatccagtgccatggaacggattgatagcgtgaagaacagaacaagtaaagaaacaggatttgtcactgaagcttataacaatgatgcctttagtggtggtattactgaaaagggttttgcgcagttcagtaacagttctactcacataaagcccaatgcttctggccattgttcactacctgaatcaaaaactccaacaaatggaagtgatatcaactgcatcaagggctcttcggttaatagaggtgatgttagcttcacaaatggctcgtttgtcaataggcccatcaacaacaatgaaccaaatgtagctaggcttgaggtgatggagaagttgaataatgtgatgcaaaaccgttataatgatcacgctcctggttttgatcctcatgctgcagctagtgctagccggaatgccaatggtcttatgcctatgcatgccaattttggttgcatgtcctctacagttcaatctgttgctaatgtttcaacgaccagcacatctcaagatcagtgtgatttgcaacttggatttggtgtacagaagcagcatatattttctaggcatggagagcttagaacggctacagctcgatcccctctgcctgggagcattgccaaaagaaattctgtacccactgaatcctcacagtttgagagcatggatgggcctaaatctttccccaatggaacatcgcagttcggaggctttgcaaggcctacctttgtgcctgctgcaccttctcagtttgggagcatggctcaacctaattatgtgcattcttctcaatcctctcaattcacaagcttggttcaaccgaattctgtacctcctgctgagtcctcgcagtttggaagcaaagcccaatctagttctgcaccccttgctaaaacctctcagttcaagggcatggctggaccaaattctgtacctcctgctgagccctctcagtttgggagcatgattagacctaatttggtacctcccgcatcttctcagtttttggggagcatggttcgaccaaattctgtaactccagaatcctcacagtttggaagcatgaccagaccaaactctgtacctcctgtatcgtcacagtttgttaacatgcccagtcaaaattttgtgagcgcatccgagccaactctagttttggggtacgcaccgcagattggaagtgaccctccacatcaagtccagttaggatgggatttgtccttgccaaggatggttactggcggcagcatggtcacttgtttatgtatatggtgcaacagtcagttccatcattttggccctgttgatggacagcaggctagttcttttggcttcatttgccccacctgtaaagataggatgtctggtcatcacagtatgcccagcaatggttcatggcagccttgaggtgcagtgctgtttgttaatcatctgcatttctgcatctgagggatctcgtggttttctgtacaccatgtctggcgactgttgaggacagaaaattgtccgcacaagcagaagtggtcccgcctccaagttcagtggactgtcaagggtagctgggagctggaatgtatttagttggtactagggtatgcaatgagagaagttgggtttctctactacttgtcaaagatagcaatgggagaccatgatgaattcaggccatctttttttttcttgaatccaccagttaagctggcatgtttgtcggagctatatctcaggttattttgagctctagcttcgatggggagttgacttcattattggtactgaacttaaaatgactccagtccagtgtcttgttggttgtgtaaattatttgttagctcaggtggattaggcgcctagctcttgctgtaatatttccctaacactgggcagcctttgtctatcctttcctgatgaggttctgttagtcaagctgaagtacatttctaggtaagcgtggctcttgattcttggacgtaaaatgccaagaggctatacgttcgtttccgcctgtttcaaccttacaaggtaagaagaaaggaaatccaaacagaggccaagagagcctggcagttacaaccaggctgagctgggataggccaaatgcatatacaggactgagcagagcacaagtttggttgcatgtatgag

SEQ ID NO: 41411 - DNA, 4274 bp, Zea Mays
ccacatcccccgtgaaggcgaggaggggccagcagcagtagggtagggtggaactggaactcaaagctgatacttcttccctagtctcctcggcgggcgacacgctcggatcgatccccgccgccgcagcctccctcaccctctccaatccaatccgcagctacccaatggcgacggagctgctccccgtggtggacctgcgcgtgctctcacagcccgacctggacgcgctcgccgccgcctccgcgcacgccctggcgccgcggacctgccccgacgccgacccgctcccgcctctcaagatcgaccgcgccgtcttcaacgagagcgccggttcccggaagcagaccttctcccgccgccgcctcgccgcctcgccctcgtccgcccgtcactcctcctccgcgcagacgtccaccgggcggaagaacgaccccgagggcgacctcgtcgcgtaccacctccgccgtctcttcgtccccgatgacccctcgctcccgccccctccagaaccgcaaaccctagccctactacaagagccctccccccctccgccgccggcccccgaccccgaccgggagaccaccaacgccaagggggtctccgttgaccttctcgggcttgcggcgatgccggagccctacgatgccgagctgcacaggcggacggccggtatggcctccggtaccgacctgcagggtttcatcgacagcctcgcaggggagtgggtaagccagaagaagcggaggaagaatgtggacgcgtccttcttcggggatcacctccctcgcgggtggaagctgcagctcgggctcaagcgaaacagtggatccatctgggtgcgctgcttcagctacgtgagccccaagggacgtcacttttctacttgcaaagaggtttctgcatacctcatgtcacttcttgggtatccagagctcaaaccagccgctaatcagtatgaaagcacaggacaacattactcgagtgccaacaatggtgatggtagtgttttaggtttcaaagatcaaattggtttaattacggacaagacaaatgtacagcaccacttgtcatgtcatgaaaagagggctaaaaggcgcagaactagcaagtttggtgagccagtagtgggaaaagatggtaaatttgaatgtcctatttgttttaagaccttcgaggaggaatcccggtactttggccatgttggagctcatgcaaggtatgaagggttgactcctgaagcatttgtggataagactacttatagaagggcaactaataatcacttggcagaaatttcatttggtcttcaagagttacctgaatcacatggacaaaacaataaggtttcttatggtgaaacagtctttcggcaccataatcattcaaatgaacatgttgacaataactctacggccactgagctttttagtacaaattatccagataatttcattagaccaaataaaacctggggtaggtctgaagaaggtccttccttcaatgatgcttcaagtgtatgtagatacacaaattttacgggccatgccgatttgacagttccagaaagagcatcaatctctaataatcaaagtgttagcaacattaatggttttttgggagtgtctatgtttagtgatcagccaggaagtaaccatgttatcagacctactgtctttggaacaaataatacggtggaaggaagagatgtcaacctcaattcatgtgtaaatacaatatcttttcctattgctaatgcaaataatgaaacatcagctggcctgaatgaagctaatcggttatctactactgcaaaatgttttagtggcagttctaataacaatgatggtgcatctagtgcatcttcccattgcggatcgaccaataaaatctatagttcgtatggcacaacaagcaaaacccaagctgttggctccagatgcatcagtggaagctatgagccttatggtgaagattgtggtgctcttaaagttaacccttttgccagcaagaacaatactgctgtgtatcagtctaaattgggcacacaacctgtctatgttgtggcaactagggcaaattgttttgcttctggttcgatgcagacaaataacagtgataaagaacttgcatccagtgccatggaacggattgatagcgtgaagaacagaacaagtaaagaaacaggatttgtcactgaagcttataacaatgatgcctttagtggtggtattactgaaaagggttttgcgcagttcagtaacagttctactcacataaagcccaatgcttctggccattgttcactacctgaatcaaaaactccaacaaatggaagtgatatcaactgcatcaagggctcttcggttaatagaggtgatgttagcttcacaaatggctcgtttgtcaataggcccatcaacaacaatgaaccaaatgtagctaggcttgaggtgatggagaagttgaataatgtgatgcaaaaccgttataatgatcacgctcctggttttgatcctcatgctgcagctagtgctagccggaatgccaatggtcttatgcctatgcatgccaattttggttgcatgtcctctacagttcaatctgttgctaatgtttcaacgaccagcacatctcaagatcagtgtgatttgcaacttggatttggtgtacagaagcagcatatattttctaggcatggagagcttagaacggctacagctcgatcccctctgcctgggagcattgccaaaagaaattctgtacccactgaatcctcacagtttgagagcatggatgggcctaaatctttccccaatggaacatcgcagttcggaggctttgcaaggcctacctttgtgcctgctgcaccttctcagtttgggagcatggctcaacctaattatgtgcattcttctcaatcctctcaattcacaagcttggttcaaccgaattctgtacctcctgctgagtcctcgcagtttggaagcaaagcccaatctagttctgcaccccttgctaaaacctctcagttcaagggcatggctggaccaaattctgtacctcctgctgagccctctcagtttgggagcatgattagacctaatttggtacctcccgcatcttctcagtttttggggagcatggttcgaccaaattctgtaactccagaatcctcacagtttggaagcatgaccagaccaaactctgtacctcctgtatcgtcacagtttgttaacatgcccagtcaaaattttgtgagcgcatccgagccaactctagttttggggtacgcaccgcagattggaagtgaccctccacatcaagtccagttaggatgggatttgtccttgccaaggatggttactggcggcagcatggtcacttgtttatgtatatggtgcaacagtcagttccatcattttggccctgttgatggacagcaggctagttcttttggcttcatttgccccacctgtaaagataggatgtctggtcatcacagtatgcccagcaatggttcatggcagccttgaggtgcagtgctgtttgttaatcatctgcatttctgcatctgagggatctcgtggttttctgtacaccatgtctggcgactgttgaggacagaaaattgtccgcacaagcagaagtggtcccgcctccaagttcagtggactgtcaagggtagctgggagctggaatgtatttagttggtactagggtatgcaatgagagaagttgggtttctctactacttgtcaaagatagcaatgggagaccatgatgaattcaggccatctttttttttcttgaatccaccagttaagctggcatgtttgtcggagctatatctcaggttattttgagctctagcttcgatggggagttgacttcattattggtactgaacttaaaatgactccagtccagtgtcttgttggttgtgtaaattatttgttagctcaggtggattaggcgcctagctcttgctgtaatatttccctaacactgggcagcctttgtctatcctttcctgatgaggttctgttagtcaagctgaagtacatttctaggtaagcgtggctcttgattcttggacgtaaaatgccaagaggctatacgttcgtttccgcctgtttcaaccttacaaggtaagaagaaaggaaatccaaacagaggccaagagagcctggcagttacaaccaggctgagctgggataggccaaatgcatatacaggactgagcagagcacaagtttggttgcatgtatgag

SEQ ID NO: 41412 - DNA, 4091 bp, Zea Mays
ccacatcccccgtgaaggcgaggaggggccagcagcagtagggtagggtggaactggaactcaaagctgatacttcttccctagtctcctcggcgggcgacacgctcggatcgatccccgccgccgcagcctccctcaccctctccaatccaatccgcagctacccaatggcgacggagctgctccccgtggtggacctgcgcgtgctctcacagcccgacctggacgcgctcgccgccgcctccgcgcacgccctggcgccgcggacctgccccgacgccgacccgctcccgcctctcaagatcgaccgcgccgtcttcaacgagagcgccggttcccggaagcagaccttctcccgccgccgcctcgccgcctcgccctcgtccgcccgtcactcctcctccgcgcagacgtccaccgggcggaagaacgaccccgagggcgacctcgtcgcgtaccacctccgccgtctcttcgtccccgatgacccctcgctcccgccccctccagaaccgcaaaccctagccctactacaagagccctccccccctccgccgccggcccccgaccccgaccgggagaccaccaacgccaagggggtctccgttgaccttctcgggcttgcggcgatgccggagccctacgatgccgagctgcacaggcggacggccggtatggcctccggtaccgacctgcagggtttcatcgacagcctcgcaggggagtgggtaagccagaagaagcggaggaagaatgtggacgcgtccttcttcggggatcacctccctcgcgggtggaagctgcagctcgggctcaagcgaaacagtggatccatctgggtgcgctgcttcagctacgtgagccccaagggacgtcacttttctacttgcaaagaggtttctgcatacctcatgtcacttcttgggtatccagagctcaaaccagccgctaatcagtatgaaagcacaggacaacattactcgagtgccaacaatggtgatggtagtgttttaggtttcaaagatcaaattggtttaattacggacaagacaaatgtacagcaccacttgtcatgtcatgaaaagagggctaaaaggcgcagaactagcaagtttggtgagccagtagtgggaaaagatggtaaatttgaatgtcctatttgttttaagaccttcgaggaggaatcccggtactttggccatgttggagctcatgcaaggtatgaagggttgactcctgaagcatttgtggataagactacttatagaagggcaactaataatcacttggcagaaatttcatttggtcttcaagagttacctgaatcacatggacaaaacaataaggtttcttatggtgaaacagtctttcggcaccataatcattcaaatgaacatgttgacaataactctacggccactgagctttttagtacaaattatccagataatttcattagaccaaataaaacctggggtaggtctgaagaaggtccttccttcaatgatgcttcaagtgtatgtagatacacaaattttacgggccatgccgatttgacagttccagaaagagcatcaatctctaataatcaaagtgttagcaacattaatggttttttgggagtgtctatgtttagtgatcagccaggaagtaaccatgttatcagacctactgtctttggaacaaataatacggtggaaggaagagatgtcaacctcaattcatgtgtaaatacaatatcttttcctattgctaatgcaaataatgaaacatcagctggcctgaatgaagctaatcggttatctactactgcaaaatgttttagtggcagttctaataacaatgatggtgcatctagtgcatcttcccattgcggatcgaccaataaaatctatagttcgtatggcacaacaagcaaaacccaagctgttggctccagatgcatcagtggaagctatgagccttatggtgaagattgtggtgctcttaaagttaacccttttgccagcaagaacaatactgctgtgtatcagtctaaattgggcacacaacctgtctatgttgtggcaactagggcaaattgttttgcttctggttcgatgcagacaaataacagtgataaagaacttgcatccagtgccatggaacggattgatagcgtgaagaacagaacaagtaaagaaacaggatttgtcactgaagcttataacaatgatgcctttagtggtggtattactgaaaagggttttgcgcagttcagtaacagttctactcacataaagcccaatgcttctggccattgttcactacctgaatcaaaaactccaacaaatggaagtgatatcaactgcatcaagggctcttcggttaatagagctagtgctagccggaatgccaatggtcttatgcctatgcatgccaattttggttgcatgtcctctacagttcaatctgttgctaatgtttcaacgaccagcacatctcaagatcagaagcagcatatattttctaggcatggagagcttagaacggctacagctcgatcccctctgcctgggagcattgccaaaagaaattctgtacccactgaatcctcacagtttgagagcatggatgggcctaaatctttccccaatggaacatcgcagttcggaggctttgcaaggcctacctttgtgcctgctgcaccttctcagtttgggagcatggctcaacctaattatgtgcattcttctcaatcctctcaattcacaagcttggttcaaccgaattctgtacctcctgctgagtcctcgcagtttggaagcaaagcccaatctagttctgcaccccttgctaaaacctctcagttcaagggcatggctggaccaaattctgtacctcctgctgagccctctcagtttgggagcatgattagacctaatttggtacctcccgcatcttctcagtttttggggagcatggttcgaccaaattctgtaactccagaatcctcacagtttggaagcatgaccagaccaaactctgtacctcctgtatcgtcacagtttgttaacatgcccagtcaaaattttgtgagcgcatccgagccaactctagttttggggtacgcaccgcagattggaagtgaccctccacatcaagtccagttaggatgggatttgtccttgccaaggatggttactggcggcagcatggtcacttgtttatgtatatggtgcaacagtcagttccatcattttggccctgttgatggacagcaggctagttcttttggcttcatttgccccacctgtaaagataggatgtctggtcatcacagtatgcccagcaatggttcatggcagccttgaggtgcagtgctgtttgttaatcatctgcatttctgcatctgagggatctcgtggttttctgtacaccatgtctggcgactgttgaggacagaaaattgtccgcacaagcagaagtggtcccgcctccaagttcagtggactgtcaagggtagctgggagctggaatgtatttagttggtactagggtatgcaatgagagaagttgggtttctctactacttgtcaaagatagcaatgggagaccatgatgaattcaggccatctttttttttcttgaatccaccagttaagctggcatgtttgtcggagctatatctcaggttattttgagctctagcttcgatggggagttgacttcattattggtactgaacttaaaatgactccagtccagtgtcttgttggttgtgtaaattatttgttagctcaggtggattaggcgcctagctcttgctgtaatatttccctaacactgggcagcctttgtctatcctttcctgatgaggttctgttagtcaagctgaagtacatttctaggtaagcgtggctcttgattcttggacgtaaaatgccaagaggctatacgttcgtttccgcctgtttcaaccttacaaggtaagaagaaaggaaatccaaacagaggccaagagagcctggcagttacaaccaggctgagctgggataggccaaatgcatatacaggactgagcagagcacaagtttggttgcatgtatgag

SEQ ID NO: 41413 - DNA, 3711 bp, Zea Mays
ccacatcccccgtgaaggcgaggaggggccagcagcagtagggtagggtggaactggaactcaaagctgatacttcttccctagtctcctcggcgggcgacacgctcggatcgatccccgccgccgcagcctccctcaccctctccaatccaatccgcagctacccaatggcgacggagctgctccccgtggtggacctgcgcgtgctctcacagcccgacctggacgcgctcgccgccgcctccgcgcacgccctggcgccgcggacctgccccgacgccgacccgctcccgcctctcaagatcgaccgcgccgtcttcaacgagagcgccggttcccggaagcagaccttctcccgccgccgcctcgccgcctcgccctcgtccgcccgtcactcctcctccgcgcagacgtccaccgggcggaagaacgaccccgagggcgacctcgtcgcgtaccacctccgccgtctcttcgtccccgatgacccctcgctcccgccccctccagaaccgcaaaccctagccctactacaagagccctccccccctccgccgccggcccccgaccccgaccgggagaccaccaacgccaagggggtctccgttgaccttctcgggcttgcggcgatgccggagccctacgatgccgagctgcacaggcggacggccggtatggcctccggtaccgacctgcagggtttcatcgacagcctcgcaggggagtgggtaagccagaagaagcggaggaagaatgtggacgcgtccttcttcggggatcacctccctcgcgggtggaagctgcagctcgggctcaagcgaaacagtggatccatctgggtgcgctgcttcagctacgtgagccccaagggacgtcacttttctacttgcaaagaggtttctgcatacctcatgtcacttcttgggtatccagagctcaaaccagccgctaatcagtatgaaagcacaggacaacattactcgagtgccaacaatggtgatggtagtgtaagtttgaagtgtacaaaactaaattttatttatttaaattcgcctgtcttaattaatatgtacgtaacaggttttaggtttcaaagatcaaattggtttaattacggacaagacaaatgtacagcaccacttgtcatgtcatgaaaagagggctaaaaggcgcagaactagcaagtttggtgagccagtagtgggaaaagatggtaaatttgaatgtcctatttgttttaagaccttcgaggaggaatcccggtactttggccatgttggagctcatgcaagtggcagttctaataacaatgatggtgcatctagtgcatcttcccattgcggatcgaccaataaaatctatagttcgtatggcacaacaagcaaaacccaagctgttggctccagatgcatcagtggaagctatgagccttatggtgaagattgtggtgctcttaaagttaacccttttgccagcaagaacaatactgctgtgtatcagtctaaattgggcacacaacctgtctatgttgtggcaactagggcaaattgttttgcttctggttcgatgcagacaaataacagtgataaagaacttgcatccagtgccatggaacggattgatagcgtgaagaacagaacaagtaaagaaacaggatttgtcactgaagcttataacaatgatgcctttagtggtggtattactgaaaagggttttgcgcagttcagtaacagttctactcacataaagcccaatgcttctggccattgttcactacctgaatcaaaaactccaacaaatggaagtgatatcaactgcatcaagggctcttcggttaatagaggtgatgttagcttcacaaatggctcgtttgtcaataggcccatcaacaacaatgaaccaaatgtagctaggcttgaggtgatggagaagttgaataatgtgatgcaaaaccgttataatgatcacgctcctggttttgatcctcatgctgcagctagtgctagccggaatgccaatggtcttatgcctatgcatgccaattttggttgcatgtcctctacagttcaatctgttgctaatgtttcaacgaccagcacatctcaagatcagaagcagcatatattttctaggcatggagagcttagaacggctacagctcgatcccctctgcctgggagcattgccaaaagaaattctgtacccactgaatcctcacagtttgagagcatggatgggcctaaatctttccccaatggaacatcgcagttcggaggctttgcaaggcctacctttgtgcctgctgcaccttctcagtttgggagcatggctcaacctaattatgtgcattcttctcaatcctctcaattcacaagcttggttcaaccgaattctgtacctcctgctgagtcctcgcagtttggaagcaaagcccaatctagttctgcaccccttgctaaaacctctcagttcaagggcatggctggaccaaattctgtacctcctgctgagccctctcagtttgggagcatgattagacctaatttggtacctcccgcatcttctcagtttttggggagcatggttcgaccaaattctgtaactccagaatcctcacagtttggaagcatgaccagaccaaactctgtacctcctgtatcgtcacagtttgttaacatgcccagtcaaaattttgtgagcgcatccgagccaactctagttttggggtacgcaccgcagattggaagtgaccctccacatcaagtccagttaggatgggatttgtccttgccaaggatggttactggcggcagcatggtcacttgtttatgtatatggtgcaacagtcagttccatcattttggccctgttgatggacagcaggctagttcttttggcttcatttgccccacctgtaaagataggatgtctggtcatcacagtatgcccagcaatggttcatggcagccttgaggtgcagtgctgtttgttaatcatctgcatttctgcatctgagggatctcgtggttttctgtacaccatgtctggcgactgttgaggacagaaaattgtccgcacaagcagaagtggtcccgcctccaagttcagtggactgtcaagggtagctgggagctggaatgtatttagttggtactagggtatgcaatgagagaagttgggtttctctactacttgtcaaagatagcaatgggagaccatgatgaattcaggccatctttttttttcttgaatccaccagttaagctggcatgtttgtcggagctatatctcaggttattttgagctctagcttcgatggggagttgacttcattattggtactgaacttaaaatgactccagtccagtgtcttgttggttgtgtaaattatttgttagctcaggtggattaggcgcctagctcttgctgtaatatttccctaacactgggcagcctttgtctatcctttcctgatgaggttctgttagtcaagctgaagtacatttctaggtaagcgtggctcttgattcttggacgtaaaatgccaagaggctatacgttcgtttccgcctgtttcaaccttacaaggtaagaagaaaggaaatccaaacagaggccaagagagcctggcagttacaaccaggctgagctgggataggccaaatgcatatacaggactgagcagagcacaagtttggttgcatgtatgag

SEQ ID NO: 41414 - DNA, 4267 bp, Zea Mays
ccacatcccccgtgaaggcgaggaggggccagcagcagtagggtagggtggaactggaactcaaagctgatacttcttccctagtctcctcggcgggcgacacgctcggatcgatccccgccgccgcagcctccctcaccctctccaatccaatccgcagctacccaatggcgacggagctgctccccgtggtggacctgcgcgtgctctcacagcccgacctggacgcgctcgccgccgcctccgcgcacgccctggcgccgcggacctgccccgacgccgacccgctcccgcctctcaagatcgaccgcgccgtcttcaacgagagcgccggttcccggaagcagaccttctcccgccgccgcctcgccgcctcgccctcgtccgcccgtcactcctcctccgcgcagacgtccaccgggcggaagaacgaccccgagggcgacctcgtcgcgtaccacctccgccgtctcttcgtccccgatgacccctcgctcccgccccctccagaaccgcaaaccctagccctactacaagagccctccccccctccgccgccggcccccgaccccgaccgggagaccaccaacgccaagggggtctccgttgaccttctcgggcttgcggcgatgccggagccctacgatgccgagctgcacaggcggacggccggtatggcctccggtaccgacctgcagggtttcatcgacagcctcgcaggggagtgggtaagccagaagaagcggaggaagaatgtggacgcgtccttcttcggggatcacctccctcgcgggtggaagctgcagctcgggctcaagcgaaacagtggatccatctgggtgcgctgcttcagctacgtgagccccaagggacgtcacttttctacttgcaaagaggtttctgcatacctcatgtcacttcttgggtatccagagctcaaaccagccgctaatcagtatgaaagcacaggacaacattactcgagtgccaacaatggtgatggtagtgtttcaaagatcaaattggtttaattacggacaagacaaatgtacagcaccacttgtcatgtcatgaaaagagggctaaaaggcgcagaactagcaagtttggtgagccagtagtgggaaaagatggtaaatttgaatgtcctatttgttttaagaccttcgaggaggaatcccggtactttggccatgttggagctcatgcaaggtatgaagggttgactcctgaagcatttgtggataagactacttatagaagggcaactaataatcacttggcagaaatttcatttggtcttcaagagttacctgaatcacatggacaaaacaataaggtttcttatggtgaaacagtctttcggcaccataatcattcaaatgaacatgttgacaataactctacggccactgagctttttagtacaaattatccagataatttcattagaccaaataaaacctggggtaggtctgaagaaggtccttccttcaatgatgcttcaagtgtatgtagatacacaaattttacgggccatgccgatttgacagttccagaaagagcatcaatctctaataatcaaagtgttagcaacattaatggttttttgggagtgtctatgtttagtgatcagccaggaagtaaccatgttatcagacctactgtctttggaacaaataatacggtggaaggaagagatgtcaacctcaattcatgtgtaaatacaatatcttttcctattgctaatgcaaataatgaaacatcagctggcctgaatgaagctaatcggttatctactactgcaaaatgttttagtggcagttctaataacaatgatggtgcatctagtgcatcttcccattgcggatcgaccaataaaatctatagttcgtatggcacaacaagcaaaacccaagctgttggctccagatgcatcagtggaagctatgagccttatggtgaagattgtggtgctcttaaagttaacccttttgccagcaagaacaatactgctgtgtatcagtctaaattgggcacacaacctgtctatgttgtggcaactagggcaaattgttttgcttctggttcgatgcagacaaataacagtgataaagaacttgcatccagtgccatggaacggattgatagcgtgaagaacagaacaagtaaagaaacaggatttgtcactgaagcttataacaatgatgcctttagtggtggtattactgaaaagggttttgcgcagttcagtaacagttctactcacataaagcccaatgcttctggccattgttcactacctgaatcaaaaactccaacaaatggaagtgatatcaactgcatcaagggctcttcggttaatagaggtgatgttagcttcacaaatggctcgtttgtcaataggcccatcaacaacaatgaaccaaatgtagctaggcttgaggtgatggagaagttgaataatgtgatgcaaaaccgttataatgatcacgctcctggttttgatcctcatgctgcagctagtgctagccggaatgccaatggtcttatgcctatgcatgccaattttggttgcatgtcctctacagttcaatctgttgctaatgtttcaacgaccagcacatctcaagatcagtgtgatttgcaacttggatttggtgtacagaagcagcatatattttctaggcatggagagcttagaacggctacagctcgatcccctctgcctgggagcattgccaaaagaaattctgtacccactgaatcctcacagtttgagagcatggatgggcctaaatctttccccaatggaacatcgcagttcggaggctttgcaaggcctacctttgtgcctgctgcaccttctcagtttgggagcatggctcaacctaattatgtgcattcttctcaatcctctcaattcacaagcttggttcaaccgaattctgtacctcctgctgagtcctcgcagtttggaagcaaagcccaatctagttctgcaccccttgctaaaacctctcagttcaagggcatggctggaccaaattctgtacctcctgctgagccctctcagtttgggagcatgattagacctaatttggtacctcccgcatcttctcagtttttggggagcatggttcgaccaaattctgtaactccagaatcctcacagtttggaagcatgaccagaccaaactctgtacctcctgtatcgtcacagtttgttaacatgcccagtcaaaattttgtgagcgcatccgagccaactctagttttggggtacgcaccgcagattggaagtgaccctccacatcaagtccagttaggatgggatttgtccttgccaaggatggttactggcggcagcatggtcacttgtttatgtatatggtgcaacagtcagttccatcattttggccctgttgatggacagcaggctagttcttttggcttcatttgccccacctgtaaagataggatgtctggtcatcacagtatgcccagcaatggttcatggcagccttgaggtgcagtgctgtttgttaatcatctgcatttctgcatctgagggatctcgtggttttctgtacaccatgtctggcgactgttgaggacagaaaattgtccgcacaagcagaagtggtcccgcctccaagttcagtggactgtcaagggtagctgggagctggaatgtatttagttggtactagggtatgcaatgagagaagttgggtttctctactacttgtcaaagatagcaatgggagaccatgatgaattcaggccatctttttttttcttgaatccaccagttaagctggcatgtttgtcggagctatatctcaggttattttgagctctagcttcgatggggagttgacttcattattggtactgaacttaaaatgactccagtccagtgtcttgttggttgtgtaaattatttgttagctcaggtggattaggcgcctagctcttgctgtaatatttccctaacactgggcagcctttgtctatcctttcctgatgaggttctgttagtcaagctgaagtacatttctaggtaagcgtggctcttgattcttggacgtaaaatgccaagaggctatacgttcgtttccgcctgtttcaaccttacaaggtaagaagaaaggaaatccaaacagaggccaagagagcctggcagttacaaccaggctgagctgggataggccaaatgcatatacaggactgagcagagcacaagtttggttgcatgtatgag

SEQ ID NO: 41415 - DNA, 5284 bp, Zea Mays
ccacatcccccgtgaaggcgaggaggggccagcagcagtagggtagggtggaactggaactcaaagctgatacttcttccctagtctcctcggcgggcgacacgctcggatcgatccccgccgccgcagcctccctcaccctctccaatccaatccgcagctacccaatggcgacggagctgctccccgtggtggacctgcgcgtgctctcacagcccgacctggacgcgctcgccgccgcctccgcgcacgccctggcgccgcggacctgccccgacgccgacccgctcccgcctctcaagatcgaccgcgccgtcttcaacgagagcgccggttcccggaagcagaccttctcccgccgccgcctcgccgcctcgccctcgtccgcccgtcactcctcctccgcgcagacgtccaccgggcggaagaacgaccccgagggcgacctcgtcgcgtaccacctccgccgtctcttcgtccccgatgacccctcgctcccgccccctccagaaccgcaaaccctagccctactacaagagccctccccccctccgccgccggcccccgaccccgaccgggagaccaccaacgccaagggggtctccgttgaccttctcgggcttgcggcgatgccggagccctacgatgccgagctgcacaggcggacggccggtatggcctccggtaccgacctgcagggtttcatcgacagcctcgcaggggagtgggtaagccagaagaagcggaggaagaatgtggacgcgtccttcttcggggatcacctccctcgcgggtggaagctgcagctcgggctcaagcgaaacagtggatccatctgggtgcgctgcttcagctacgtgagccccaagggacgtcacttttctacttgcaaagaggtttctgcatacctcatgtcacttcttgggtatccagagctcaaaccagccgctaatcagtatgaaagcacaggacaacattactcgagtgccaacaatggtgatggtagtgttttaggtttcaaagatcaaattggtttaattacggacaagacaaatgtacagcaccacttgtcatgtcatgaaaagagggctaaaaggcgcagaactagcaagtttggtgagccagtagtgggaaaagatggtaaatttgaatgtcctatttgttttaagaccttcgaggaggaatcccggtactttggccatgttggagctcatgcaaggtatgaagggttgactcctgaagcatttgtggataagactacttatagaagggcaactaataatcacttggcagaaatttcatttggtcttcaagagttacctgaatcacatggacaaaacaataaggtttcttatggtgaaacagtctttcggcaccataatcattcaaatgaacatgttgacaataactctacggccactgagctttttagtacaaattatccagataatttcattagaccaaataaaacctggggtaggtctgaagaaggtccttccttcaatgatgcttcaagtgtatgtagatacacaaattttacgggccatgccgatttgacagttccagaaagagcatcaatctctaataatcaaagtgttagcaacattaatggttttttgggagtgtctatgtttagtgatcagccaggaagtaaccatgttatcagacctactgtctttggaacaaataatacggtggaaggaagagatgtcaacctcaattcatgtgtaaatacaatatcttttcctattgctaatgcaaataatgaaacatcagctggcctgaatgaagctaatcggttatctactactgcaaaatgttttagtggcagttctaataacaatgatggtgcatctagtgcatcttcccattgcggatcgaccaataaaatctatagttcgtatggcacaacaagcaaaacccaagctgttggctccagatgcatcagtggaagctatgagccttatggtgaagattgtggtgctcttaaagttaacccttttgccagcaagaacaatactgctgtgtatcagtctaaattgggcacacaacctgtctatgttgtggcaactagggcaaattgttttgcttctggttcgatgcagacaaataacagtgataaagaacttgcatccagtgccatggaacggattgatagcgtgaagaacagaacaagtaaagaaacaggatttgtcactgaagcttataacaatgatgcctttagtggtggtattactgaaaagggttttgcgcagttcagtaacagttctactcacataaagcccaatgcttctggccattgttcactacctgaatcaaaaactccaacaaatggaagtgatatcaactgcatcaagggctcttcggttaatagaggtgatgttagcttcacaaatggctcgtttgtcaataggcccatcaacaacaatgaaccaaatgtagctaggcttgaggtgatggagaagttgaataatgtgatgcaaaaccgttataatgatcacgctcctggttttgatcctcatgctgcagctagtgctagccggaatgccaatggtcttatgcctatgcatgccaattttggttgcatgtcctctacagttcaatctgttgctaatgtttcaacgaccagcacatctcaagatcagggaatgtcgtgtggtggatgcgcagcaagcgtgaaacgtattctggagagtgagccccaggtacggtcagcaactgttaaccttgccactgagatggcagtcgtctgggcagtgcccgaggatagtgttgttcaggattggaaggagcagctgggtgagaagcttgccaatcagttgacgacatgtggctataaatccaatcttcgagattcttcaaaggttggttcacaaacagttttcgaaagaaagatgcaagacaaacttgaacagctgaaacaaagtggtagagaacttgctgtatcatgggcattatgtgcggtttgccttgtgggacacatttctcacctttttggagttaatatgccactgatgcacgtcattcattccactggatttcatttgtctctgtcaatatttacatttgtcggtcctggtcgaagactaatacttgatggcctaaagagtctgttgaaggggtctccgaacatgaatacgctggttggtttaggtgctttgtcatcctttgcagtcagctcaattgcagccttcattccgaagctggggtggaagacattttttgaggaaccagttatgttgatagcttttgttcttctagggaagaatctggagcagagggcaaaacttaaagctaccagtgatatgactggactgcttagtattcttccatctaaagcacgcctaatggtggataatgatgctgagaaatcatcattgattgaagtcccatgtgatactctagctgttggggactatgttgttgtgctacctggggatcacatcccagcagacggtattgtgaaagctggaaggagtacagttgatgaatcaagtttgacaggtgaacctatgcctgtaacaaagataacaggggcagaagtatcagcaggaagtattaacttgaatggtaaactcactgttgaagttagaagacctggtggtgagactgtcatgtctgacatacttcacttagttgaagaagcccagacaagggcggcccctgttcaacgattggctgacaaggttgcagggaactttacatatggagtcatggcactttctgctgctacttacatgttctggagtattttgggttctcaacttgtacctgctgctatccaacatggaggtgcaatgtctttggcattacaactttcttgcagtgttctggtaattgcttgtccttgtgctcttgggcttgccactcccactgctgtactggttggcacttcattaggtgcaacaagaggacttcttttacgtggtggggatgttttggagaagttctctgatgttgatgccgttgtgtttgacaagactggaactttaacaattggtagacctgtgataactaaagtaataccttctagaggcatgggcgatgcgaatacaaaggatttgggggccaaccagtgggcagaggctgacattctgagttttgctgctggagtggaatcaaatacaaaccacccgcttggaaaagccatcatggaagctgcaggggctgccaactgcgtcattatgaaggcaaatgatggatccttcatggaagaaccaggatctggtgctgtggctaccattggtgagaagcaggtttctgttggaacattagattggattagaaggcatggggtcattcacaaccccttcccagaagcagagcattttggccagtctgttgcatatgtagcagtgaatggtgctctggctggtcttatttgttttgaggataagctcaggggagattctcgtcaagttatcgagacactatctaaacaaggaattagtgtatatatgttatctggggacaaggaaagtgctgctatgaatgtggcttcagttgtcggtatccaggcagacaaggttcttgctgaagttaaaccacatgagaaaaagaagttcatatctgaactccagaaagagcacaaggtagtcgccatggttggtgacggcattaatgatgccgcagcactagcttcagctgatgttggaatcgcaatgggtggaggtgttggggcagctagtgatgtatcttcagttgtacttatgggcaacaggttatcccagcttatcgatgctttagagttgagtaaagagaccatgaagacggtgaagcaaaatctttggtgggctttcctgtataacattgttggactacccattgctgctggagcattgcttccagctacggggacgatactgacaccatcaatagctggagctctgatgggttttagttcggtcggtgtgatggccaactcgttgcttttgagggtgaggctgagctcaaggcggaagcgagaaccactgaaagccatctctgatgaggttgagaaaaattactcatcgaaatggagtacctgagtagttcggatcttagaccatgttcacgttcactcattcatatgatttggacacacgcatcaaaggcagttgtcagttgaacaaatgaaacagatgtagtatgcaattgctgaggtcagtcagttcctgtggtttggtagatcttcatggtgtgctataatataataccccctctattccaatttataaattttttgacttttttttaccaagtttgattagcttgtcttatttattttttttcgaaaaaatagaaa

SEQ ID NO: 41416 - DNA, 3223 bp, Zea Mays
cacgcaccaacccaatccaccccccctcggcccacggcggcaccactacaccagtcagtcaccagaccactctgccgtcgccgcctacctcggcaacagtcaggacttaggacgcaactcatccccgccgcgagcaacgccaatgctccgaccgctacacgctacagccgccgccaccgctagctaggcccagccgcctcctcccttcccctccacgacgatggacccgaccacgcccgtccttgcgctctccaaggccttcgcctcctcccgcaccaagcccttcctcctcctcgccccgcaccgccgccgctccctcttcgccgcccgcgcgtctgccccctcctcgtcctccgtgccgggcgacctcctcatctcgctcgcgcggctcgcgctccgcggccccggaccccccgcggcgcctcggcggtggttcgcgagtgtctcttctgcctcgcctctcgcctcgggtggtccgccccgcggcggaggcggtcgggggaacggtgatggtgacggcggtggtggtggcgacggctggaagcgcccgcgcgcttcccagggagcgggtgtggtggaggaagcggcagcgcagggagccgatgtcatcgtccttgacgttgggggaatgtcgtgtggtggatgcgcagcaagcgtgaaacgtattctggagagtgagccccaggtacggtcagcaactgttaaccttgccactgagatggcagtcgtctgggcagtgcccgaggatagtgttgttcaggattggaaggagcagctgggtgagaagcttgccaatcagttgacgacatgtggctataaatccaatcttcgagattcttcaaaggttggttcacaaacagttttcgaaagaaagatgcaagacaaacttgaacagctgaaacaaagtggtagagaacttgctgtatcatgggcattatgtgcggtttgccttgtgggacacatttctcacctttttggagttaatatgccactgatgcacgtcattcattccactggatttcatttgtctctgtcaatatttacatttgtcggtcctggtcgaagactaatacttgatggcctaaagagtctgttgaaggggtctccgaacatgaatacgctggttggtttaggtgctttgtcatcctttgcagtcagctcaattgcagccttcattccgaagctggggtggaagacattttttgaggaaccagttatgttgatagcttttgttcttctagggaagaatctggagcagagggcaaaacttaaagctaccagtgatatgactggactgcttagtattcttccatctaaagcacgcctaatggtggataatgatgctgagaaatcatcattgattgaagtcccatgtgatactctagctgttggggactatgttgttgtgctacctggggatcacatcccagcagacggtattgtgaaagctggaaggagtacagttgatgaatcaagtttgacaggtgaacctatgcctgtaacaaagataacaggggcagaagtatcagcaggaagtattaacttgaatggtaaactcactgttgaagttagaagacctggtggtgagactgtcatgtctgacatacttcacttagttgaagaagcccagacaagggcggcccctgttcaacgattggctgacaaggttgcagggaactttacatatggagtcatggcactttctgctgctacttacatgttctggagtattttgggttctcaacttgtacctgctgctatccaacatggaggtaattgcttgtccttgtgctcttgggcttgccactcccactgctgtactggttggcacttcattaggtgcaacaagaggacttcttttacgtggtggggatgttttggagaagttctctgatgttgatgccgttgtgtttgacaagactggaactttaacaattggtagacctgtgataactaaagtaataccttctagaggcatgggcgatgcgaatacaaaggatttgggggccaaccagtgggcagaggctgacattctgagttttgctgctggagtggaatcaaatacaaaccacccgcttggaaaagccatcatggaagctgcaggggctgccaactgcgtcattatgaaggcaaatgatggatccttcatggaagaaccaggatctggtgctgtggctaccattggtgagaagcaggtttctgttggaacattagattggattagaaggcatggggtcattcacaaccccttcccagaagcagagcattttggccagtctgttgcatatgtagcagtgaatggtgctctggctggtcttatttgttttgaggataagctcaggggagattctcgtcaagttatcgagacactatctaaacaaggaattagtgtatatatgttatctggggacaaggaaagtgctgctatgaatgtggcttcagttgtcggtatccaggcagacaaggttcttgctgaagttaaaccacatgagaaaaagaagttcatatctgaactccagaaagagcacaaggtagtcgccatggttggtgacggcattaatgatgccgcagcactagcttcagctgatgttggaatcgcaatgggtggaggtgttggggcagctagtgatgtatcttcagttgtacttatgggcaacaggttatcccagcttatcgatgctttagagttgagtaaagagaccatgaagacggtgaagcaaaatctttggtgggctttcctgtataacattgttggactacccattgctgctggagcattgcttccagctacggggacgatactgacaccatcaatagctggagctctgatgggttttagttcggtcggtgtgatggccaactcgttgcttttgagggtgaggctgagctcaaggcggaagcgagaaccactgaaagccatctctgatgaggttgagaaaaattactcatcgaaatggagtacctgagtagttcggatcttagaccatgttcacgttcactcattcatatgatttggacacacgcatcaaaggcagttgtcagttgaacaaatgaaacagatgtagtatgcaattgctgaggtcagtcagttcctgtggtttggtagatcttcatggtgtgctataatataataccccctctattccaatttataaattttttgacttttttttaccaagtttgattagcttgtcttatttattttttttcgaaaaaatagaaa

SEQ ID NO: 41417 - DNA, 3250 bp, Zea Mays
ctcggcccacggcggcaccactacaccagtcagtcaccagaccactctgccgtcgccgcctacctcggcaacagtcaggacttaggacgcaactcatccccgccgcgagcaacgccaatgctccgaccgctacacgctacagccgccgccaccgctagctaggcccagccgcctcctcccttcccctccacgacgatggacccgaccacgcccgtccttgcgctctccaaggccttcgcctcctcccgcaccaagcccttcctcctcctcgccccgcaccgccgccgctccctcttcgccgcccgcgcgtctgccccctcctcgtcctccgtgccgggcgacctcctcatctcgctcgcgcggctcgcgctccgcggccccggaccccccgcggcgcctcggcggtggttcgcgagtgtctcttctgcctcgcctctcgcctcgggtggtccgccccgcggcggaggcggtcgggggaacggtgatggtgacggcggtggtggtggcgacggctggaagcgcccgcgcgcttcccagggagcgggtgtggtggaggaagcggcagcgcagggagccgatgtcatcgtccttgacgttgggcttcgttgcagggaatgtcgtgtggtggatgcgcagcaagcgtgaaacgtattctggagagtgagccccaggtacggtcagcaactgttaaccttgccactgagatggcagtcgtctgggcagtgcccgaggatagtgttgttcaggattggaaggagcagctgggtgagaagcttgccaatcagttgacgacatgtggctataaatccaatcttcgagattcttcaaaggttggttcacaaacagttttcgaaagaaagatgcaagacaaacttgaacagctgaaacaaagtggtagagaacttgctgtatcatgggcattatgtgcggtttgccttgtgggacacatttctcacctttttggagttaatatgccactgatgcacgtcattcattccactggatttcatttgtctctgtcaatatttacatttgtcggtcctggtcgaagactaatacttgatggcctaaagagtctgttgaaggggtctccgaacatgaatacgctggttggtttaggtgctttgtcatcctttgcagtcagctcaattgcagccttcattccgaagctggggtggaagacattttttgaggaaccagttatgttgatagcttttgttcttctagggaagaatctggagcagagggcaaaacttaaagctaccagtgatatgactggactgcttagtattcttccatctaaagcacgcctaatggtggataatgatgctgagaaatcatcattgattgaagtcccatgtgatactctagctgttggggactatgttgttgtgctacctggggatcacatcccagcagacggtattgtgaaagctggaaggagtacagttgatgaatcaagtttgacaggtgaacctatgcctgtaacaaagataacaggggcagaagtatcagcaggaagtattaacttgaatggtaaactcactgttgaagttagaagacctggtggtgagactgtcatgtctgacatacttcacttagttgaagaagcccagacaagggcggcccctgttcaacgattggctgacaaggttgcagggaactttacatatggagtcatggcactttctgctgctacttacatgttctggagtattttgggttctcaacttgtacctgctgctatccaacatggaggtgcaatgtctttggcattacaactttcttgcagtgttctggtaattgcttgtccttgtgctcttgggcttgccactcccactgctgtactggttggcacttcattaggtgcaacaagaggacttcttttacgtggtggggatgttttggagaagttctctgatgttgatgccgttgtgtttgacaagactggaactttaacaattggtagacctgtgataactaaagtaataccttctagaggcatgggcgatgcgaatacaaaggatttgggggccaaccagtgggcagaggctgacattctgagttttgctgctggagtggaatcaaatacaaaccacccgcttggaaaagccatcatggaagctgcaggggctgccaactgcgtcattatgaaggcaaatgatggatccttcatggaagaaccaggatctggtgctgtggctaccattggtgagaagcaggtttctgttggaacattagattggattagaaggcatggggtcattcacaaccccttcccagaagcagagcattttggccagtctgttgcatatgtagcagtgaatggtgctctggctggtcttatttgttttgaggataagctcaggggagattctcgtcaagttatcgagacactatctaaacaaggaattagtgtatatatgttatctggggacaaggaaagtgctgctatgaatgtggcttcagttgtcggtatccaggcagacaaggttcttgctgaagttaaaccacatgagaaaaagaagttcatatctgaactccagaaagagcacaaggtagtcgccatggttggtgacggcattaatgatgccgcagcactagcttcagctgatgttggaatcgcaatgggtggaggtgttggggcagctagtgatgtatcttcagttgtacttatgggcaacaggttatcccagcttatcgatgctttagagttgagtaaagagaccatgaagacggtgaagcaaaatctttggtgggctttcctgtataacattgttggactacccattgctgctggagcattgcttccagctacggggacgatactgacaccatcaatagctggagctctgatgggttttagttcggtcggtgtgatggccaactcgttgcttttgagggtgaggctgagctcaaggcggaagcgagaaccactgaaagccatctctgatgaggttgagaaaaattactcatcgaaatggagtacctgagtagttcggatcttagaccatgttcacgttcactcattcatatgatttggacacacgcatcaaaggcagttgtcagttgaacaaatgaaacagatgtagtatgcaattgctgaggtcagtcagttcctgtggtttggtagatcttcatggtgtgctataatataataccccctctattccaatttataaattttttgacttttttttaccaagtttgattagcttgtcttatttattttttttcgaaaaaatagaaa

SEQ ID NO: 41418 - DNA, 2913 bp, Zea Mays
cagtcagtcaccagaccactctgccgtcgccgcctacctcggcaacagtcaggacttaggacgcaactcatccccgccgcgagcaacgccaatgctccgaccgctacacgctacagccgccgccaccgctagctaggcccagccgcctcctcccttcccctccacgacgatggacccgaccacgcccgtccttgcgctctccaaggccttcgcctcctcccgcaccaagcccttcctcctcctcgccccgcaccgccgccgctccctcttcgccgcccgcgcgtctgccccctcctcgtcctccgtgccgggcgacctcctcatctcgctcgcgcggctcgcgctccgcggccccggaccccccgcggcgcctcggcggtggttcgcgagtgtctcttctgcctcgcctctcgcctcgggtggtccgccccgcggcggaggcggtcgggggaacggtgatggtgacggcggtggtggtggcgacggctggaagcgcccgcgcgcttcccagggagcgggtgtggtggaggaagcggcagcgcagggagccgatgtcatcgtccttgacgttgggggaatgtcgtgtggtggatgcgcagcaagcgtgaaacgtattctggagagtgagccccaggtacggtcagcaactgttaaccttgccactgagatggcagtcgtctgggcagtgcccgaggatagtgttgttcaggattggaaggagcagctgggtgagaagcttgccaatcagttgacgacatgtggctataaatccaatcttcgagattcttcaaaggttggttcacaaacagttttcgaaagaaagatgcaagacaaacttgaacagctgaaacaaagtggggtggaagacattttttgaggaaccagttatgttgatagcttttgttcttctagggaagaatctggagcagagggcaaaacttaaagctaccagtgatatgactggactgcttagtattcttccatctaaagcacgcctaatggtggataatgatgctgagaaatcatcattgattgaagtcccatgtgatactctagctgttggggactatgttgttgtgctacctggggatcacatcccagcagacggtattgtgaaagctggaaggagtacagttgatgaatcaagtttgacaggtgaacctatgcctgtaacaaagataacaggggcagaagtatcagcaggaagtattaacttgaatggtaaactcactgttgaagttagaagacctggtggtgagactgtcatgtctgacatacttcacttagttgaagaagcccagacaagggcggcccctgttcaacgattggctgacaaggttgcagggaactttacatatggagtcatggcactttctgctgctacttacatgttctggagtattttgggttctcaacttgtacctgctgctatccaacatggaggtgcaatgtctttggcattacaactttcttgcagtgttctggtaattgcttgtccttgtgctcttgggcttgccactcccactgctgtactggttggcacttcattaggtgcaacaagaggacttcttttacgtggtggggatgttttggagaagttctctgatgttgatgccgttgtgtttgacaagactggaactttaacaattggtagacctgtgataactaaagtaataccttctagaggcatgggcgatgcgaatacaaaggatttgggggccaaccagtgggcagaggctgacattctgagttttgctgctggagtggaatcaaatacaaaccacccgcttggaaaagccatcatggaagctgcaggggctgccaactgcgtcattatgaaggcaaatgatggatccttcatggaagaaccaggatctggtgctgtggctaccattggtgagaagcaggtttctgttggaacattagattggattagaaggcatggggtcattcacaaccccttcccagaagcagagcattttggccagtctgttgcatatgtagcagtgaatggtgctctggctggtcttatttgttttgaggataagctcaggggagattctcgtcaagttatcgagacactatctaaacaaggaattagtgtatatatgttatctggggacaaggaaagtgctgctatgaatgtggcttcagttgtcggtatccaggcagacaaggttcttgctgaagttaaaccacatgagaaaaagaagttcatatctgaactccagaaagagcacaaggtagtcgccatggttggtgacggcattaatgatgccgcagcactagcttcagctgatgttggaatcgcaatgggtggaggtgttggggcagctagtgatgtatcttcagttgtacttatgggcaacaggttatcccagcttatcgatgctttagagttgagtaaagagaccatgaagacggtgaagcaaaatctttggttggactacccattgctgctggagcattgcttccagctacggggacgatactgacaccatcaatagctggagctctgatgggttttagttcggtcggtgtgatggccaactcgttgcttttgagggtgaggctgagctcaaggcggaagcgagaaccactgaaagccatctctgatgaggttgagaaaaattactcatcgaaatggagtacctgagtagttcggatcttagaccatgttcacgttcactcattcatatgatttggacacacgcatcaaaggcagttgtcagttgaacaaatgaaacagatgtagtatgcaattgctgaggtcagtcagttcctgtggtttggtagatcttcatggtgtgctataatataataccccctctattccaatttataaattttttgacttttttttaccaagtttgattagcttgtcttatttattttttttcgaaaaaatagaaa

SEQ ID NO: 41419 - DNA, 2911 bp, Zea Mays
ctgccgtcgccgcctacctcggcaacagtcaggacttaggacgcaactcatccccgccgcgagcaacgccaatgctccgaccgctacacgctacagccgccgccaccgctagctaggcccagccgcctcctcccttcccctccacgacgatggacccgaccacgcccgtccttgcgctctccaaggccttcgcctcctcccgcaccaagcccttcctcctcctcgccccgcaccgccgccgctccctcttcgccgcccgcgcgtctgccccctcctcgtcctccgtgccgggcgacctcctcatctcgctcgcgcggctcgcgctccgcggccccggaccccccgcggcgcctcggcggtggttcgcgagtgtctcttctgcctcgcctctcgcctcgggtggtccgccccgcggcggaggcggtcgggggaacggtgatggtgacggcggtggtggtggcgacggctggaagcgcccgcgcgcttcccagggagcgggtgtggtggaggaagcggcagcgcagggagccgatgtcatcgtccttgacgttgggggaatgtcgtgtggtggatgcgcagcaagcgtgaaacgtattctggagagtgagccccaggtacggtcagcaactgttaaccttgccactgagatggcagtcgtctgggcagtgcccgaggatagtgttgttcaggattggaaggagcagctgggtgagaagcttgccaatcagttgacgacatgtggctataaatccaatcttcgagattcttcaaaggttggttcacaaacagttttcgaaagaaagatgcaagacaaacttgaacagctgaaacaaagtggggtggaagacattttttgaggaaccagttatgttgatagcttttgttcttctagggaagaatctggagcagagggcaaaacttaaagctaccagtgatatgactggactgcttagtattcttccatctaaagcacgcctaatggtggataatgatgctgagaaatcatcattgattgaagtcccatgtgatactctagctgttggggactatgttgttgtgctacctggggatcacatcccagcagacggtattgtgaaagctggaaggagtacagttgatgaatcaagtttgacaggtgaacctatgcctgtaacaaagataacagggaagtatcagcaggaagtattaacttgaatggtaaactcactgttgaagttagaagacctggtggtgagactgtcatgtctgacatacttcacttagttgaagaagcccagacaagggcggcccctgttcaacgattggctgacaaggttgcagggaactttacatatggagtcatggcactttctgctgctacttacatgttctggagtattttgggttctcaacttgtacctgctgctatccaacatggaggtgcaatgtctttggcattacaactttcttgcagtgttctggtaattgcttgtccttgtgctcttgggcttgccactcccactgctgtactggttggcacttcattaggtgcaacaagaggacttcttttacgtggtggggatgttttggagaagttctctgatgttgatgccgttgtgtttgacaagactggaactttaacaattggtagacctgtgataactaaagtaataccttctagaggcatgggcgatgcgaatacaaaggatttgggggccaaccagtgggcagaggctgacattctgagttttgctgctggagtggaatcaaatacaaaccacccgcttggaaaagccatcatggaagctgcaggggctgccaactgcgtcattatgaaggcaaatgatggatccttcatggaagaaccaggatctggtgctgtggctaccattggtgagaagcaggtttctgttggaacattagattggattagaaggcatggggtcattcacaaccccttcccagaagcagagcattttggccagtctgttgcatatgtagcagtgaatggtgctctggctggtcttatttgttttgaggataagctcaggggagattctcgtcaagttatcgagacactatctaaacaaggaattagtgtatatatgttatctggggacaaggaaagtgctgctatgaatgtggcttcagttgtcggtatccaggcagacaaggttcttgctgaagttaaaccacatgagaaaaagaagttcatatctgaactccagaaagagcacaaggtagtcgccatggttggtgacggcattaatgatgccgcagcactagcttcagctgatgttggaatcgcaatgggtggaggtgttggggcagctagtgatgtatcttcagttgtacttatgggcaacaggttatcccagcttatcgatgctttagagttgagtaaagagaccatgaagacggtgaagcaaaatctttggtgggctttcctgtataacattgttggactacccattgctgctggagcattgcttccagctacggggacgatactgacaccatcaatagctggagctctgatgggttttagttcggtcggtgtgatggccaactcgttgcttttgagggtgaggctgagctcaaggcggaagcgagaaccactgaaagccatctctgatgaggttgagaaaaattactcatcgaaatggagtacctgagtagttcggatcttagaccatgttcacgttcactcattcatatgatttggacacacgcatcaaaggcagttgtcagttgaacaaatgaaacagatgtagtatgcaattgctgaggtcagtcagttcctgtggtttggtagatcttcatggtgtgctataatataataccccctctattccaatttataaattttttgacttttttttaccaagtttgattagcttgtcttatttattttttttcgaaaaaatagaaa

SEQ ID NO: 41420 - DNA, 3127 bp, Zea Mays
ctcggcaacagtcaggacttaggacgcaactcatccccgccgcgagcaacgccaatgctccgaccgctacacgctacagccgccgccaccgctagctaggcccagccgcctcctcccttcccctccacgacgatggacccgaccacgcccgtccttgcgctctccaaggccttcgcctcctcccgcaccaagcccttcctcctcctcgccccgcaccgccgccgctccctcttcgccgcccgcgcgtctgccccctcctcgtcctccgtgccgggcgacctcctcatctcgctcgcgcggctcgcgctccgcggccccggaccccccgcggcgcctcggcggtggttcgcgagtgtctcttctgcctcgcctctcgcctcgggtggtccgccccgcggcggaggcggtcgggggaacggtgatggtgacggcggtggtggtggcgacggctggaagcgcccgcgcgcttcccagggagcgggtgtggtggaggaagcggcagcgcagggagccgatgtcatcgtccttgacgttgggggaatgtcgtgtggtggatgcgcagcaagcgtgaaacgtattctggagagtgagccccaggtacggtcagcaactgttaaccttgccactgagatggcagtcgtctgggcagtgcccgaggatagtgttgttcaggattggaaggagcagctgggtgagaagcttgccaatcagttgacgacatgtggctataaatccaatcttcgagattcttcaaaggttggttcacaaacagttttcgaaagaaagatgcaagacaaacttgaacagctgaaacaaagtggtagagaacttgctgtatcatgggcattatgtgcggtttgccttgtgggacacatttctcacctttttggagttaatatgccactgatgcacgtcattcattccactggatttcatttgtctctgtcaatatttacatttgtcggtcctggtcgaagactaatacttgatggcctaaagagtctgttgaaggggtctccgaacatgaatacgctggttggtttaggtgctttgtcatcctttgcagtcagctcaattgcagccttcattccgaagctgaatctggagcagagggcaaaacttaaagctaccagtgatatgactggactgcttagtattcttccatctaaagcacgcctaatggtggataatgatgctgagaaatcatcattgattgaagtcccatgtgatactctagctgttggggactatgttgttgtgctacctggggatcacatcccagcagacggtattgtgaaagctggaaggagtacagttgatgaatcaagtttgacaggtgaacctatgcctgtaacaaagataacaggggcagaagtatcagcaggaagtattaacttgaatggtaaactcactgttgaagttagaagacctggtggtgagactgtcatgtctgacatacttcacttagttgaagaagcccagacaagggcggcccctgttcaacgattggctgacaaggttgcagggaactttacatatggagtcatggcactttctgctgctacttacatgttctggagtattttgggttctcaacttgtacctgctgctatccaacatggaggtgcaatgtctttggcattacaactttcttgcagtgttctggtaattgcttgtccttgtgctcttgggcttgccactcccactgctgtactggttggcacttcattaggtgcaacaagaggacttcttttacgtggtggggatgttttggagaagttctctgatgttgatgccgttgtgtttgacaagactggaactttaacaattggtagacctgtgataactaaagtaataccttctagaggcatgggcgatgcgaatacaaaggatttgggggccaaccagtgggcagaggctgacattctgagttttgctgctggagtggaatcaaatacaaaccacccgcttggaaaagccatcatggaagctgcaggggctgccaactgcgtcattatgaaggcaaatgatggatccttcatggaagaaccaggatctggtgctgtggctaccattggtgagaagcaggtttctgttggaacattagattggattagaaggcatggggtcattcacaaccccttcccagaagcagagcattttggccagtctgttgcatatgtagcagtgaatggtgctctggctggtcttatttgttttgaggataagctcaggggagattctcgtcaagttatcgagacactatctaaacaaggaattagtgtatatatgttatctggggacaaggaaagtgctgctatgaatgtggcttcagttgtcggtatccaggcagacaaggttcttgctgaagttaaaccacatgagaaaaagaagttcatatctgaactccagaaagagcacaaggtagtcgccatggttggtgacggcattaatgatgccgcagcactagcttcagctgatgttggaatcgcaatgggtggaggtgttggggcagctagtgatgtatcttcagttgtacttatgggcaacaggttatcccagcttatcgatgctttagagttgagtaaagagaccatgaagacggtgaagcaaaatctttggtgggctttcctgtataacattttactctgcaggttggactacccattgctgctggagcattgcttccagctacggggacgatactgacaccatcaatagctggagctctgatgggttttagttcggtcggtgtgatggccaactcgttgcttttgagggtgaggctgagctcaaggcggaagcgagaaccactgaaagccatctctgatgaggttgagaaaaattactcatcgaaatggagtacctgagtagttcggatcttagaccatgttcacgttcactcattcatatgatttggacacacgcatcaaaggcagttgtcagttgaacaaatgaaacagatgtagtatgcaattgctgaggtcagtcagttcctgtggtttggtagatcttcatggtgtgctataatataataccccctctattccaatttataaattttttgacttttttttaccaagtttgattagcttgtcttatttattttttttcgaaaaaatagaaa

SEQ ID NO: 41421 - DNA, 3116 bp, Zea Mays
ctcggcaacagtcaggacttaggacgcaactcatccccgccgcgagcaacgccaatgctccgaccgctacacgctacagccgccgccaccgctagctaggcccagccgcctcctcccttcccctccacgacgatggacccgaccacgcccgtccttgcgctctccaaggccttcgcctcctcccgcaccaagcccttcctcctcctcgccccgcaccgccgccgctccctcttcgccgcccgcgcgtctgccccctcctcgtcctccgtgccgggcgacctcctcatctcgctcgcgcggctcgcgctccgcggccccggaccccccgcggcgcctcggcggtggttcgcgagtgtctcttctgcctcgcctctcgcctcgggtggtccgccccgcggcggaggcggtcgggggaacggtgatggtgacggcggtggtggtggcgacggctggaagcgcccgcgcgcttcccagggagcgggtgtggtggaggaagcggcagcgcagggagccgatgtcatcgtccttgacgttgggggaatgtcgtgtggtggatgcgcagcaagcgtgaaacgtattctggagagtgagccccaggtacggtcagcaactgttaaccttgccactgagatggcagtcgtctgggcagtgcccgaggatagtgttgttcaggattggaaggagcagctgggtgagaagcttgccaatcagttgacgacatgtggctataaatccaatcttcgagattcttcaaaggttggttcacaaacagttttcgaaagaaagatgcaagacaaacttgaacagctgaaacaaagtggtagagaacttgctgtatcatgggcattatgtgcggtttgccttgtgggacacatttctcacctttttggagttaatatgccactgatgcacgtcattcattccactggatttcatttgtctctgtcaatatttacatttgtcggtcctggtcgaagactaatacttgatggcctaaagagtctgttgaaggggtctccgaacatgaatacgctggttggtttaggtgctttgtcatcctttgcagtcagctcaattgcagccttcattccgaagctgaatctggagcagagggcaaaacttaaagctaccagtgatatgactggactgcttagtattcttccatctaaagcacgcctaatggtggataatgatgctgagaaatcatcattgattgaagtcccatgtgatactctagctgttggggactatgttgttgtgctacctggggatcacatcccagcagacggtattgtgaaagctggaaggagtacagttgatgaatcaagtttgacaggtgaacctatgcctgtaacaaagataacaggggcagaagtatcagcaggaagtattaacttgaatggtaaactcactgttgaagttagaagacctggtggtgagactgtcatgtctgacatacttcacttagttgaagaagcccagacaagggcggcccctgttcaacgattggctgacaaggttgcagggaactttacatatggagtcatggcactttctgctgctacttacatgttctggagtattttgggttctcaacttgtacctgctgctatccaacatggaggtgcaatgtctttggcattacaactttcttgcagtgttctggtaattgcttgtccttgtgctcttgggcttgccactcccactgctgtactggttggcacttcattaggtgcaacaagaggacttcttttacgtggtggggatgttttggagaagttctctgatgttgatgccgttgtgtttgacaagactggaactttaacaattggtagacctgtgataactaaagtaataccttctagaggcatgggcgatgcgaatacaaaggatttgggggccaaccagtgggcagaggctgacattctgagttttgctgctggagtggaatcaaatacaaaccacccgcttggaaaagccatcatggaagctgcaggggctgccaactgcgtcattatgaaggcaaatgatggatccttcatggaagaaccaggatctggtgctgtggctaccattggtgagaagcaggtttctgttggaacattagattggattagaaggcatggggtcattcacaaccccttcccagaagcagagcattttggccagtctgttgcatatgtagcagtgaatggtgctctggctggtcttatttgttttgaggataagctcaggggagattctcgtcaagttatcgagacactatctaaacaaggaattagtgtatatatgttatctggggacaaggaaagtgctgctatgaatgtggcttcagttgtcggtatccaggcagacaaggttcttgctgaagttaaaccacatgagaaaaagaagttcatatctgaactccagaaagagcacaaggtagtcgccatggttggtgacggcattaatgatgccgcagcactagcttcagctgatgttggaatcgcaatgggtggaggtgttggggcagctagtgatgtatcttcagttgtacttatgggcaacaggttatcccagcttatcgatgctttagagttgagtaaagagaccatgaagacggtgaagcaaaatctttggtgggctttcctgtataacattgttggactacccattgctgctggagcattgcttccagctacggggacgatactgacaccatcaatagctggagctctgatgggttttagttcggtcggtgtgatggccaactcgttgcttttgagggtgaggctgagctcaaggcggaagcgagaaccactgaaagccatctctgatgaggttgagaaaaattactcatcgaaatggagtacctgagtagttcggatcttagaccatgttcacgttcactcattcatatgatttggacacacgcatcaaaggcagttgtcagttgaacaaatgaaacagatgtagtatgcaattgctgaggtcagtcagttcctgtggtttggtagatcttcatggtgtgctataatataataccccctctattccaatttataaattttttgacttttttttaccaagtttgattagcttgtcttatttattttttttcgaaaaaatagaaa

SEQ ID NO: 41422 - DNA, 3319 bp, Zea Mays
ctcggcaacagtcaggacttaggacgcaactcatccccgccgcgagcaacgccaatgctccgaccgctacacgctacagccgccgccaccgctagctaggcccagccgcctcctcccttcccctccacgacgatggacccgaccacgcccgtccttgcgctctccaaggccttcgcctcctcccgcaccaagcccttcctcctcctcgccccgcaccgccgccgctccctcttcgccgcccgcgcgtctgccccctcctcgtcctccgtgccgggcgacctcctcatctcgctcgcgcggctcgcgctccgcggccccggaccccccgcggcgcctcggcggtggttcgcgagtgtctcttctgcctcgcctctcgcctcgggtggtccgccccgcggcggaggcggtcgggggaacggtgatggtgacggcggtggtggtggcgacggctggaagcgcccgcgcgcttcccagggagcgggtgtggtggaggaagcggcagcgcagggagccgatgtcatcgtccttgacgttgggggaatgtcgtgtggtggatgcgcagcaagcgtgaaacgtattctggagagtgagccccaggtacggtcagcaactgttaaccttgccactgagatggcagtcgtctgggcagtgcccgaggatagtgttgttcaggattggaaggagcagctgggtgagaagcttgccaatcagttgacgacatgtggctataaatccaatcttcgagattcttcaaaggttggttcacaaacagttttcgaaagaaagatgcaagacaaacttgaacagctgaaacaaagtggtagagaacttgctgtatcatgggcattatgtgcggtttgccttgtgggacacatttctcacctttttggagttaatatgccactgatgcacgtcattcattccactggatttcatttgtctctgtcaatatttacatttgtcggtcctggtcgaagactaatacttgatggcctaaagagtctgttgaaggggtctccgaacatgaatacgctggttggtttaggtgctttgtcatcctttgcagtcagctcaattgcagccttcattccgaagggtggaagacattttttgaggaaccagttatgttgatagcttttgttcttctagggaagaatctggagcagagggcaaaacttaaagctaccagtgatatgactggactgcttagtattcttccatctaaagcacgcctaatggtggataatgatgctgagaaatcatcattgattgaagtcccatgtgatactctagctgttggggactatgttgttgtgctacctggggatcacatcccagcagacggtattgtgaaagctggaaggagtacagttgatgaatcaagtttgacaggtgaacctatgcctgtaacaaagataacaggggcagaagtatcagcaggaagtattaacttgaatggtaaactcactgttgaagttagaagacctggtggtgagactgtcatgtctgacatacttcacttagttgaagaagcccagacaagggcggcccctgttcaacgattggctgacaaggttgcagggaactttacatatggagtcatggcactttctgctgctacttacatgttctggagtattttgggttctcaacttgtacctgctgctatccaacatggaggtaattgcttgtccttgtgctcttgggcttgccactcccactgctgtactggttggcacttcattaggtgcaacaagaggacttcttttacgtggtggggatgttttggagaagttctctgatgttgatgccgttgtgtttgacaagactggaactttaacaattggtagacctgtgataactaaagtaataccttctagaggcatgggcgatgcgaatacaaaggatttgggggccaaccagtgggcagaggctgacattctgagttttgctgctggagtggaatcaaatacaaaccacccgcttggaaaagccatcatggaagctgcaggggctgccaactgcgtcattatgaaggcaaatgatggatccttcatggaagaaccaggatctggtgctgtggctaccattggtgagaagcaggtttctgttggaacattagattggattagaaggtacatatgagttttttgttctacagctatgccctatgctaaattcactaacaacatgagacacttctaatcgtctcttgttcctggtataccttatgtaaatgctatctgttttaaagttttctccctgcactgtcttgtaaaagtgtatgttgagcctgtttgctagtaaaattataatatttcaggcatggggtcattcacaaccccttcccagaagcagagcattttggccagtctgttgcatatgtagcagtgaatggtgctctggctggtcttatttgttttgaggataagctcaggggagattctcgtcaagttatcgagacactatctaaacaaggaattagtgtatatatgttatctggggacaaggaaagtgctgctatgaatgtggcttcagttgtcggtatccaggcagacaaggttcttgctgaagttaaaccacatgagaaaaagaagttcatatctgaactccagaaagagcacaaggtagtcgccatggttggtgacggcattaatgatgccgcagcactagcttcagctgatgttggaatcgcaatgggtggaggtgttggggcagctagtgatgtatcttcagttgtacttatgggcaacaggttatcccagcttatcgatgctttagagttgagtaaagagaccatgaagacggtgaagcaaaatctttggtgggctttcctgtataacattgttggactacccattgctgctggagcattgcttccagctacggggacgatactgacaccatcaatagctggagctctgatgggttttagttcggtcggtgtgatggccaactcgttgcttttgagggtgaggctgagctcaaggcggaagcgagaaccactgaaagccatctctgatgaggttgagaaaaattactcatcgaaatggagtacctgagtagttcggatcttagaccatgttcacgttcactcattcatatgatttggacacacgcatcaaaggcagttgtcagttgaacaaatgaaacagatgtagtatgcaattgctgaggtcagtcagttcctgtggtttggtagatcttcatggtgtgctataatataataccccctctattccaatttataaattttttgacttttttttaccaagtttgattagcttgtcttatttattttttttcgaaaaaatagaaa

SEQ ID NO: 41423 - DNA, 3113 bp, Zea Mays
ctcggcaacagtcaggacttaggacgcaactcatccccgccgcgagcaacgccaatgctccgaccgctacacgctacagccgccgccaccgctagctaggcccagccgcctcctcccttcccctccacgacgatggacccgaccacgcccgtccttgcgctctccaaggccttcgcctcctcccgcaccaagcccttcctcctcctcgccccgcaccgccgccgctccctcttcgccgcccgcgcgtctgccccctcctcgtcctccgtgccgggcgacctcctcatctcgctcgcgcggctcgcgctccgcggccccggaccccccgcggcgcctcggcggtggttcgcgagtgtctcttctgcctcgcctctcgcctcgggtggtccgccccgcggcggaggcggtcgggggaacggtgatggtgacggcggtggtggtggcgacggctggaagcgcccgcgcgcttcccagggagcgggtgtggtggaggaagcggcagcgcagggagccgatgtcatcgtccttgacgttgggggaatgtcgtgtggtggatgcgcagcaagcgtgaaacgtattctggagagtgagccccaggtacggtcagcaactgttaaccttgccactgagatggcagtcgtctgggcagtgcccgaggatagtgttgttcaggattggaaggagcagctgggtgagaagcttgccaatcagttgacgacatgtggctataaatccaatcttcgagattcttcaaaggttggttcacaaacagttttcgaaagaaagatgcaagacaaacttgaacagctgaaacaaagtggtagagaacttgctgtatcatgggcattatgtgcggtttgccttgtgggacacatttctcacctttttggagttaatatgccactgatgcacgtcattcattccactggatttcatttgtctctgtcaatatttacatttgtcggtcctggtcgaagactaatacttgatggcctaaagagtctgttgaaggggtctccgaacatgaatacgctggttggtttaggtgctttgtcatcctttgcagtcagctcaattgcagccttcattccgaagctggggtggaagacattttttgaggaaccagttatgttgatagcttttgttcttctagggaagaatctggagcagagggcaaaacttaaagctaccagtgatatgactggactgcttagtattcttccatctaaagcacgcctaatggtggataatgatgctgagaaatcatcattgattgaagtcccatgtgatactctagctgttggggactatgttgttgtgctacctggggatcacatcccagcagacggtattgtgaaagctggaaggagtacagttgatgaatcaagtttgacaggtgaacctatgcctgtaacaaagataacaggggcagaagtatcagcaggaagtattaacttgaatggtaaactcactgttgaagttagaagacctggtggtgagactgtcatgtctgacatacttcacttagttgaagaagcccagacaagggcggcccctgttcaacgattggctgacaaggttgcagggaactttacatatggagtcatggcactttctgctgctacttacatgttctggagtattttgggttctcaacttgtacctgctgctatccaacatggaggtaattgcttgtccttgtgctcttgggcttgccactcccactgctgtactggttggcacttcattaggtgcaacaagaggacttcttttacgtggtggggatgttttggagaagttctctgatgttgatgccgttgtgtttgacaagactggaactttaacaattggtagacctgtgataactaaagtaataccttctagaggcatgggcgatgcgaatacaaaggatttgggggccaaccagtgggcagaggctgacattctgagttttgctgctggagtggaatcaaatacaaaccacccgcttggaaaagccatcatggaagctgcaggggctgccaactgcgtcattatgaaggcaaatgatggatccttcatggaagaaccaggatctggtgctgtggctaccattggtgagaagcaggtttctgttggaacattagattggattagaaggcatggggtcattcacaaccccttcccagaagcagagcattttggccagtctgttgcatatgtagcagtgaatggtgctctggctggtcttatttgttttgaggataagctcaggggagattctcgtcaagttatcgagacactatctaaacaaggaattagtgtatatatgttatctggggacaaggaaagtgctgctatgaatgtggcttcagttgtcggtatccaggcagacaaggttcttgctgaagttaaaccacatgagaaaaagaagttcatatctgaactccagaaagagcacaaggtagtcgccatggttggtgacggcattaatgatgccgcagcactagcttcagctgatgttggaatcgcaatgggtggaggtgttggggcagctagtgatgtatcttcagttgtacttatgggcaacaggttatcccagcttatcgatgctttagagttgagtaaagagaccatgaagacggtgaagcaaaatctttggttggactacccattgctgctggagcattgcttccagctacggggacgatactgacaccatcaatagctggagctctgatgggttttagttcggtcggtgtgatggccaactcgttgcttttgagggtgaggctgagctcaaggcggaagcgagaaccactgaaagccatctctgatgaggttgagaaaaattactcatcgaaatggagtacctgagtagttcggatcttagaccatgttcacgttcactcattcatatgatttggacacacgcatcaaaggcagttgtcagttgaacaaatgaaacagatgtagtatgcaattgctgaggtcagtcagttcctgtggtttggtagatcttcatggtgtgctataatataataccccctctattccaatttataaattttttgacttttttttaccaagtttgattagcttgtcttatttattttttttcgaaaaaatagaaa

SEQ ID NO: 41424 - DNA, 1261 bp, Zea Mays
ctccggttttatatgttgtactgtattacactagggatttgggggccaaccagtgggcagaggctgacattctgagttttgctgctggagtggaatcaaatacaaaccacccgcttggaaaagccatcatggaagctgcaggggctgccaactgcgtcattatgaaggcaaatgatggatccttcatggaagaaccaggatctggtgctgtggctaccattggtgagaagcaggtttctgttggaacattagattggattagaaggcatggggtcattcacaaccccttcccagaagcagagcattttggccagtctgttgcatatgtagcagtgaatggtgctctggctggtcttatttgttttgaggataagctcaggggagattctcgtcaagttatcgagacactatctaaacaaggaattagtgtatatatgttatctggggacaaggaaagtgctgctatgaatgtggcttcagttgtcggtatccaggcagacaaggttcttgctgaagttaaaccacatgagaaaaagaagttcatatctgaactccagaaagagcacaaggtagtcgccatggttggtgacggcattaatgatgccgcagcactagcttcagctgatgttggaatcgcaatgggtggaggtgttggggcagctagtgatgtatcttcagttgtacttatgggcaacaggttatcccagcttatcgatgctttagagttgagtaaagagaccatgaagacggtgaagcaaaatctttggtgggctttcctgtataacattgttggactacccattgctgctggagcattgcttccagctacggggacgatactgacaccatcaatagctggagctctgatgggttttagttcggtcggtgtgatggccaactcgttgcttttgagggtgaggctgagctcaaggcggaagcgagaaccactgaaagccatctctgatgaggttgagaaaaattactcatcgaaatggagtacctgagtagttcggatcttagaccatgttcacgttcactcattcatatgatttggacacacgcatcaaaggcagttgtcagttgaacaaatgaaacagatgtagtatgcaattgctgaggtcagtcagttcctgtggtttggtagatcttcatggtgtgctataatataataccccctctattccaatttataaattttttgacttttttttaccaagtttgattagcttgtcttatttattttttttcgaaaaaatagaaa

SEQ ID NO: 41425 - DNA, 794 bp, Zea Mays
gaaaggataaatatgtgaaatcatttaaatgctattgttcttgctgaagttaaaccacatgagaaaaagaagttcatatctgaactccagaaagagcacaaggtagtcgccatggttggtgacggcattaatgatgccgcagcactagcttcagctgatgttggaatcgcaatgggtggaggtgttggggcagctagtgatgtatcttcagttgtacttatgggcaacaggttatcccagcttatcgatgctttagagttgagtaaagagaccatgaagacggtgaagcaaaatctttggtgggctttcctgtataacattgttggactacccattgctgctggagcattgcttccagctacggggacgatactgacaccatcaatagctggagctctgatgggttttagttcggtcggtgtgatggccaactcgttgcttttgagggtgaggctgagctcaaggcggaagcgagaaccactgaaagccatctctgatgaggttgagaaaaattactcatcgaaatggagtacctgagtagttcggatcttagaccatgttcacgttcactcattcatatgatttggacacacgcatcaaaggcagttgtcagttgaacaaatgaaacagatgtagtatgcaattgctgaggtcagtcagttcctgtggtttggtagatcttcatggtgtgctataatataataccccctctattccaatttataaattttttgacttttttttaccaagtttgattagcttgtcttatttattttttttcgaaaaaatagaaa

SEQ ID NO: 41426 - DNA, 785 bp, Zea Mays
acataataccgtgggggcggtccgcaggttcttgctgaagttaaaccacatgagaaaaagaagttcatatctgaactccagaaagagcacaaggtagtcgccatggttggtgacggcattaatgatgccgcagcactagcttcagctgatgttggaatcgcaatgggtggaggtgttggggcagctagtgatgtatcttcagttgtacttatgggcaacaggttatcccagcttatcgatgctttagagttgagtaaagagaccatgaagacggtgaagcaaaatctttggtgggctttcctgtataacattgttggactacccattgctgctggagcattgcttccagctacggggacgatactgacaccatcaatagctggagctctgatgggttttagttcggtcggtgtgatggccaactcgttgcttttgagggtgaggctgagctcaaggcggaagcgagaaccactgaaagccatctctgatgaggttgagaaaaattactcatcgaaatggagtacctgagtagttcggatcttagaccatgttcacgttcactcattcatatgatttggacacacgcatcaaaggcagttgtcagttgaacaaatgaaacagatgtagtatgcaattgctgaggtcagtcagttcctgtggtttggtagatcttcatggtgtgctataatataataccccctctattccaatttataaattttttgacttttttttaccaagtttgattagcttgtcttatttattttttttcgaaaaaatagaaa

SEQ ID NO: 41427 - DNA, 3241 bp, Zea Mays
attgaaaaaaaaggcccgttttcattggtcaatcggtcagcaggatttccctcttccatatgccgatctcccggacacggtggcctcccgctgccggagcgccatcgccgccgcagcaagcggcgcagggtacggtttccgccgtggcgccgaagcgtcgacccgtcgtgggttcccgttctcggcccgcgaaggaggcggaggccacggctcgacttccgtctgcggactactactcgtaaaggccttctcacttgctccccctttctcgtgctctgtgtttatgcaaatgtccctcagggtcgtgctactgcatcgggaactgcctagctggttccgggttcacgaattaagcggtgctggtgactcctacgtgcgcttctttatatgcacgcgtgtgcccaattgtgggtgcttaattgatactggcaactgacgagggtagtctctaacgtacatgactactttgagatgttttaggtcttgcagtttcttgtttgcttttccttgtagctcgctcagagtttgggaaaccacattgcatgtgtccaggaccaatgtggcaatgtgtccaaggccaagacgtttctgccagatgtcttatgtgctttgtaaactaatgaggattagttttcgaattgttgacaatataatttctgtttttcgacagttatgtgaggattgcttggtctttctggtttgacagttttaacagcacattgcagtgaattttcatctctgcaagttcatatggctacacaagttgtcaatagtacaaaacaagaataccttccctgcaacctgtgtttatgtaaaaactcaaaactcatgttagttcccctaggactacaaaacaagcttttatcccatggaaggcaataaggcatctcaattcatattttccaacctatccattttcttcctaacaaattggcaatggatccttgcgttgattgaaaaaatagacccctacttagtgattgttattaataatgcatcttttcaacagtttgttagtttttttacaacttcatttttatctaatgcctttagttgtgaattgtgtattctacttgtcaaatgaagctgttccttggtcactgtgaaaaccatgaaagtttacaccaaatgttctttttattactctgcatagagagctaaagaccctggagcatgtagagaaaaccaaaaaatatcagggtaagcttgcagcacagttgaaggccaaatatttttccaacaagacttttgaaaaaggtaatttgtaagaactgaatggcctggtaaattaagatggacatttgtttcagacaatgtaatatgtcagttatgttatccagcatttgctgttgatatgtagttcatcatatttcaggatgtgctactctcaaatcaagaagtcaacttaatgaattaaaatgaaatgtgttagcactaaatttcactaggtaggagtaaaataacttctagagccattgcttctaaggctagataatactatatagacaagctaaggggagtaaagtgagaaggagacagttgaggaatggcatttgaattgaatacagtatgtatttattggtttgaatttcaaatgctggcatcaatcttgaggcacatgtttaggcgtttattgtgcacttaccaaacatgtaaaaatgacactcctaatctaaaattcaagctggcacactaattatgtggagactgaaataaaatattttcttggtggccaagcctaatagtattgttgaactgcaaagttctgaataatcatggcatgagtatatggatcacactttattagctgatgaataactcgacgccttacggttatgtcatattgtagtttcataagaaatgaatttcaaattcccttctgttttttcttcttctttttaatctgactgatcagttggctgcaagtgggaggcctatactggcaatgcagtcatatgtaattatgattctctttactgtgaacaggatacgtgttcgaagaaattgttatagggtccaagaccatccggctaagcaggtggccgtttacaaggttgtttgcagatccagcaaaattttgccaagaaaagagctctactgtgaaggacatgtctccatctctgactggtgaagccatgtgaaatggttcagtaactcatttagctcatgaccacccgacggataagaactcagtagctcgtgtcactaacttctatctgttatccttcaaatcagtgactgtatgttttcactaggcccaagttaaccttgtacagttttgaaccaaagggatgtttcagcttttcacctgatacatgggtgtcactcatatccatgaccttggcatagtttcctattccttttcttctgaaatgatgtaatttgtggggcgccagcaccttgtctcctaatattctgtttgcagtaccaacgtcctttagcgctctggtgccaattattgcaatgcatcttgtggacaacacgaatggcaatctggaggtgccataatgacgagcagcggagcagatgaatgaacacacctgaactgcatgagctacctgttatcttcatgcatgcaacggtttgtcggagtgctatgccctcttgtactttccagttgtttcgtttcttggtagtataaggaaaggtccatgggcagcactgtgagacatggcatggtggatggtgggtgcatcggtgcttgttccaccggccctgtgatgtgagcatctcacgctggtgttcagttcacacgtacgtgatgccgcacttgctgctcagatctgttttgctttgctctgctgctcagtgctcgtgcacaggttcctctctctctctctctccagccacacaataattttgcacttgatatgtatgcaatgcagtttcagaggctgtaacatcgtttgtgtgagaataaaggcatgccttgttcatgtcttccttattatgaacggacgagggcagtctttcattttcatttgagataaaaactaggactccacttttaatttattattatgttcatttggcattggattgtatgccaaaaaggtctagatatttgtgttgcggcacatgcatgcatgcatgccaaaaaggtcccctggaatcctgtgcgataagcatctaaacgaataggatgatgttggttcggttcaagatctttgatgctacaatattcatgtacaaagattgttgtatgatttacatatatatgctgatactgataccgtgtcat

SEQ ID NO: 41428 - DNA, 2512 bp, Zea Mays
attgaaaaaaaaggcccgttttcattggtcaatcggtcagcaggatttccctcttccatatgccgatctcccggacacggtggcctcccgctgccggagcgccatcgccgccgcagcaagcggcgcagggtacggtttccgccgtggcgccgaagcgtcgacccgtcgtgggttcccgttctcggcccgcgaaggaggcggaggccacggctcgacttccgtctgcggactactactcgtaaaggccttctcacttgctccccctttctcgtgctctgtgtttatgcaaatgtccctcagggtcgtgctactgcatcgggaactgcctagctggttccgggttcacgaattaagcggtgctggtgactcctacgtgcgcttctttatatgcacgcgtgtgcccaattgtgggtgcttaattgatactggcaactgacgagggtagtctctaacgtacatgactactttgagatgttttaggtcttgcagtttcttgtttgcttttccttgtagctcgctcagagtttgggaaaccacattgcatgtgtccaggaccaatgtggcaatgtgtccaaggccaagacgtttctgccagatgtcttatgtgctttgtaaactaatgaggattagttttcgaattgttgacaatataatttctgtttttcgacagttatgtgaggattgcttggtctttctggtttgacagttttaacagcacattgcagtgaattttcatctctgcaagttcatatggctacacaagttgtcaatagtacaaaacaagaataccttccctgcaacctgtgtttatgtaaaaactcaaaactcatgttagttcccctaggactacaaaacaagcttttatcccatggaaggcaataaggcatctcaattcatattttccaacctatccattttcttcctaacaaattggcaatggatccttgcgttgattgaaaaaatagacccctacttagtgattgttattaataatgcatcttttcaacagtttgttagtttttttacaacttcatttttatctaatgcctttagttgtgaattgtgtattctacttgtcaaatgaagctgttccttggtcactgtgaaaaccatgaaagtttacaccaaatgttctttttattactctgcatagagagctaaagaccctggagcatgtagagaaaaccaaaaaatatcagggtaagcttgcagcacagttgaaggccaaatatttttccaacaagacttttgaaaaaggatacgtgttcgaagaaattgttatagggtccaagaccatccggctaagcaggtggccgtttacaaggttgtttgcagatccagcaaaattttgccaagaaaagagctctactgtgaaggacatgtctccatctctgactggtgaagccatgtgaaatggttcagtaactcatttagctcatgaccacccgacggataagaactcagtagctcgtgtcactaacttctatctgttatccttcaaatcagtgactgtatgttttcactaggcccaagttaaccttgtacagttttgaaccaaagggatgtttcagcttttcacctgatacatgggtgtcactcatatccatgaccttggcatagtttcctattccttttcttctgaaatgatgtaatttgtggggcgccagcaccttgtctcctaatattctgtttgcagtaccaacgtcctttagcgctctggtgccaattattgcaatgcatcttgtggacaacacgaatggcaatctggaggtgccataatgacgagcagcggagcagatgaatgaacacacctgaactgcatgagctacctgttatcttcatgcatgcaacggtttgtcggagtgctatgccctcttgtactttccagttgtttcgtttcttggtagtataaggaaaggtccatgggcagcactgtgagacatggcatggtggatggtgggtgcatcggtgcttgttccaccggccctgtgatgtgagcatctcacgctggtgttcagttcacacgtacgtgatgccgcacttgctgctcagatctgttttgctttgctctgctgctcagtgctcgtgcacaggttcctctctctctctctctccagccacacaataattttgcacttgatatgtatgcaatgcagtttcagaggctgtaacatcgtttgtgtgagaataaaggcatgccttgttcatgtcttccttattatgaacggacgagggcagtctttcattttcatttgagataaaaactaggactccacttttaatttattattatgttcatttggcattggattgtatgccaaaaaggtctagatatttgtgttgcggcacatgcatgcatgcatgccaaaaaggtcccctggaatcctgtgcgataagcatctaaacgaataggatgatgttggttcggttcaagatctttgatgctacaatattcatgtacaaagattgttgtatgatttacatatatatgctgatactgataccgtgtcat

SEQ ID NO: 41429 - DNA, 2651 bp, Zea Mays
attgaaaaaaaaggcccgttttcattggtcaatcggtcagcaggatttccctcttccatatgccgatctcccggacacggtggcctcccgctgccggagcgccatcgccgccgcagcaagcggcgcagggtacggtttccgccgtggcgccgaagcgtcgacccgtcgtgggttcccgttctcggcccgcgaaggaggcggaggccacggctcgacttccgtctgcggactactactcgtaaaggccttctcacttgctccccctttctcgtgctctgtgtttatgcaaatgtccctcagggtcgtgctactgcatcgggaactgcctagctggttccgggttcacgaattaagcggtgctggtgactcctacgtgcgcttctttatatgcacgcgtgtgcccaattgtgggtgcttaattgatactggcaactgacgagggtagtctctaacgtacatgactactttgagatgttttaggtcttgcagtttcttgtttgcttttccttgtagctcgctcagagtttgggaaaccacattgcatgtgtccaggaccaatgtggcaatgtgtccaaggccaagacgtttctgccagatgtcttatgtgctttgtaaactaatgaggattagttttcgaattgttgacaatataatttctgtttttcgacagttatgtgaggattgcttggtctttctggtttgacagttttaacagcacattgcagtgaattttcatctctgcaagttcatatggctacacaagttgtcaatagtacaaaacaagaataccttccctgcaacctgtgtttatgtaaaaactcaaaactcatgttagttcccctaggactacaaaacaagcttttatcccatggaaggcaataaggcatctcaattcatattttccaacctatccattttcttcctaacaaattggcaatggatccttgcgttgattgaaaaaatagacccctacttagtgattgttattaataatgcatcttttcaacagtttgttagtttttttacaacttcatttttatctaatgcctttagttgtgaattgtgtattctacttgtcaaatgaagctgttccttggtcactgtgaaaaccatgaaagtttacaccaaatgttctttttattactctgcatagagagctaaagaccctggagcatgtagagaaaaccaaaaaatatcagggtaagcttgcagcacagttgaaggccaaatatttttccaacaagacttttgaaaaagagtcatatgtaattatgattctctttactgtgaacaggatacgtgttcgaagaaattgttatagggtccaagaccatccggctaagcaggtggccgtttacaaggttgtttgcagatccagcaaaattttgccaagaaaagagctctactgtgaaggacatgtctccatctctgactggtgaagccatgtgaaatggttcagtaactcatttagctcatgaccacccgacggataagaactcagtagctcgtgtcactaacttctatctgttatccttcaaatcagtgactgtatgttttcactaggcccaagttaaccttgtacagttttgaaccaaaggtaggtttcgtttggtggacctgtttaattacaggtatactgagatccattgcctatatatatctatggaagtacactgacattgaaattattcctccacagggatgtttcagcttttcacctgatacatgggtgtcactcatatccatgaccttggcatagtttcctattccttttcttctgaaatgatgtaatttgtggggcgccagcaccttgtctcctaatattctgtttgcagtaccaacgtcctttagcgctctggtgccaattattgcaatgcatcttgtggacaacacgaatggcaatctggaggtgccataatgacgagcagcggagcagatgaatgaacacacctgaactgcatgagctacctgttatcttcatgcatgcaacggtttgtcggagtgctatgccctcttgtactttccagttgtttcgtttcttggtagtataaggaaaggtccatgggcagcactgtgagacatggcatggtggatggtgggtgcatcggtgcttgttccaccggccctgtgatgtgagcatctcacgctggtgttcagttcacacgtacgtgatgccgcacttgctgctcagatctgttttgctttgctctgctgctcagtgctcgtgcacaggttcctctctctctctctctccagccacacaataattttgcacttgatatgtatgcaatgcagtttcagaggctgtaacatcgtttgtgtgagaataaaggcatgccttgttcatgtcttccttattatgaacggacgagggcagtctttcattttcatttgagataaaaactaggactccacttttaatttattattatgttcatttggcattggattgtatgccaaaaaggtctagatatttgtgttgcggcacatgcatgcatgcatgccaaaaaggtcccctggaatcctgtgcgataagcatctaaacgaataggatgatgttggttcggttcaagatctttgatgctacaatattcatgtacaaagattgttgtatgatttacatatatatgctgatactgataccgtgtcat

SEQ ID NO: 41430 - DNA, 2326 bp, Zea Mays
attgaaaaaaaaggcccgttttcattggtcaatcggtcagcaggatttccctcttccatatgccgatctcccggacacggtggcctcccgctgccggagcgccatcgccgccgcagcaagcggcgcagggtacggtttccgccgtggcgccgaagcgtcgacccgtcgtgggttcccgttctcggcccgcgaaggaggcggaggccacggctcgacttccgtctgcggactactactcagagctaaagaccctggagcatgtagagaaaaccaaaaaatatcagggtaagcttgcagcacagttgaaggccaaatatttttccaacaagacttttgaaaaaggtaatttgtaagaactgaatggcctggtaaattaagatggacatttgtttcagacaatgtaatatgtcagttatgttatccagcatttgctgttgatatgtagttcatcatatttcaggatgtgctactctcaaatcaagaagtcaacttaatgaattaaaatgaaatgtgttagcactaaatttcactaggtaggagtaaaataacttctagagccattgcttctaaggctagataatactatatagacaagctaaggggagtaaagtgagaaggagacagttgaggaatggcatttgaattgaatacagtatgtatttattggtttgaatttcaaatgctggcatcaatcttgaggcacatgtttaggcgtttattgtgcacttaccaaacatgtaaaaatgacactcctaatctaaaattcaagctggcacactaattatgtggagactgaaataaaatattttcttggtggccaagcctaatagtattgttgaactgcaaagttctgaataatcatggcatgagtatatggatcacactttattagctgatgaataactcgacgccttacggttatgtcatattgtagtttcataagaaatgaatttcaaattcccttctgttttttcttcttctttttaatctgactgatcagttggctgcaagtgggaggcctatactggcaatgcagtcatatgtaattatgattctctttactgtgaacaggatacgtgttcgaagaaattgttatagggtccaagaccatccggctaagcaggtggccgtttacaaggttgtttgcagatccagcaaaattttgccaagaaaagagctctactgtgaaggacatgtctccatctctgactggtgaagccatgtgaaatggttcagtaactcatttagctcatgaccacccgacggataagaactcagtagctcgtgtcactaacttctatctgttatccttcaaatcagtgactgtatgttttcactaggcccaagttaaccttgtacagttttgaaccaaagggatgtttcagcttttcacctgatacatgggtgtcactcatatccatgaccttggcatagtttcctattccttttcttctgaaatgatgtaatttgtggggcgccagcaccttgtctcctaatattctgtttgcagtaccaacgtcctttagcgctctggtgccaattattgcaatgcatcttgtggacaacacgaatggcaatctggaggtgccataatgacgagcagcggagcagatgaatgaacacacctgaactgcatgagctacctgttatcttcatgcatgcaacggtttgtcggagtgctatgccctcttgtactttccagttgtttcgtttcttggtagtataaggaaaggtccatgggcagcactgtgagacatggcatggtggatggtgggtgcatcggtgcttgttccaccggccctgtgatgtgagcatctcacgctggtgttcagttcacacgtacgtgatgccgcacttgctgctcagatctgttttgctttgctctgctgctcagtgctcgtgcacaggttcctctctctctctctctccagccacacaataattttgcacttgatatgtatgcaatgcagtttcagaggctgtaacatcgtttgtgtgagaataaaggcatgccttgttcatgtcttccttattatgaacggacgagggcagtctttcattttcatttgagataaaaactaggactccacttttaatttattattatgttcatttggcattggattgtatgccaaaaaggtctagatatttgtgttgcggcacatgcatgcatgcatgccaaaaaggtcccctggaatcctgtgcgataagcatctaaacgaataggatgatgttggttcggttcaagatctttgatgctacaatattcatgtacaaagattgttgtatgatttacatatatatgctgatactgataccgtgtcat

SEQ ID NO: 41431 - DNA, 2064 bp, Zea Mays
ctgcaaacgagcttctcttgtcactcatcagcacggttagtatagctagccaccatgaaggtagagcgcgatctccacatgagccggggcgacggcgaggacagctacgcctccaactcaaggcttcaggagaagtccatactgaagacgaggccggtgctgcacaaggccgtggcggcggcgcacgccttgtcgctctcctcaggaggacccggcggcggcgccatggtcgtcgcggacctcggctgctcgtcggggcccaacacactgctcgtcgtctcggaggtgctagcagcggtggcgatggtggccggcggcagcgcccaaccgcagcacgtgcagttcttcctgaacgacctccccgggaacgactttaacctcgtcttccggtcgctggacctgttgaagaacaagaagctggccgccaaggacaggcgggaggagtcgctgctaccgccgtactacgtggccgggctgccgggctccttctacacccggctgttcccggaccactgcgtccacctcttccactcctcctactgcctcatgtggcgctccaaggtccccgacgagctcgccggtggcgcggtcctcaacgagggccacatgtacatctgggaaaccacgccgcaggcggtggtggccctgtacaggaggcagttccaggaggacatgtcgctgttcctcaggctttgccacagggagctcgtgcccggtggccacatggtgctggcgttcctgggcaggaagaagagcaaggacgtgcttcgtggcgaggtcagctacacgtgggggctcctcgcgcaggctctccagtccctcgtcaaacagggccgtgtgaagaaggataagctggactccttcaacctgccgttctacgcaccttcgatggacgaggtgagggacgtgatcacgcggagccaggcgttcgacatcacccacatccagctcttcgagtccaactgggatccacacgacgacgacgacgtggagatgaagatggaagaagacgtcgccgccgtccagagcggcgtcaacgtcgccaggtccatcagggccgtgatcgggcccctcatcgcccgccactttggcgagcacatactcgacgatctcttcgagctgcatgccaaaaatgtcgcagtgcacctgcagaaagtgaagaccaagtaccctgtcatcgtcgtttccctccaggcgaaatgagccgcgcgccaaataaaggaccaagctagctgatgcaaaatctggcgtcaagttagctattagtaccgctactattatatgcatgcagaataattagtcaaacaatcagaaaaataaagtgcctcagagactgttagtggcagatccaatgtttcgttaattatatgtagtgtaatggtaatggtaatggtaatggtagacatcaggtttcatcgtccatataatatagggtgggcagatcatgggctctggctttttctttaaaaaagctagagaagtggtaaacattgattttaaaatgacttcccatgaaaagctagagcagtggtaaaaatcctctatgctggactagagcaagtccctaggcagtagcttttaatgttgaagaatgtttgggttaaagagaatgagaggacatttgcaattgtgcaaaggtatagaatggggaattcattctctaattctgcatatatggatgacatcttacttgtcagttgtgatgaaaagttcttgtcctcaagattaagtgaaattggtctcggtgaagtgtctcttgttctaagaattgagattcattgagatagaagagaaaaggggtacgtattaggattattgcatatataggcatgctaagaaaggttgtaaagaaataaagtattcatgcgagaaacctacgtctgttccagtgatcaagggtaatggatttgggaactttaatgttctaaagtggtaatatgtaatagattaaatgtaccatatgcttcaactgtttgaagctcaataaatgcacaagtatggtgttaccctgacgttgtttatatgtccgggttgttttggtagtgtccaatccagatatagatc

SEQ ID NO: 41432 - DNA, 1524 bp, Zea Mays
tcagcgttccactcgcgtagaagtaacagcgctcgcagctcggtccgggtacgtcgccaatgccgttgcgtggcggattcactctctctctccccccggccccctcctccgcccatccaaccaccatataacaacctagtagccgccaacgccacaccaccagtagtcctactggtccttgacgtccgtggccactcaggttgtgttctctgagttctttcgccggggccggggcggaagcggagtgcgcggtcgaggaaggcctaggccttagcggtcggatcgatcggcgccgtgcttgactgcctgtacatgaggagcggctgcggcggcggcggagggagacaacctggggaaggaggcgggggaggcgctggggctgctgggctgcgtcaatgaggtggtggcggcggtggcagccacgtgggggcccatgaccgacggcgcgcgcgtcgagacggcgcccaggctcgcccaatggcgcgtcgacccgctcccctgctacacctaccgcaagtcactccccttcctcatcggcctctggaactgagaatacaagttctctcaagaacggttcctcagccccaatagcttcctttatcgccaaacttattgtatctcttccacctaatcagcagaccatagtccacccaggaatttttgacaaacagctgaaatacgacggttttgtgtggacaatcgatagcaccgtcactgggaggtttgtgattgagatagagtttcttgacctgaaggtcgctgatccgtctggcggggagccggcctcgatttgggcctcccgccaggtcaagcagtgctcggacagcacggccctgtcgtccctggctcggatgctgcacgaggacgtcctcaccgacatctacggcgacgtgcgcggcggcgaggagttcctggcgaaccggctggcgctcctccgcgccgccgacaagtacgacatcggcgacctcagggaggcctgccacgagagcctgctggaagacatcgacgcgcgcaacgtgctggagcggctgcagacggcgcacctgtaccggctgccgaggctcaagggcggctgcctgaggttccttgtggacttcaggaaggtgtacgagatgcacgacgacgacctcaacgcgttcctgcagacggccgacagggaactcgtggccgaggtgttccatggcgttcttgccgcgtggagcgggcggtaagccgggcgcatgccatggcactgccgctctgctgcaggtgttgcacatctggttggttcagttcgtcacaactcagaagcgttgtttgcaactggaggattcttgctgggaaagcgtgtaaatatttgcaaactgtacatgcgtgccagtggttggtctaaaatttactgtgcatgccttgattggattttgttcctatgatgtggaaatcagctcatatgctgctcatattcacgttttgaggaatttcagacttgatcttcaggtttacacatggcatggcaacagagagaggcaatgctcaataatctca

SEQ ID NO: 41433 - DNA, 2088 bp, Zea Mays
tcagcgttccactcgcgtagaagtaacagcgctcgcagctcggtccgggtacgtcgccaatgccgttgcgtggcggattcactctctctctccccccggccccctcctccgcccatccaaccaccatataacaacctagtagccgccaacgccacaccaccagtagtcctactggtccttgacgtccgtggccactcaggttgtgttctctgagttctttcgccggggccggggcggaagcggagtgcgcggtcgaggaaggcctaggccttagcggtcggatcgatcggcgccgtgcttgactgcctgtacatgaggagcggctgcggcggcggcggagggagacaacctggggaaggaggcgggggaggcgctggggctgctgggctgcgtcaatgaggtggtggcggcggtggcagccacgtgggggcccatgaccgacggcgcgcgcgtcgagacggcgcccaggctcgcccaatggcgcgtcgacccgctcccctgctacacctaccgcaagtcactccccttcctcatcggcctctggaactggtgcatatctgtggagagaaataacaagcaaacctgtgttaagctctttgcagagaatacaagttctctcaagaacggttcctcagccccaatagcttcctttatcgccaaacttattgtatctcttccacctaatcagcagaccatagtccacccaggtaagttacttctactaattaacttgttcgacaaaaaaaattgtcttctacgaaaaactactgtcttcttgtaatctcaacgaacattattttggcaagtacagaaaatggggacatgtttgaattctcggtgtgtacgttagacatcatgaaaaatgaaaggaaacctgtagtttatttgatctggctacaagaatacatgcagaattttagtagtaaaaattaggttacgaaacaaaatgttatagctctgaatatatgaatgacccgtaggcacagagcaagtctgcaagtgggagtgaacgactaatttctatctaacaggtggtttacacgtatgcaggaatttttgacaaacagctgaaatacgacggttttgtgtggacaatcgatagcaccgtcactgggaggtttgtgattgagatagagtttcttgacctgaaggtcgctgatccgtctggcggggagccggcctcgatttgggcctcccgccaggtcaagcagtgctcggacagcacggccctgtcgtccctggctcggatgctgcacgaggacgtcctcaccgacatcaccatcaacgcggcggacggcagcgtgggcgcgcaccgcgcggtcctggcgacgcggtcgccggtgttccggagcatgttctcgcacgacctgagggagaaggagctctccaccgtggacatcaccgacatgtccctggacgcgtgccgcgccttcctcagctacatctacggcgacgtgcgcggcggcgaggagttcctggcgaaccggctggcgctcctccgcgccgccgacaagtacgacatcggcgacctcagggaggcctgccacgagagcctgctggaagacatcgacgcgcgcaacgtgctggagcggctgcagacggcgcacctgtaccggctgccgaggctcaagggcggctgcctgaggttccttgtggacttcaggaaggtgtacgagatgcacgacgacgacctcaacgcgttcctgcagacggccgacagggaactcgtggccgaggtgttccatggcgttcttgccgcgtggagcgggcggtaagccgggcgcatgccatggcactgccgctctgctgcaggtgttgcacatctggttggttcagttcgtcacaactcagaagcgttgtttgcaactggaggattcttgctgggaaagcgtgtaaatatttgcaaactgtacatgcgtgccagtggttggtctaaaatttactgtgcatgccttgattggattttgttcctatgatgtggaaatcagctcatatgctgctcatattcacgttttgaggaatttcagacttgatcttcaggtttacacatggcatggcaacagagagaggcaatgctcaataatctca

SEQ ID NO: 41434 - DNA, 3043 bp, Zea Mays
caattttctcgagggagagaggggcagagacagcaagggaacagggaagggagagagagaggaacagctccgagctctcgcctctgccctagctgccaaggttcttgattgattccaatccaaaacaaaaatctgagttctctcatcctctctcctgtcccaactcccaagagtgattactgttttttgtttcgtggatgcgatctgttttacgcgacgatctgcttcgctgttcgcgtgttcgttaacggcgggcgccgacggattggagctgtcattgtcaggcttcatctttcggttttaattctcccaggagaagttcctgggctgggagtaaatgagcggcgccctcccctgtcgatacatgccgtttctctgggtggaatttatggctgctcggacgccacgctgcttttagtagtaaccaatgcaggttcctcttcttccacagggcctggctgtggctggaagctgcaattttttttttggcaacgagatttggtccctcgccagtttccaccctctgtttcttcctgctcagatctacagtggcggtagaagattgggtgcgggagcgcgacgtctcagctgggctatccaggaatccagaatttacttcggtggcgaggatgtctgtgagccatgcgcaggacattgaaatatcgctgtgcgacggcaactcggaggacgagcggcggcggcgcaagatcggctcgctgcggcggaaggccatccacgcgctcaagaagcgagggaggcgtcgcgtcgactcccgcttcccgccgccggccatttccatcgaggacgtccgcgacgcggaggaggagcgcgctgtcgcctccttccgggagcggctcgcggcgcacggcctcctccccgagaagcacgatgactaccacatgatgctaaggttcctcaaggccagaaagttcgaagccgagaaggcaatgcagatgtggtcagagatgctgaaatggaggaaagagttcggaactgacaccatccttgaggattttgattttgaggaactggatgatgtgctacgctactaccctcagggctaccatggtgttgaccgccaaggccggccggtgtacattgagaggctagggaaggtggatccgaacaaccttatgcagatcacgtcagtggatcgctacatcaagtaccatgtccaggagtttgagagggccttcagggagaggttccctgcctgcacattagctgctaagaggcacattgactccaccactaccatcttggacgtccagggtgtggggtttaagaatttctccaggactgctagagaacttgtaaaccgaatgcagaagattgatagcgattattatcctgagacactccaccaaatgtttgttgtgaacgctggcagtggattcaagtggatctggaacagtgtgaagggcttccttgacccaaaaacttcatccaagattcatgtgctcggttcgaactaccagagtaggcttcttgaagtaatagattcgagtgagttgccagaattccttggtggttcatgcacatgtagtgacaagggtggttgccttggatcgaacaaagggccatggaatgatccttatatattgaagctgatccacaatttggaagctggatgcatgagggaaaccaccaaacccgtttctgagggcggagaaagaagcagctcttcctttcggttggaacagatgaaatggcagggcatgttaagcgatacatcaaatgctgaatcaggatccgatgttgatgattttggtccatcatttgttcataaagtttcaggctatggttgcttgactccggttcgtgaggaggtaaagggcacagattgtgcaacatacttgagctgcgatgatcaaagtcacccggatatggttcctgaattttaccatggagtgcaacggactactgaaatggtgcagaaacaaatggctgatttcaggcaatattccaccaacagaaggcctcgtgaattagggaacggctctcttaatgccaatggtacagcagctgctcagaggggctgggaagacgtggcgaagctagtagtcacagccttgatcaagctcttctccttcatccggctgttcctttccagagccgccgagagtaggctagagaaggtccgtcgcactgccccaccaccagcagcagagaagccaaagccgccccgagccgtcagcgaagaagaggtgcgcgcctgcctgcagcgcctggacagtctcgagtcgctgtgcggccaccttgccaccaggcctgcgcagatcccggaggacaaagagcgcgttctgctgagctcgttcgagcggatccggtctgttgaggctgacctcgagaggaccaaaagagtgctgaacgcgaccgtggcgaagcagaaggcgctggtggaggaggtggctctggagtctgtgcaggagctgcctagagccaagaagaggatgttctgttgataggacatggaggtcaacagcacgggaccccgaaccatgtcgtcgacattaaccgaccgaccaaccgaccgtgaagctgacgcgactctctgccaccagccagccggagccatttttgacctcgctgccgccgccgccgaagccgacgccgccgactctcacctaacaccgaaatggaagagaagaccggcggcgccccctgttggctgctgcttcccttttcatgccgccccttttttgtagtgcctccatttggccgtactctgctggcggggcccgggccgggtggcgcctttttgattggtgaatgctgcggcggtcgccaagcaccacccttgtttcttggccaggcgcgcgcgagagagagagagatagatggtgctggttggtgtccgaatggctggagtcgttctgtacgtacttgagtactgctgagtgctgaccccgtggctggaggtgggagacagacagtggcgagcttggtgccgtcgatgcacctgtacatgccatgccacaccggctgtgattctagtggcctgctaatatacagattgttgcgacagcccatgttactgttg

SEQ ID NO: 41435 - DNA, 2314 bp, Zea Mays
gcagagacagcaagggaacagggaagggagagagagaggaacagctccgagctctcgcctctgccctagctgccaagacagtggcggtagaagattgggtgcgggagcgcgacgtctcagctgggctatccaggaatccagaatttacttcggtggcgaggatgtctgtgagccatgcgcaggacattgaaatatcgctgtgcgacggcaactcggaggacgagcggcggcggcgcaagatcggctcgctgcggcggaaggccatccacgcgctcaagaagcgagggaggcgtcgcgtcgactcccgcttcccgccgccggccatttccatcgaggacgtccgcgacgcggaggaggagcgcgctgtcgcctccttccgggagcggctcgcggcgcacggcctcctccccgagaagcacgatgactaccacatgatgctaaggttcctcaaggccagaaagttcgaagccgagaaggcaatgcagatgtggtcagagatgctgaaatggaggaaagagttcggaactgacaccatccttgaggattttgattttgaggaactggatgatgtgctacgctactaccctcagggctaccatggtgttgaccgccaaggccggccggtgtacattgagaggctagggaaggtggatccgaacaaccttatgcagatcacgtcagtggatcgctacatcaagtaccatgtccaggagtttgagagggccttcagggagaggttccctgcctgcacattagctgctaagaggcacattgactccaccactaccatcttggacgtccagggtgtggggtttaagaatttctccaggactgctagagaacttgtaaaccgaatgcagaagattgatagcgattattatcctgagacactccaccaaatgtttgttgtgaacgctggcagtggattcaagtggatctggaacagtgtgaagggcttccttgacccaaaaacttcatccaagattcatgtgctcggttcgaactaccagagtaggcttcttgaagtaatagattcgagtgagttgccagaattccttggtggttcatgcacatgtagtgacaagggtggttgccttggatcgaacaaagggccatggaatgatccttatatattgaagctgatccacaatttggaagctggatgcatgagggaaaccaccaaacccgtttctgagggcggagaaagaagcagctcttcctttcggttggaacagatgaaatggcagggcatgttaagcgatacatcaaatgctgaatcaggatccgatgttgatgattttggtccatcatttgttcataaagtttcaggctatggttgcttgactccggttcgtgaggaggtaaagggcacagattgtgcaacatacttgagctgcgatgatcaaagtcacccggatatggttcctgaattttaccatggagtgcaacggactactgaaatggtgcagaaacaaatggctgatttcaggcaatattccaccaacagaaggcctcgtgaattagggaacggctctcttaatgccaatggtacagcagctgctcagaggggctgggaagacgtggcgaagctagtagtcacagccttgatcaagctcttctccttcatccggctgttcctttccagagccgccgagagtaggctagagaaggtccgtcgcactgccccaccaccagcagcagagaagccaaagccgccccgagccgtcagcgaagaagaggtgcgcgcctgcctgcagcgcctggacagtctcgagtcgctgtgcggccaccttgccaccaggcctgcgcagatcccggaggacaaagagcgcgttctgctgagctcgttcgagcggatccggtctgttgaggctgacctcgagaggaccaaaagagtgctgaacgcgaccgtggcgaagcagaaggcgctggtggaggaggtggctctggagtctgtgcaggagctgcctagagccaaggtggttttgatcgatgggatgttagcggctgggcgatgacacgcacgcgtccgactgacgtcgtctcggcacaccatgcttgcacgctgcatcaccatccggatcggagcaggcagcagagggtacgggcgacgacgactgtgattctttgcttccacctcctgccctccgtgccgggctggcggacgagacgacaacgacacgcccgccatcccgaccgaccgaggaggcttatctccccgcagactacagtgcaagcccatcccttcccctacccgacgacgcgccaatcatggcctcgccgccggccgccactctccgtcactcatggatcg

SEQ ID NO: 41436 - DNA, 2018 bp, Zea Mays
gcagagacagcaagggaacagggaagggagagagagaggaacagctccgagctctcgcctctgccctagctgccaagacagtggcggtagaagattgggtgcgggagcgcgacgtctcagctgggctatccaggaatccagaatttacttcggtggcgaggatgtctgtgagccatgcgcaggacattgaaatatcgctgtgcgacggcaactcggaggacgagcggcggcggcgcaagatcggctcgctgcggcggaaggccatccacgcgctcaagaagcgagggaggcgtcgcgtcgactcccgcttcccgccgccggccatttccatcgaggacgtccgcgacgcggaggaggagcgcgctgtcgcctccttccgggagcggctcgcggcgcacggcctcctccccgagaagcacgatgactaccacatgatgctaaggttcctcaaggccagaaagttcgaagccgagaaggcaatgcagatgtggtcagagatgctgaaatggaggaaagagttcggaactgacaccatccttgaggattttgattttgaggaactggatgatgtgctacgctactaccctcagggctaccatggtgttgaccgccaaggccggccggtgtacattgagaggctagggaaggtggatccgaacaaccttatgcagatcacgtcagtggatcgctacatcaagtaccatgtccaggagtttgagagggccttcagggagaggttccctgcctgcacattagctgctaagaggcacattgactccaccactaccatcttggacgtccagggtgtggggtttaagaatttctccaggactgctagagaacttgtaaaccgaatgcagaagattgatagcgattattatcctgagacactccaccaaatgtttgttgtgaacgctggcagtggattcaagtggatctggaacagtgtgaagggcttccttgacccaaaaacttcatccaagattcatgtgctcggttcgaactaccagagtaggcttcttgaagtaatagattcgagtgagttgccagaattccttggtggttcatgcacatgtagtgacaagggtggttgccttggatcgaacaaagggccatggaatgatccttatatattgaagctgatccacaatttggaagctggatgcatgagggaaaccaccaaacccgtttctgagggcggagaaagaagcagctcttcctttcggttggaacagatgaaatggcagggcatgttaagcgatacatcaaatgctgaatcaggatccgatgttgatgattttggtccatcatttgttcataaagtttcaggctatggttgcttgactccggttcgtgaggaggtaaagggcacagattgtgcaacatacttgagctgcgatgatcaaagtcacccggatatggttcctgaattttaccatggagtgcaacggactactgaaatggtgcagaaacaaatggctgatttcaggcaatattccaccaacagaaggcctcgtgaattagggaacggctctcttaatgccaatggtacagcagctgctcagaggggctgggaagacgtggcgaagctagtagtcacagccttgatcaagctcttctccttcatccggctgttcctttccagagccgccgagagtaggctagagaaggtccgtcgcactgccccaccaccagcagcagagaagccaaagccgccccgagccgtcagcgaagaagaggtgcgcgcctgcctgcagcgcctggacagtctcgagtcgctgtgcggccaccttgccaccaggcctgcgcagatcccggaggacaaagagcgcgttctgctgagctcgttcgagcggatccggtctgttgaggctgacctcgagaggaccaaaagagtgctgaacgcgaccgtggcgaagcagaaggcgctggtggaggaggtggctctggagtctgtgcaggagctgcctagagccaagactttacgcgccggaggcactcaccaacttaacccccct

SEQ ID NO: 41437 - DNA, 2242 bp, Zea Mays
gcagagacagcaagggaacagggaagggagagagagaggaacagctccgagctctcgcctctgccctagctgccaagacagtggcggtagaagattgggtgcgggagcgcgacgtctcagctgggctatccaggaatccagaatttacttcggtggcgaggatgtctgtgagccatgcgcaggacattgaaatatcgctgtgcgacggcaactcggaggacgagcggcggcggcgcaagatcggctcgctgcggcggaaggccatccacgcgctcaagaagcgagggaggcgtcgcgtcgactcccgcttcccgccgccggccatttccatcgaggacgtccgcgacgcggaggaggagcgcgctgtcgcctccttccgggagcggctcgcggcgcacggcctcctccccgagaagcacgatgactaccacatgatgctaaggttcctcaaggccagaaagttcgaagccgagaaggcaatgcagatgtggtcagagatgctgaaatggaggaaagagttcggaactgacaccatccttgaggattttgattttgaggaactggatgatgtgctacgctactaccctcagggctaccatggtgttgaccgccaaggccggccggtgtacattgagaggctagggaaggtggatccgaacaaccttatgcagatcacgtcagtggatcgctacatcaagtaccatgtccaggagtttgagagggccttcagggagaggttccctgcctgcacattagctgctaagaggcacattgactccaccactaccatcttggacgtccagggtgtggggtttaagaatttctccaggactgctagagaacttgtaaaccgaatgcagaagattgatagcgattattatcctgagacactccaccaaatgtttgttgtgaacgctggcagtggattcaagtggatctggaacagtgtgaagggcttccttgacccaaaaacttcatccaagattcatgtgctcggttcgaactaccagagtaggcttcttgaagtaatagattcgagtgagttgccagaattccttggtggttcatgcacatgtagtgacaagggtggttgccttggatcgaacaaagggccatggaatgatccttatatattgaagctgatccacaatttggaagctggatgcatgagggaaaccaccaaacccgtttctgagggcggagaaagaagcagctcttcctttcggttggaacagatgaaatggcagggcatgttaagcgatacatcaaatgctgaatcaggatccgatgttgatgattttggtccatcatttgttcataaagtttcaggctatggttgcttgactccggttcgtgaggaggtaaagggcacagattgtgcaacatacttgagctgcgatgatcaaagtcacccggatatggttcctgaattttaccatggagtgcaacggactactgaaatggtgcagaaacaaatggctgatttcaggcaatattccaccaacagaaggcctcgtgaattagggaacggctctcttaatgccaatggtacagcagctgctcagaggggctgggaagacgtggcgaagctagtagtcacagccttgatcaagctcttctccttcatccggctgttcctttccagagccgccgagagtaggctagagaaggtccgtcgcactgccccaccaccagcagcagagaagccaaagccgccccgagccgtcagcgaagaagaggtgcgcgcctgcctgcagcgcctggacagtctcgagtcgctgtgcggccaccttgccaccaggcctgcgcagatcccggaggacaaagagcgcgttctgctgagctcgttcgagcggatccggtctgttgaggctgacctcgagaggaccaaaagagtgctgaacgcgaccgtggcgaagcagaaggcgctggtggaggaggtggctctggagtctgtgcaggagctgcctagagccaagcttctttatgcatggaggagtacaagaaagtaagtggtttcgacaatgcctaaaaaaatttgggacacattgaagatagctcgcgaggagattatgagacactaaattactctaggagattatgaatgtaatgctttgtaatcctttcatttttgaagaaattggaaatttacttaatagagtaggttatttagtttgatatatgtcaatcctaaatttataggacgatgggcgaaaattgattttatgtatcaataggttat

SEQ ID NO: 41438 - DNA, 2485 bp, Zea Mays
tccaatccaaaacaaaaatctgagttctctcatcctctctcctgtcccaactcccaagagtgattactgttttttgtttcgtggatgcgatctgttttacgcgacgatctgcttcgctgttcgcgtgttcgttaacggcgggcgccgacggattggagctgtcattgtcaggcttcatctttcggttttaattctcccaggagaagttcctgggctgggagtaaatgagcggcgccctcccctgtcgatacatgccgtttctctgggtggaatttatggctgctcggacgccacgctgcttttagtagtaaccaatgcagacagtggcggtagaagattgggtgcgggagcgcgacgtctcagctgggctatccaggaatccagaatttacttcggtggcgaggatgtctgtgagccatgcgcaggacattgaaatatcgctgtgcgacggcaactcggaggacgagcggcggcggcgcaagatcggctcgctgcggcggaaggccatccacgcgctcaagaagcgagggaggcgtcgcgtcgactcccgcttcccgccgccggccatttccatcgaggacgtccgcgacgcggaggaggagcgcgctgtcgcctccttccgggagcggctcgcggcgcacggcctcctccccgagaagcacgatgactaccacatgatgctaaggttcctcaaggccagaaagttcgaagccgagaaggcaatgcagatgtggtcagagatgctgaaatggaggaaagagttcggaactgacaccatccttgaggattttgattttgaggaactggatgatgtgctacgctactaccctcagggctaccatggtgttgaccgccaaggccggccggtgtacattgagaggctagggaaggtggatccgaacaaccttatgcagatcacgtcagtggatcgctacatcaagtaccatgtccaggagtttgagagggccttcagggagaggttccctgcctgcacattagctgctaagaggcacattgactccaccactaccatcttggacgtccagggtgtggggtttaagaatttctccaggactgctagagaacttgtaaaccgaatgcagaagattgatagcgattattatcctgagacactccaccaaatgtttgttgtgaacgctggcagtggattcaagtggatctggaacagtgtgaagggcttccttgacccaaaaacttcatccaagattcatgtgctcggttcgaactaccagagtaggcttcttgaagtaatagattcgagtgagttgccagaattccttggtggttcatgcacatgtagtgacaagggtggttgccttggatcgaacaaagggccatggaatgatccttatatattgaagctgatccacaatttggaagctggatgcatgagggaaaccaccaaacccgtttctgagggcggagaaagaagcagctcttcctttcggttggaacagatgaaatggcagggcatgttaagcgatacatcaaatgctgaatcaggatccgatgttgatgattttggtccatcatttgttcataaagtttcaggctatggttgcttgactccggttcgtgaggaggtaaagggcacagattgtgcaacatacttgagctgcgatgatcaaagtcacccggatatggttcctgaattttaccatggagtgcaacggactactgaaatggtgcagaaacaaatggctgatttcaggcaatattccaccaacagaaggcctcgtgaattagggaacggctctcttaatgccaatggtacagcagctgctcagaggggctgggaagacgtggcgaagctagtagtcacagccttgatcaagctcttctccttcatccggctgttcctttccagagccgccgagagtaggctagagaaggtccgtcgcactgccccaccaccagcagcagagaagccaaagccgccccgagccgtcagcgaagaagaggtgcgcgcctgcctgcagcgcctggacagtctcgagtcgctgtgcggccaccttgccaccaggcctgcgcagatcccggaggacaaagagcgcgttctgctgagctcgttcgagcggatccggtctgttgaggctgacctcgagaggaccaaaagagtgctgaacgcgaccgtggcgaagcagaaggcgctggtggaggaggtggctctggagtctgtgcaggagctgcctagagccaagcttctttatgcatggaggagtacaagaaagtaagtggtttcgacaatgcctaaaaaaatttgggacacattgaagatagctcgcgaggagattatgagacactaaattactctaggagattatgaatgtaatgctttgtaatcctttcatttttgaagaaattggaaatttacttaatagagtaggttatttagtttgatatatgtcaatcctaaatttataggacgatgggcgaaaattgattttatgtatcaataggttat

SEQ ID NO: 41439 - DNA, 2816 bp, Zea Mays
caatccaaaacaaaaatctgagttctctcatcctctctcctgtcccaactcccaagagtgattactgttttttgtttcgtggatgcgatctgttttacgcgacgatctgcttcgctgttcgcgtgttcgttaacggcgggcgccgacggattggagctgtcattgtcaggcttcatctttcggttttaattctcccaggagaagttcctgggctgggagtaaatgagcggcgccctcccctgtcgatacatgccgtttctctgggtggaatttatggctgctcggacgccacgctgcttttagtagtaaccaatgcagacagtggcggtagaagattgggtgcgggagcgcgacgtctcagctgggctatccaggaatccagaatttacttcggtggcgaggatgtctgtgagccatgcgcaggacattgaaatatcgctgtgcgacggcaactcggaggacgagcggcggcggcgcaagatcggctcgctgcggcggaaggccatccacgcgctcaagaagcgagggaggcgtcgcgtcgactcccgcttcccgccgccggccatttccatcgaggacgtccgcgacgcggaggaggagcgcgctgtcgcctccttccgggagcggctcgcggcgcacggcctcctccccgagaagcacgatgactaccacatgatgctaaggttcctcaaggccagaaagttcgaagccgagaaggcaatgcagatgtggtcagagatgctgaaatggaggaaagagttcggaactgacaccatccttgaggattttgattttgaggaactggatgatgtgctacgctactaccctcagggctaccatggtgttgaccgccaaggccggccggtgtacattgagaggctagggaaggtggatccgaacaaccttatgcagatcacgtcagtggatcgctacatcaagtaccatgtccaggagtttgagagggccttcagggagaggttccctgcctgcacattagctgctaagaggcacattgactccaccactaccatcttggacgtccagggtgtggggtttaagaatttctccaggactgctagagaacttgtaaaccgaatgcagaagattgatagcgattattatcctgagacactccaccaaatgtttgttgtgaacgctggcagtggattcaagtggatctggaacagtgtgaagggcttccttgacccaaaaacttcatccaagattcatgtgctcggttcgaactaccagagtaggcttcttgaagtaatagattcgagtgagttgccagaattccttggtggttcatgcacatgtagtgacaagggtggttgccttggatcgaacaaagggccatggaatgatccttatatattgaagctgatccacaatttggaagctggatgcatgagggaaaccaccaaacccgtttctgagggcggagaaagaagcagctcttcctttcggttggaacagatgaaatggcagggcatgttaagcgatacatcaaatgctgaatcaggatccgatgttgatgattttggtccatcatttgttcataaagtttcaggctatggttgcttgactccggttcgtgaggaggtaaagggcacagattgtgcaacatacttgagctgcgatgatcaaagtcacccggatatggttcctgaattttaccatggagtgcaacggactactgaaatggtgcagaaacaaatggctgatttcaggcaatattccaccaacagaaggcctcgtgaattagggaacggctctcttaatgccaatggtacagcagctgctcagaggggctgggaagacgtggcgaagctagtagtcacagccttgatcaagctcttctccttcatccggctgttcctttccagagccgccgagagtaggctagagaaggtccgtcgcactgccccaccaccagcagcagagaagccaaagccgccccgagccgtcagcgaagaagaggtgcgcgcctgcctgcagcgcctggacagtctcgagtcgctgtgcggccaccttgccaccaggcctgcgcagatcccggaggacaaagagcgcgttctgctgagctcgttcgagcggatccggtctgttgaggctgacctcgagaggaccaaaagagtgctgaacgcgaccgtggcgaagcagaaggcgctggtggaggaggtggctctggagtctgtgcaggagctgcctagagccaagaagaggatgttctgttgataggacatggaggtcaacagcacgggaccccgaaccatgtcgtcgacattaaccgaccgaccaaccgaccgtgaagctgacgcgactctctgccaccagccagccggagccatttttgacctcgctgccgccgccgccgaagccgacgccgccgactctcacctaacaccgaaatggaagagaagaccggcggcgccccctgttggctgctgcttcccttttcatgccgccccttttttgtagtgcctccatttggccgtactctgctggcggggcccgggccgggtggcgcctttttgattggtgaatgctgcggcggtcgccaagcaccacccttgtttcttggccaggcgcgcgcgagagagagagagatagatggtgctggttggtgtccgaatggctggagtcgttctgtacgtacttgagtactgctgagtgctgaccccgtggctggaggtgggagacagacagtggcgagcttggtgccgtcgatgcacctgtacatgccatgccacaccggctgtgattctagtggcctgctaatatacagattgttgcgacagcccatgttactgttg

SEQ ID NO: 41440 - DNA, 2009 bp, Zea Mays
ggctggaagctgcaattttttttttggcaacgagatttggtccctcgccagtttccaccctctgtttcttcctgctcagatctacagtggcggtagaagattgggtgcgggagcgcgacgtctcagctgggctatccaggaatccagaatttacttcggtggcgaggatgtctgtgagccatgcgcaggacattgaaatatcgctgtgcgacggcaactcggaggacgagcggcggcggcgcaagatcggctcgctgcggcggaaggccatccacgcgctcaagaagcgagggaggcgtcgcgtcgactcccgcttcccgccgccggccatttccatcgaggacgtccgcgacgcggaggaggagcgcgctgtcgcctccttccgggagcggctcgcggcgcacggcctcctccccgagaagcacgatgactaccacatgatgctaaggttcctcaaggccagaaagttcgaagccgagaaggcaatgcagatgtggtcagagatgctgaaatggaggaaagagttcggaactgacaccatccttgaggattttgattttgaggaactggatgatgtgctacgctactaccctcagggctaccatggtgttgaccgccaaggccggccggtgtacattgagaggctagggaaggtggatccgaacaaccttatgcagatcacgtcagtggatcgctacatcaagtaccatgtccaggagtttgagagggccttcagggagaggttccctgcctgcacattagctgctaagaggcacattgactccaccactaccatcttggacgtccagggtgtggggtttaagaatttctccaggactgctagagaacttgtaaaccgaatgcagaagattgatagcgattattatcctgagacactccaccaaatgtttgttgtgaacgctggcagtggattcaagtggatctggaacagtgtgaagggcttccttgacccaaaaacttcatccaagattcatgtgctcggttcgaactaccagagtaggcttcttgaagtaatagattcgagtgagttgccagaattccttggtggttcatgcacatgtagtgacaagggtggttgccttggatcgaacaaagggccatggaatgatccttatatattgaagctgatccacaatttggaagctggatgcatgagggaaaccaccaaacccgtttctgagggcggagaaagaagcagctcttcctttcggttggaacagatgaaatggcagggcatgttaagcgatacatcaaatgctgaatcaggatccgatgttgatgattttggtccatcatttgttcataaagtttcaggctatggttgcttgactccggttcgtgaggaggtaaagggcacagattgtgcaacatacttgagctgcgatgatcaaagtcacccggatatggttcctgaattttaccatggagtgcaacggactactgaaatggtgcagaaacaaatggctgatttcaggcaatattccaccaacagaaggcctcgtgaattagggaacggctctcttaatgccaatggtacagcagctgctcagaggggctgggaagacgtggcgaagctagtagtcacagccttgatcaagctcttctccttcatccggctgttcctttccagagccgccgagagtaggctagagaaggtccgtcgcactgccccaccaccagcagcagagaagccaaagccgccccgagccgtcagcgaagaagaggtgcgcgcctgcctgcagcgcctggacagtctcgagtcgctgtgcggccaccttgccaccaggcctgcgcagatcccggaggacaaagagcgcgttctgctgagctcgttcgagcggatccggtctgttgaggctgacctcgagaggaccaaaagagtgctgaacgcgaccgtggcgaagcagaaggcgctggtggaggaggtggctctggagtctgtgcaggagctgcctagagccaaggtggttttgatcgatgggatgtta

SEQ ID NO: 41441 - DNA, 2239 bp, Zea Mays
ctgcaattttttttttggcaacgagatttggtccctcgccagtttccaccctctgtttcttcctgctcagatctacagtggcggtagaagattgggtgcgggagcgcgacgtctcagctgggctatccaggaatccagaatttacttcggtggcgaggatgtctgtgagccatgcgcaggacattgaaatatcgctgtgcgacggcaactcggaggacgagcggcggcggcgcaagatcggctcgctgcggcggaaggccatccacgcgctcaagaagcgagggaggcgtcgcgtcgactcccgcttcccgccgccggccatttccatcgaggacgtccgcgacgcggaggaggagcgcgctgtcgcctccttccgggagcggctcgcggcgcacggcctcctccccgagaagcacgatgactaccacatgatgctaaggttcctcaaggccagaaagttcgaagccgagaaggcaatgcagatgtggtcagagatgctgaaatggaggaaagagttcggaactgacaccatccttgaggattttgattttgaggaactggatgatgtgctacgctactaccctcagggctaccatggtgttgaccgccaaggccggccggtgtacattgagaggctagggaaggtggatccgaacaaccttatgcagatcacgtcagtggatcgctacatcaagtaccatgtccaggagtttgagagggccttcagggagaggttccctgcctgcacattagctgctaagaggcacattgactccaccactaccatcttggacgtccagggtgtggggtttaagaatttctccaggactgctagagaacttgtaaaccgaatgcagaagattgatagcgattattatcctgagacactccaccaaatgtttgttgtgaacgctggcagtggattcaagtggatctggaacagtgtgaagggcttccttgacccaaaaacttcatccaagattcatgtgctcggttcgaactaccagagtaggcttcttgaagtaatagattcgagtgagttgccagaattccttggtggttcatgcacatgtagtgacaagggtggttgccttggatcgaacaaagggccatggaatgatccttatatattgaagctgatccacaatttggaagctggatgcatgagggaaaccaccaaacccgtttctgagggcggagaaagaagcagctcttcctttcggttggaacagatgaaatggcagggcatgttaagcgatacatcaaatgctgaatcaggatccgatgttgatgattttggtccatcatttgttcataaagtttcaggctatggttgcttgactccggttcgtgaggaggtaaagggcacagattgtgcaacatacttgagctgcgatgatcaaagtcacccggatatggttcctgaattttaccatggagtgcaacggactactgaaatggtgcagaaacaaatggctgatttcaggcaatattccaccaacagaaggcctcgtgaattagggaacggctctcttaatgccaatggtacagcagctgctcagaggggctgggaagacgtggcgaagctagtagtcacagccttgatcaagctcttctccttcatccggctgttcctttccagagccgccgagagtaggctagagaaggtccgtcgcactgccccaccaccagcagcagagaagccaaagccgccccgagccgtcagcgaagaagaggtgcgcgcctgcctgcagcgcctggacagtctcgagtcgctgtgcggccaccttgccaccaggcctgcgcagatcccggaggacaaagagcgcgttctgctgagctcgttcgagcggatccggtctgttgaggctgacctcgagaggaccaaaagagtgctgaacgcgaccgtggcgaagcagaaggcgctggtggaggaggtggctctggagtctgtgcaggagctgcctagagccaagcttctttatgcatggaggagtacaagaaagtaagtggtttcgacaatgcctaaaaaaatttgggacacattgaagatagctcgcgaggagattatgagacactaaattactctaggagattatgaatgtaatgctttgtaatcctttcatttttgaagaaattggaaatttacttaatagagtaggttatttagtttgatatatgtcaatcctaaatttataggacgatgggcgaaaattgattttatgtatcaataggttat

SEQ ID NO: 41442 - DNA, 6650 bp, Zea Mays
gattgggcctcctccctcctaggacaagaggtcacagtcacagccgcagccgcaggaggcggagggaacagggaggggatagattacacccatcccattcaatggcttgagagggaaaggcagcaggcagcgagcccgtttttaaaaatccaaatccacctccactgctccagtccaggctctcttgcctctctcactgccattcctgtccttgaagctgaggcatccgggggagccaagaacacccgtcgcccgcttccgagatgaggctggatccttgaagcccgctggccgccttcgccgttcgccgttcgcctccgggaaggaaatgaggtgagccaggtcgcgcggcactttccagcaagcttccgaagccttgtgattcggctgtagcaggcttctagccatggaggacgagcgaaaagctccgagctttctcgatgcgccgcccaaggatatcccaatcgccaccgccaagccgctcaccatccggaccagcgccgccgcgtccggatgcggcggctccgaccgctcctgccccatcttgccggccatctccatcacgccgcacctctactcgccgtcgccgccgtcgtccgcgttcgtgtccgcgctgcagtccccgtacatctcgccccgggttctcgacccgccgcctcctcctcctcctccgccggagccggcgcctcagccgcgccaggaagtcaggaccaccgccggcgccagcgccagcaccaccgcggcgccgtcgccgacgtcgtgctccaacggctcccactcggaggatatcgacgcgtcccgcacgccgccgtccgagcgctacgactacagcggcgtcgacgcggccaagatttccgacggcagcggctgcggcggcggcggcggcgctgggctcctgccgccgcgcgcgtcgttctcgttccccgtgccgcgggtgtccttcaccaggggctcggtcgcgtcgccgtcctccaacgccaagctccgcagctgcgacgtgtacatcggctaccacggcagcggcggcctctccaggttctgcaagtggctcaagtcggagctcgagttgcagggcatcgcctcgttcgtcgccgaccgcgccaagtactcggattcgcagagccatgaggttgccgaccggattatttgctccgtcgcgtttggcgtcgtggtggccaccgtgtcgagctttctcaacccgttcagcctcgaggagatcagattcttcgctcagaagaagaacctggtgcccatactgttcgacaccgagccggcagagatcgccgggcttttcgatggtagactggaggataaggaagcgaaggaggcgttcgaagggctgatgcggtgccacgaattcaagctcgaggcgaacgagagcgattcaagaggctgtgtgtcgaggacagtcacactgcttcggtccaagcttgggcggaagaacatcgccgagaaggagagcgaagcctctgatggcctgccttttccgcgcaaccggcattttgtgggaagggagaaggagctgagcgagatcgaaggcatgctctttggttcgaccgccgcgggtatccaggaagtggattgcccgagggcttccagtacaaatgagagatcgagcggcgtatctgatggatttgctgatgaggacagtgacaccgcgaggaaatctaatgccaggtacatcagtttggagatgcgcaagtgcaaggaacccacgcttgaggcttggattgacccagtgatcgagttaccatctggtaaaagcagaagcctgcagaggcagagatcaaggcacaggaggtcaaggtttcggtgcaacagcaagggctatagcggcggcgccaacatagtctgcatcaatggttctccgggcattggcaagactgagctggcattggagtttgcttgcaggtactcacagaggtacaagatggtgctgtggattggaggcgaagctcggtatctgaggcaaaacatactcaatgtatccatgaatctgggactggatatcagtgctgaggctgagaaggagaggggcaggatcaggagcttcgaggaacaggaattcgacgcgttccagcgggtgaagagggagctgttccgcgacgtgccctatctgctcataatcgacaatctcgagagcgagagggattggtgggaaggcaaggacctccatgacttcattccaaggaacaccggagcaacacatgtcatcgtgacaacacgtcttccacgcgtgatgaacctcgagccgatgcagctgccgcagctctcgtacatcgatgcgatggccttgatacaggggaagagaaagaaggactatctgcctgaagaagccgaagtcctcaggaagttcgatgagcggttaggcaggctgagctttggcctgtgggttgtcggttcgctgctttctgagctcatgatcgctccttcaactctgtttgaggccgttgatcgaatatcgctgaacgagaatctgttccccattggcgccaacgacgatggattctgccgcaacaattctttcttggtgaaggtcttggtcttctgctttgctctgatggaccgagcaaaaggaggaagccttacgtcaaggatggtcatcgctggttcttggttagctccaactcctgtatcgtccacgctactagctgcaaccgcgagcaagctaccgatgaaaggcagtggtatgcacctgtttggtgaatctctcaggactgcatttctatgtggcacacattgtttcctagctccaaacgggcggaaggctgaggtggagtcggcgctcttgcttgtcaaccttgggttggcaaggaaggcaaacaggcatcctggttgctggatccagttccatcctatcacgcagctcttcggcaagatcaggggaggtttggtgcctacgactgcagcagtgaatggagtgatgaggactggaaacccctcggtatactctgaccacttgtgggctagcgcgttcctcgtgtttggtttcaagtccgagccgcccgccgtccagcttaaggcggtcgacatggtcctcttcatcaagaagacggcgctgcccctcgcggtcgactccttcatgtcgttctcgcggtgcggctcggctctggagctgctcaaggtgtgcacgaacgtcctggaggaggtggagaagtcgtacgcgtcgcggatgcaggactggagccgcgggtcgctgtgctggaggaagaagctgcagccgaaccaccgcgtcgacgagctcgtctggcaggaggtgacgctgctcaaggcgacgctgctggagacgagggcgaagctgctgctccgcggcgggctgttcgacacgggcgaggagctgtgcaggacctgcatcagcatccggactgtcatgctcggccacggccacgcccagacgctagctgctcaggagacgctggcaaagctggtcaggtataggagcaaaatatgagatgagatgatggtgtccaagaccctttgcaagcttcttcccccctgctgtttcagaagttttcacgcccccatttttgttcctgaatctgttatgccaccggctacagttttgttagcgatcatcagtataatagccaaggtccatgatgccatgtgtaacttattttagagcaggtgccatatgtaagtggaggtgttatgtacagtgcagtccatctgctatttggtagaactaccattgagcttcccatgctgaactttcagaattgaagatgttcttccttttgataacttgagtttcagatttggagagcaaagagctgcatcacgccttagagttgctgtagggtgttatgttttctccaaaaaaatgcatgcatctatggtcaaatctgatgccaaacaacaagagcatgtagtctttctgaaatgttttctgtcaccctccatgatcaggtacatgtcatacatgaatgggcatgggcaggcactcccactgagggtgctgcttggcttcgtctgcagcggcttgcctatacttggcataggatattgttaattccagtgagtggtggagtagttgtgggtatgatgcatggattattggagatttttgagcagataaagcaatcattattatcatctcaaagggagggtattgatttcatggctgcgatttttcctacaatcaaagccatccaagctgcaattactttagggacagggtgttcactggggccagaaggacccagtgttgatattggtaaatcatgtgcaaatgggtgtgctgaaatgatggagaacaatagagaacggagaattgctcttgttgctgctgggtcagctgctggaatcgcttcaggtttcaatgttgcagttgctggatgtttttttgctatcgaaacagtattaaggccacttcgagcagaaaattctccaccatttactaccgctatgattatattggcatcagttatatcatcaactgtttcaaatgttttgccaggggaaaaggcagcatttattgtcccgacgtatgaactaaaatctactgctgagctgccactctaccttattctgggaatgctttgtggtgttgtgagtgtggcattcaggcagttggttgtttggttcaccaagacttttgacttgataaggaagaagtttggccttcctgctgtagtatgtcctgctttaggtggtcttggtgcaggtttaatagctctaaggtaccctggaatattgtattggggtttcaccaatgtcgatgagattctacatacgggtaaaagtgcttcagcccctggaatctggctcttggctaattagctgctgcaaaagttgtagcaacggcactttgcaaaggttctggtcttgttggtggcctttatgctccaagtttgatgattggcgctgctgttggtgctgtttttggaggctcagcagcagaactaataaattctgtgattccgggtaacactgctgtcgcagatcctcaagcttatgcactggtgggaatggctgctacgctggcttcagtgtgttctgttccactgacatccgcgcttctgctctttgaattgactaaggattatagaattctactacctctaatgggagctgttggtttagcaatatgggtcccatctgttgtaaatcaatctggtagcaaagatacattcgaggcaacatcacctcgtcatggctattcgtcactgttacctcccacggatacgaatgagacagattggaggcgacaagatggagacgatgttgaactcacaattctagacattgattcctaccactatgttagtaacaatgaggagatgcttcttgatgacttgaaggtatcacaagcaatgacaaatcattatgtgaaggtcacgtctacattcaccatcgaggaggcaacaaggcttatgcaagagaagcagcaaagctgtgttcttgttgtagataatgaagattttcttgagggaattgtaacatgaggtgaccatcgtcgtaaaggatttgtgccaagtgaaaactctgatagtacccaggcaaatccatcgaccttagatgcaaattcttctcttgtgtcatcatgcctcactcgaggtttccagttccatggcaacgaaagaggactggtgacctgctttccagatacagacctgagcactgccaaggttcttatggaagttaaagggatcaaacaacttccagtggtcaaacgtggtgctggccgtagaaatgatgggaggcgtaaggtccttggccttcttcattatgattcgataggatggtgcttaaggggaacttgatcggtggaaggcaatataccagaggagaaaattggaattctgccattatcaaactacggattcgctcgaatgccattatgagaacacgcttcgttattacgccatttttaaacactggcttacagataaaatgccatttagggggttatttgataaagtatcaactgtttggactgttttacccctaaagtaaactgcagtcgctcgttctctgtctccagtcgcgcaaaacacttcattctctctgttctcctcctctcgctccttctctctgttctggaccgcgcctgggcaagacgcacgcacgcctgggctgcagcacgcagcagcggcgagctccagcacgccggccgggacctcctctctgctctctgcatcgcacagcacgccgcccgggctccagcgagatctcggctccagcacgccgcccacggcgagctccagcacgccggccgggctccccacggcgagctccagcacgccatccggactccccacggcgaccctcggcggcctgttcccctcggcgagctccagcagcggagatctcatattattggtcaccaacagttggctagatggattacagctggaatgattctatttttgacgatgagcttccgcctagcttagcattggtagtacatcctagtggtcgcccaaaggttggtattgactgggacgcacttcaaattgttgagaggcaagatgaggaaggtaggatagaaattgttgatgatgacagaatgtatgagttgatcggtttgagagctgaggatgaggaaggctggtgaagctttaaagatgcaagagggtgatgataattgggtatggttcatgagccaactgaaaaaggcaataggagatcttccattgcttgctgta

SEQ ID NO: 41443 - DNA, 231 bp, Zea Mays
ctcaaaagcaaacaaaggagctacggtagaagaaaccacaaacaatgacattgtttatgtacacaagcaacaaaaaaaaaggaaaaagaaaaaaacaaaccctatctcttcatctcttgtgcctgctggagtgagtattcacatctgatgaccctgagcccacctggccatgagctgctgctgctgctgctgcaccaggcccgcgcagccctgcatcggcaacccacggcc

SEQ ID NO: 41444 - DNA, 1538 bp, Zea Mays
agcgaagatgttggagaacggagtggagatgaactcttcactgaagaagcttggcatcagtgttcttgggctgggtgagggaagcatccaatcatccattttggaggttgctgcaaaaagatgatttacaccgagatatcaaggatggatgtttgtcgtgcaatggaagtggtggtgatggctggagatgcagcgatgctagaattgaggcttattagtgttttttttatgttcatgagaaactgtgttatgatgtttttattttagttgggttgagtatgtgatgttttggattgtttatgttgattgtactatgaagccatatgcatccttgatgcaaaaggctggaacatggttttttccattatatataaaaaaaatccattaggttgtccgtcccagaaatcagggaacagtcattgttttagttgaaaccattaggttgtccaaagcaaaaccattgttttagttgaaacactaaacagtcatgttagtataagatcaggtgggtgcggtaattctatcaactgtgcgtaggaaaaaaaaagcaaatgatattgctggacatggcacatggtagcatagctagaagaaatggtgcaacctcgcagtcatgttagtaagatcaatgcagtcaattatacagaaacacttgaagtcaggatatggacaggtaaacggtgcaacctttgcgcaagcacagtatacagcaacagtaaagtaacttagacacgatgagagtagagtactttactgctaaacccaggagattatgcatgaacaccaccagaacacaagagttgcgcatatatataaacaccaccacaacaggtaaatcgctgacatttgaaactgaacccaaccacaacactgcaagatacagttctgactcaagcatacgatccacgagcacaaccactggtaactgccatcccaaatctgcagtctttttacggaaccaaacaaacctctaacatgttacacaatccaaggaacaggaacagcccaccggatggcgtcggctccgatggacaaaggcgccgcctttaccaggcgggggataagaacagagcagtcggacgggtctggacaaaaaaaaacccgtctttctacggacaaaaaaaaaatccacggcagcaaaaaccttgtacgtagcagtggaaatcaggctcttgcagtcttgccccctccaccgccacgaagaagaacctgttgcgagagagacgactgaactggtactgggctctcacctctctgtgtgtgggtgggcgccctggtatatatggggcgcaaagcagtttttgataggagagggacagggagagaggagatgcagatggaagagggaggactggggggagacgagcgcggttggcccagaggaggcgaagggaacggcgtgcgtgagagataaagaagctggaactggaaggatggatccgttggttgccgagttgcagagctgtcgtcttcccccactcactctcccctccatcttttgcggaagcgactggtaaaacggggaagaccggcatcca

SEQ ID NO: 41445 - DNA, 1763 bp, Zea Mays
aaaagcccacatagcctctccctctctctgtcgcacgccaccacccagaggccagagcgcaaaacccacgaccccacctcgcatcctccccgtcgccgtcgccgtcgcaatcgcaacccacgccgtcgcacgccacctctccctcggctccgacgatgtcggcgccatccgacgccgcggcggcatccgcagctcccgcgcccgcgccgacgactgccgccgcctcctctagcggcgggttcaccttcaagctccacccgctggtcattgtgaacgtctccgaccaccacacccgcgtcaaggcccaggccgcctgctctgcggacagctcctccccctcgtccgggccgggggccgggcagccgccgagggtgttcgggtgcgtgatcggggtgcagcgcgggcggaccgtggagatcttcaacagcttcgagctcgtgctcgacccagtctccggcaccctcgaccgcgccttcctcgagaagaagcaggagctctataagaaggtgttccctgacttctacgtgctcggttggtactccactggaagcgatgtgcacgacaccgacatgcaaatccacaaagccttgatggatgttaacgaaagccctgtttatcttctattaaatcctactatcaacctctcccagaaggatctccctgtgactatttatgagagtgagttgcatgtcatcgatgggtgtcctcagcttatctttgtcagatcaaattatacaattgagactgtagaggctgagaggatatctgtggaccatgttgcccatctcaaaccatctgatggtggttcagcagcaactcagttggctgctcatcttacaggaatacacagtgccatcaagatgctcaatagcagggtccgtgttatccatcagtatcttgttgccatgcaaaaaggtgacattccaatggacaattcgctgcttaggcaagtctcaagccttgtaagaaggctaccggctacggaatcacagaaattccaagatgactttttaatggaatacaacgacactctcctcatgacttacctggcaatgttcactaactgttcaagcacaatgaatgagttggtcgagaaaatcaacacaagctatgagagaccgactaccaggagaggaggccgaggcaaaactgatgatttgctggaattgtatcagatcccacctgtgctgaagttgatatgtaaagttcctcacccagttattctatttgactctaaggctagtttggaaacttcaatcctcttcgggattagggtgtattaaaggctagtttgggaatctccttttcttaagagaaattagtttattttctcttgagaaaataagaatcattcggaaaaatgtagttcccaaactagccttaaacgtggaaattagttcatttctctttaaatccccttcaatcctggaatggatttgagtttttaaactggtgtagtttggagactcaaatccccttcgggatcttcgggattgaaggggatttgaagagaaataaactaatttccccctcctctggctagtttagaaactctaatcccctccgggattagaggggattgagggagaaattagtttacttctcttcaaatcgctttcaatcccaaaaggaatttgagttttcaaactagccctaaaagggatattaatgctggtttcgtcacattcacggtcaacaaaacttaaatcatttgttacgctgcttgatgtaacgctatgatcaatgagcagggcagagcgcag

SEQ ID NO: 41446 - DNA, 1443 bp, Zea Mays
gtcactttgacatcctagttatcgtaccgctctttaaattcagggttcagagcaagaaaggatatatttatgaatttgtgaagcttgctgatgatgtattaataaatttaaattttttctttcttctctatatgacacgttgccttttttatgtaaatggaaatgctcttttttttcatccagcaacacctaaggtttattcacagagttgcatgtcatcgatgggtgtcctcagcttatctttgtcagatcaaattatacaattgagactgtagaggctgagaggatatctgtggaccatgttgcccatctcaaaccatctgatggtggttcagcagcaactcagttggctgctcatcttacaggaatacacagtgccatcaagatgctcaatagcagggtccgtgttatccatcagtatcttgttgccatgcaaaaaggtgacattccaatggacaattcgctgcttaggcaagtctcaagccttgtaagaaggctaccggctacggaatcacagaaattccaagatgactttttaatggaatacaacgacactctcctcatgacttacctggcaatgttcactaactgttcaagcacaatgaatgagttggtcgagaaaatcaacacaagctatgagagaccgactaccaggagaggaggccgaggtgctttcatgtagctcacctgccatgatcctgctgctgctttcatctgtgaggatttttcgggagtagcttatgtccctggtcatttttttgcatgcaatctatcatgcgcaatcggctatacggcagctcttgagtcacttcaaactttctaggcaaaactgatgatttgctggaattgtatcagatcccacctgtgctgaagttgatatgtaaagttcctcacccagttattctatttgactctaaggctagtttggaaacttcaatcctcttcgggattagggtgtattaaaggctagtttgggaatctccttttcttaagagaaattagtttattttctcttgagaaaataagaatcattcggaaaaatgtagttcccaaactagccttaaacgtggaaattagttcatttctctttaaatccccttcaatcctggaatggatttgagtttttaaactggtgtagtttggagactcaaatccccttcgggatcttcgggattgaaggggatttgaagagaaataaactaatttccccctcctctggctagtttagaaactctaatcccctccgggattagaggggattgagggagaaattagtttacttctcttcaaatcgctttcaatcccaaaaggaatttgagttttcaaactagccctaaaagggatattaatgctggtttcgtcacattcacggtcaacaaaacttaaatcatttgttacgctgcttgatgtaacgctatgatcaatgagcagggcagagcgcag

SEQ ID NO: 41447 - DNA, 1128 bp, Zea Mays
ctttgaagccctctctcaaaacaaatttatggtggctgctcatcttacaggaatacacagtgccatcaagatgctcaatagcagggtccgtgttatccatcagtatcttgttgccatgcaaaaaggtgacattccaatggacaattcgctgcttaggcaagtctcaagccttgtaagaaggctaccggctacggaatcacagaaattccaagatgactttttaatggaatacaacgacactctcctcatgacttacctggcaatgttcactaactgttcaagcacaatgaatgagttggtcgagaaaatcaacacaagctatgagagaccgactaccaggagaggaggccgaggtgctttcatgtagctcacctgccatgatcctgctgctgctttcatctgtgaggatttttcgggagtagcttatgtccctggtcatttttttgcatgcaatctatcatgcgcaatcggctatacggcagctcttgagtcacttcaaactttctaggcaaaactgatgatttgctggaattgtatcagatcccacctgtgctgaagttgatatgtaaagttcctcacccagttattctatttgactctaaggctagtttggaaacttcaatcctcttcgggattagggtgtattaaaggctagtttgggaatctccttttcttaagagaaattagtttattttctcttgagaaaataagaatcattcggaaaaatgtagttcccaaactagccttaaacgtggaaattagttcatttctctttaaatccccttcaatcctggaatggatttgagtttttaaactggtgtagtttggagactcaaatccccttcgggatcttcgggattgaaggggatttgaagagaaataaactaatttccccctcctctggctagtttagaaactctaatcccctccgggattagaggggattgagggagaaattagtttacttctcttcaaatcgctttcaatcccaaaaggaatttgagttttcaaactagccctaaaagggatattaatgctggtttcgtcacattcacggtcaacaaaacttaaatcatttgttacgctgcttgatgtaacgctatgatcaatgagcagggcagagcgcag

SEQ ID NO: 41448 - DNA, 2848 bp, Zea Mays
atgccttagaagcacaacaatataagaaaagaaaataatatttatgtaggctctagtcttagactttatttaaatatttagtattcacttcaatcaatcaacacacgtggacattaatatcggctcagggtcacacccgcaaagctaccgccgcagtgccgcacggcgactccgactctgtctcctgcgcggctccagctcaccctctcctcacatcgaggcggaccggcccacgtcgccggcaaccgaaacgtcggccgtagcctcgcacctccggcatcggcgagcgcgcgcgcccgtccggcggcggagatggcgctgcggcacctggtcacgggccagaacaactgcgcgccggacggcgcctcgtcgtccaaccccctcaacgccctcgccaacgccttccttggccagtcctccaaggcgcagtcaataaaggaacttcctggttctgttagtgttccatctacatctggcttcagcgcgcctgctcccttgtcaaacatccctggttcagaaaatgagttcaaacaagaccagcgaccttttgtgcagggctctgactttattcatggtggtcctgctaatgattggattaagtcttttcggcctccgggggttcctgaacttggtggaatagaagcacactttccagattttgagcaaatttataacaatgcaggaacaacctttcagccgccattggatggtccaccacaaagagtgttgtctggtgtcttgcattcctttctcacaagtggcccagctggtgtgccatttcaacctcttccagtaccagctgctcttggtttatctgaaagtgacaaacagtgcatacgtgatcgtagctgcataatggcacggcatattttttctgaccaaccggaagaatatatacaggctcaggtcaatactttgctgcattcgcttgatatagacaaccgtatgagaggacctatgcatggacaatacccagaactacaggagtactggaaccagtcccaaagttctatgggtcctgccctgatgcataataccgctgataaatggattactgagtttggcaaacaaaataataatccggaaaattgggcaaagtctttcgaacaacaatatggccccaatgggtgggcctctgagtttgaacagcatcagtctcagatggccatgggccagatgggaggagtgaacatggccaacctggctgctatggagcaatcccgaatgcttgcacaaactttagcaagtaataatgatcccaagtttcagaattctaagttcttccagtttgtttcaaagatgagccggggtgaacttattatagaagataatcaggtaaaagaaggtttagcatcccaatccagtggctgggctgatgaatttcaaacacagtacaaagctaatgcaaactcatgggcggatcagtttgcacgtgaagagctttcacaaggggcggataagtgggttagtgagttctctagtcaacataatcaaggtgcgctaaatgagagctgggttgatgagttctcgaaattaaatgtcactgatgaatgggcagaggaattcagtggaggtggttttggcgaaagctctgctgatccgtgggtagatgagttccaagaacacttgtcatctttcaaacaaagttcaggcgcctctcgaggggtttatgtttattctgagaacaacccgtatgttggtcaccctaatccaatgcaagaaggacaggagctcttccgcaagggcctcttaagtgaagctgttcttgctttagaggctgaagttttgaagaatcctgataatgctgaaggttggaggttgttaggcataacacatgcagaaaatgatgatgaccaacaggccattgcagcaatgatgcgtgcgttggaagctaatccgacaaaccttgaagttcttcttgctcttggtgttagtcacacaaatgaattggagcagggagaagcattaaggtatctttataggtggcttcagaatcatccaaaatatggtggccttgtccctccgcagtcaactgattcaccttatggtcctgatgttgttagattgtttaatgacgctgctcagatgtcacctgaagatgcagatgttcatgtagttctgggagtcttatacaacctatcaagagagtatgataaagctataacttcatttaagacagcagtacagctcaaaccacaggactactcactctggaacaagcttggtgcaacccaagcaaacagcatccagagtgctgatgcaatattggcgtatcagcaggcactagacttgaaacccaactacgtgcgtgcatgggcgaacatgggaatcagctatgccaaccagggtctgtatgaggattccattcgatactatgtaagggcagttacaatgaacccaaaagctgacaacgcttggcagtacttgaggatttctcttggcaacgcttcaagagctgacatgattgccgcatgcgacgcccgcaacctcgacgctcttcagaaagagtttcctctctgagtcctccctagctttctccagcagcgatctccatggaaatggaattggaggaactaggaagtgagggggaacaacatcccgtcgatgtgtgaagtatcattgcaagaaggcaatagtggcaaagggggaattatacatctgtaagtacacaggaataaaggaatggttgagtaataaattgtttttagggcgaaccactgcttgttttataaagttaatataaaaaatgcaatgcgggtgcttcttggtggtggtgccagatcgagtttaactgagacgatccaaattaaattccatggtccacgccacgggtcctgctgggccgtta

SEQ ID NO: 41449 - DNA, 2677 bp, Zea Mays
atgccttagaagcacaacaatataagaaaagaaaataatatttatgtaggctctagtcttagactttatttaaatatttagtattcacttcaatcaatcaacacacgtggacattaatatcggctcagggtcacacccgcaaagctaccgccgcagtgccgcacggcgactccgactctgtctcctgcgcggctccagctcaccctctcctcacatcgaggcggaccggcccacgtcgccggcaaccgaaacgtcggccgtagcctcgcacctccggcatcggcgagcgcgcgcgcccgtccggcggcggagatggcgctgcggcacctggtcacgggccagaacaactgcgcgccggacggcgcctcgtcgtccaaccccctcaacgccctcgccaacgccttccttggccagtcctccaaggcgcagtcaataaaggaacttcctggttctgttagtgttccatctacatctggcttcagcgcgcctgctcccttgtcaaacatccctggttcagaaaatgagttcaaacaagaccagcgaccttttgtgcagggctctgactttattcatggtggtcctgctaatgattggattaagtcttttcggcctccgggggttcctgaacttggtggaatagaagcacactttccagattttgagcaaatttataacaatgcaggaacaacctttcagccgccattggatggtccaccacaaagagtgttgtctggtgtcttgcattcctttctcacaagtggcccagctggtgtgccatttcaacctcttccagtaccagctgctcttggtttatctgaaagtgacaaacagtgcatacgtgatcgtagctgcataatggcacggcatattttttctgaccaaccggaagaatatatacaggctcaggtcaatactttgctgcattcgcttgatatagacaaccgtatgagaggacctatgcatggacaatacccagaactacaggagtactggaaccagtcccaaagttctatgggtcctgccctgatgcataataccgctgataaatggattactgagtttggcaaacaaaataataatccggaaaattgggcaaagtctttcgaacaacaatatggccccaatgggtgggcctctgagtttgaacagcatcagtctcagatggccatgggccagatgggaggagtgaacatggccaacctggctgctatggagcaatcccgaatgcttgcacaaactttagcaagtaataatgatcccaagtttcagctttcacaaggggcggataagtgggttagtgagttctctagtcaacataatcaaggtgcgctaaatgagagctgggttgatgagttctcgaaattaaatgtcactgatgaatgggcagaggaattcagtggaggtggttttggcgaaagctctgctgatccgtgggtagatgagttccaagaacacttgtcatctttcaaacaaagttcaggcgcctctcgaggggtttatgtttattctgagaacaacccgtatgttggtcaccctaatccaatgcaagaaggacaggagctcttccgcaagggcctcttaagtgaagctgttcttgctttagaggctgaagttttgaagaatcctgataatgctgaaggttggaggttgttaggcataacacatgcagaaaatgatgatgaccaacaggccattgcagcaatgatgcgtgcgttggaagctaatccgacaaaccttgaagttcttcttgctcttggtgttagtcacacaaatgaattggagcagggagaagcattaaggtatctttataggtggcttcagaatcatccaaaatatggtggccttgtccctccgcagtcaactgattcaccttatggtcctgatgttgttagattgtttaatgacgctgctcagatgtcacctgaagatgcagatgttcatgtagttctgggagtcttatacaacctatcaagagagtatgataaagctataacttcatttaagacagcagtacagctcaaaccacaggactactcactctggaacaagcttggtgcaacccaagcaaacagcatccagagtgctgatgcaatattggcgtatcagcaggcactagacttgaaacccaactacgtgcgtgcatgggcgaacatgggaatcagctatgccaaccagggtctgtatgaggattccattcgatactatgtaagggcagttacaatgaacccaaaagctgacaacgcttggcagtacttgaggatttctcttggcaacgcttcaagagctgacatgattgccgcatgcgacgcccgcaacctcgacgctcttcagaaagagtttcctctctgagtcctccctagctttctccagcagcgatctccatggaaatggaattggaggaactaggaagtgagggggaacaacatcccgtcgatgtgtgaagtatcattgcaagaaggcaatagtggcaaagggggaattatacatctgtaagtacacaggaataaaggaatggttgagtaataaattgtttttagggcgaaccactgcttgttttataaagttaatataaaaaatgcaatgcgggtgcttcttggtggtggtgccagatcgagtttaactgagacgatccaaattaaattccatggtccacgccacgggtcctgctgggccgtta

SEQ ID NO: 41450 - DNA, 2598 bp, Zea Mays
attaatatcggctcagggtcacacccgcaaagctaccgccgcagtgccgcacggcgactccgactctgtctcctgcgcggctccagctcaccctctcctcacatcgaggcggaccggcccacgtcgccggcaaccgaaacgtcggccgtagcctcgcacctccggcatcggcgagcgcgcgcgcccgtccggcggcggagatggcgctgcggcacctggtcacgggccagaacaactgcgcgccggacggcgcctcgtcgtccaaccccctcaacgccctcgccaacgccttccttggccagtcctccaaggcgcagtcaataaaggaacttcctggttctgttagtgttccatctacatctggcttcagcgcgcctgctcccttgtcaaacatccctggttcagaaaatgagttcaaacaagaccagcgaccttttgtgcagggctctgactttattcatggtggtcctgctaatgattggattaagtcttttcggcctccgggggttcctgaacttggtggaatagaagcacactttccagattttgagcaaatttataacaatgcaggaacaacctttcagccgccattggatggtccaccacaaagagtgttgtctggtgtcttgcattcctttctcacaagtggcccagctggtgtgccatttcaacctcttccagtaccagctgctcttggtttatctgaaagtgacaaacagtgcatacgtgatcgtagctgcataatggcacggcatattttttctgaccaaccggaagaatatatacaggctcaggtcaatactttgctgcattcgcttgatatagacaaccgtatgagaggacctatgcatggacaatacccagaactacaggagtactggaaccagtcccaaagttctatgggtcctgccctgatgcataataccgctgataaatggattactgagtttggcaaacaaaataataatccggaaaattgggcaaagtctttcgaacaacaatatggccccaatgggtgggcctctgagtttgaacagcatcagtctcagatggccatgggccagatgggaggagtgaacatggccaacctggctgctatggagcaatcccgaatgcttgcacaaactttagcaagtaataatgatcccaagtttcagctttcacaaggggcggataagtgggttagtgagttctctagtcaacataatcaaggtgcgctaaatgagagctgggttgatgagttctcgaaattaaatgtcactgatgaatgggcagaggaattcagtggaggtggttttggcgaaagctctgctgatccgtgggtagatgagttccaagaacacttgtcatctttcaaacaaagttcaggcgcctctcgaggggtttatgtttattctgagaacaacccgtatgttggtcaccctaatccaatgcaagaaggacaggagctcttccgcaagggcctcttaagtgaagctgttcttgctttagaggctgaagttttgaagaatcctgataatgctgaaggttggaggttgttaggcataacacatgcagaaaatgatgatgaccaacaggccattgcagcaatgatgcgtgcgttggaagctaatccgacaaaccttgaagttcttcttgctcttggtgttagtcacacaaatgaattggagcagggagaagcattaaggtatctttataggtggcttcagaatcatccaaaatatggtggccttgtccctccgcagtcaactgattcaccttatggtcctgatatgcagatgttcatgtagttctgggagtcttatacaacctatcaagagagtatgataaagctataacttcatttaagacagcagtacagctcaaaccacaggactactcactctggaacaagcttggtgcaacccaagcaaacagcatccagagtgctgatgcaatattggcgtatcagcaggcactagacttgaaacccaactacgtgcgtgcatgggcgaacatgggaatcagctatgccaaccagggtctgtatgaggattccattcgatactatgtaagggcagttacaatgaacccaaaagctgacaacgcttggcagtacttgaggatttctcttggcaacgcttcaagagctgacatgattgccgcatgcgacgcccgcaacctcgacgctcttcagaaagagtttcctctctgagtcctccctagctttctccagcagcgatctccatggaaatggaattggaggccagtaacatttttgtatttgcctgttgattcttctgtttttattttgcttaagtgttgttgggtaaatgtataggaactaggaagtgagggggaacaacatcccgtcgatgtgtgaagtatcattgcaagaaggcaatagtggcaaagggggaattatacatctgtaagtacacaggaataaaggaatggttgagtaataaattgtttttagggcgaaccactgcttgttttataaagttaatataaaaaatgcaatgcgggtgcttcttggtggtggtgccagatcgagtttaactgagacgatccaaattaaattccatggtccacgccacgggtcctgctgggccgtta

SEQ ID NO: 41451 - DNA, 2624 bp, Zea Mays
ctcagggtcacacccgcaaagctaccgccgcagtgccgcacggcgactccgactctgtctcctgcgcggctccagctcaccctctcctcacatcgaggcggaccggcccacgtcgccggcaaccgaaacgtcggccgtagcctcgcacctccggcatcggcgagcgcgcgcgcccgtccggcggcggagatggcgctgcggcacctggtcacgggccagaacaactgcgcgccggacggcgcctcgtcgtccaaccccctcaacgccctcgccaacgccttccttggccagtcctccaaggcgcagtcaataaaggaacttcctggttctgttagtgttccatctacatctggcttcagcgcgcctgctcccttgtcaaacatccctggttcagaaaatgagttcaaacaagaccagcgaccttttgtgcagggctctgactttattcatggtggtcctgctaatgattggattaagtcttttcggcctccgggggttcctgaacttggtggaatagaagcacactttccagattttgagcaaatttataacaatgcaggaacaacctttcagccgccattggatggtccaccacaaagagtgttgtctggtgtcttgcattcctttctcacaagtggcccagctggtgtgccatttcaacctcttccagtaccagctgctcttggtttatctgaaagtgacaaacagtgcatacgtgatcgtagctgcataatggcacggcatattttttctgaccaaccggaagaatatatacaggctcaggtcaatactttgctgcattcgcttgatatagacaaccgtatgagaggacctatgcatggacaatacccagaactacaggagtactggaaccagtcccaaagttctatgggtcctgccctgatgcataataccgctgataaatggattactgagtttggcaaacaaaataataatccggaaaattgggcaaagtctttcgaacaacaatatggccccaatgggtgggcctctgagtttgaacagtctcagatggccatgggccagatgggaggagtgaacatggccaacctggctgctatggagcaatcccgaatgcttgcacaaactttagcaagtaataatgatcccaagtttcagctttcacaaggggcggataagtgggttagtgagttctctagtcaacataatcaaggtgcgctaaatgagagctgggttgatgagttctcgaaattaaatgtcactgatgaatgggcagaggaattcagtggaggtggttttggcgaaagctctgctgatccgtgggtagatgagttccaagaacacttgtcatctttcaaacaaagttcaggcgcctctcgaggggtttatgtttattctgagaacaacccgtatgttggtcaccctaatccaatgcaagaaggacaggagctcttccgcaagggcctcttaagtgaagctgttcttgctttagaggctgaagttttgaagaatcctgataatgctgaaggttggaggttgttaggcataacacatgcagaaaatgatgatgaccaacaggccattgcagcaatgatgcgtgcgttggaagctaatccgacaaaccttgaagttcttcttgctcttggtgttagtcacacaaatgaattggagcagggagaagcattaaggtatctttataggtggcttcagaatcatccaaaatatggtggccttgtccctccgcagtcaactgattcaccttatggtcctgatgttgttagattgtttaatgacgctgctcagatgtcacctgaagatgcagatgttcatgtagttctgggagtcttatacaacctatcaagagagtatgataaagctataacttcatttaagacagcagtacagctcaaaccacaggactactcactctggaacaagcttggtgcaacccaagcaaacagcatccagagtgctgatgcaatattggcgtatcagcaggcactagacttgaaacccaactacgtgcgtgcatgggcgaacatgggaatcagctatgccaaccagggtctgtatgaggattccattcgatactatgtaagggcagttacaatgaacccaaaagctgacaacgcttggcagtacttgaggatttctcttggcaacgcttcaagagctgacatgattgccgcatgcgacgcccgcaacctcgacgctcttcagaaagagtttcctctctgagtcctccctagctttctccagcagcgatctccatggaaatggaattggaggccagtaacatttttgtatttgcctgttgattcttctgtttttattttgcttaagtgttgttgggtaaatgtataggaactaggaagtgagggggaacaacatcccgtcgatgtgtgaagtatcattgcaagaaggcaatagtggcaaagggggaattatacatctgtaagtacacaggaataaaggaatggttgagtaataaattgtttttagggcgaaccactgcttgttttataaagttaatataaaaaatgcaatgcgggtgcttcttggtggtggtgccagatcgagtttaactgagacgatccaaattaaattccatggtccacgccacgggtcctgctgggccgtta

SEQ ID NO: 41452 - DNA, 2757 bp, Zea Mays
cgcaaagctaccgccgcagtgccgcacggcgactccgactctgtctcctgcgcggctccagctcaccctctcctcacatcgaggcggaccggcccacgtcgccggcaaccgaaacgtcggccgtagcctcgcacctccggcatcggcgagcgcgcgcgcccgtccggcggcggagatggcgctgcggcacctggtcacgggccagaacaactgcgcgccggacggcgcctcgtcgtccaaccccctcaacgccctcgccaacgccttccttggccagtcctccaaggcgcagtcaataaaggaacttcctggttctgttagtgttccatctacatctggcttcagcgcgcctgctcccttgtcaaacatccctggttcagaaaatgagttcaaacaagaccagcgaccttttgtgcagggctctgactttattcatggtggtcctgctaatgattggattaagtcttttcggcctccgggggttcctgaacttggtggaatagaagcacactttccagattttgagcaaatttataacaatgcaggaacaacctttcagccgccattggatggtccaccacaaagagtgttgtctggtgtcttgcattcctttctcacaagtggcccagctggtgtgccatttcaacctcttccagtaccagctgctcttggtttatctgaaagtgacaaacagtgcatacgtgatcgtagctgcataatggcacggcatattttttctgaccaaccggaagaatatatacaggctcaggtcaatactttgctgcattcgcttgatatagacaaccgtatgagaggacctatgcatggacaatacccagaactacaggagtactggaaccagtcccaaagttctatgggtcctgccctgatgcataataccgctgataaatggattactgagtttggcaaacaaaataataatccggaaaattgggcaaagtctttcgaacaacaatatggccccaatgggtgggcctctgagtttgaacagcatcagtctcagatggccatgggccagatgggaggagtgaacatggccaacctggctgctatggagcaatcccgaatgcttgcacaaactttagcaagtaataatgatcccaagtttcagatgagccggggtgaacttattatagaagataatcaggtaaaagaaggtttagcatcccaatccagtggctgggctgatgaatttcaaacacagtacaaagctaatgcaaactcatgggcggatcagtttgcacgtgaagagctttcacaaggggcggataagtgggttagtgagttctctagtcaacataatcaaggtgcgctaaatgagagctgggttgatgagttctcgaaattaaatgtcactgatgaatgggcagaggaattcagtggaggtggttttggcgaaagctctgctgatccgtgggtagatgagttccaagaacacttgtcatctttcaaacaaagttcaggcgcctctcgaggggtttatgtttattctgagaacaacccgtatgttggtcaccctaatccaatgcaagaaggacaggagctcttccgcaagggcctcttaagtgaagctgttcttgctttagaggctgaagttttgaagaatcctgataatgctgaaggttggaggttgttaggcataacacatgcagaaaatgatgatgaccaacaggccattgcagcaatgatgcgtgcgttggaagctaatccgacaaaccttgaagttcttcttgctcttggtgttagtcacacaaatgaattggagcagggagaagcattaaggtatctttataggtggcttcagaatcatccaaaatatggtggccttgtccctccgcagtcaactgattcaccttatggtcctgatgttgttagattgtttaatgacgctgctcagatgtcacctgaagatgcagatgttcatgtagttctgggagtcttatacaacctatcaagagagtatgataaagctataacttcatttaagacagcagtacagctcaaaccacaggactactcactctggaacaagcttggtgcaacccaagcaaacagcatccagagtgctgatgcaatattggcgtatcagcaggcactagacttgaaacccaactacgtgcgtgcatgggcgaacatgggaatcagctatgccaaccagggtctgtatgaggattccattcgatactatgtaagggcagttacaatgaacccaaaagctgacaacgcttggcagtacttgaggatttctcttggcaacgcttcaagagctgacatgattgccgcatgcgacgcccgcaacctcgacgctcttcagaaagagtttcctctctgagtcctccctagctttctccagcagcgatctccatggaaatggaattggaggccagtaacatttttgtatttgcctgttgattcttctgtttttattttgcttaagtgttgttgggtaaatgtataggaactaggaagtgagggggaacaacatcccgtcgatgtgtgaagtatcattgcaagaaggcaatagtggcaaagggggaattatacatctgtaagtacacaggaataaaggaatggttgagtaataaattgtttttagggcgaaccactgcttgttttataaagttaatataaaaaatgcaatgcgggtgcttcttggtggtggtgccagatcgagtttaactgagacgatccaaattaaattccatggtccacgccacgggtcctgctgggccgtta

SEQ ID NO: 41453 - DNA, 2696 bp, Zea Mays
accgccgcagtgccgcacggcgactccgactctgtctcctgcgcggctccagctcaccctctcctcacatcgaggcggaccggcccacgtcgccggcaaccgaaacgtcggccgtagcctcgcacctccggcatcggcgagcgcgcgcgcccgtccggcggcggagatggcgctgcggcacctggtcacgggccagaacaactgcgcgccggacggcgcctcgtcgtccaaccccctcaacgccctcgccaacgccttccttggccagtcctccaaggcgcagtcaataaaggaacttcctggttctgttagtgttccatctacatctggcttcagcgcgcctgctcccttgtcaaacatccctggttcagaaaatgagttcaaacaagaccagcgaccttttgtgcagggctctgactttattcatggtggtcctgctaatgattggattaagtcttttcggcctccgggggttcctgaacttggtggaatagaagcacactttccagattttgagcaaatttataacaatgcaggaacaacctttcagccgccattggatggtccaccacaaagagtgttgtctggtgtcttgcattcctttctcacaagtggcccagctggtgtgccatttcaacctcttccagtaccagctgctcttggtttatctgaaagtgacaaacagtgcatacgtgatcgtagctgcataatggcacggcatattttttctgaccaaccggaagaatatatacaggctcaggtcaatactttgctgcattcgcttgatatagacaaccgtatgagaggacctatgcatggacaatacccagaactacaggagtactggaaccagtcccaaagttctatgggtcctgccctgatgcataataccgctgataaatggattactgagtttggcaaacaaaataataatccggaaaattgggcaaagtctttcgaacaacaatatggccccaatgggtgggcctctgagtttgaacagtctcagatggccatgggccagatgggaggagtgaacatggccaacctggctgctatggagcaatcccgaatgcttgcacaaactttagcaagtaataatgatcccaagtttcagaattctaagttcttccagtttgtttcaaagatgagccggggtgaacttattatagaagataatcaggtaaaagaaggtttagcatcccaatccagtggctgggctgatgaatttcaaacacagtacaaagctaatgcaaactcatgggcggatcagtttgcacgtgaagagctttcacaaggggcggataagtgggttagtgagttctctagtcaacataatcaaggtgcgctaaatgagagctgggttgatgagttctcgaaattaaatgtcactgatgaatgggcagaggaattcagtggaggtggttttggcgaaagctctgctgatccgtgggtagatgagttccaagaacacttgtcatctttcaaacaaagttcaggcgcctctcgaggggtttatgtttattctgagaacaacccgtatgttggtcaccctaatccaatgcaagaaggacaggagctcttccgcaagggcctcttaagtgaagctgttcttgctttagaggctgaagttttgaagaatcctgataatgctgaaggttggaggttgttaggcataacacatgcagaaaatgatgatgaccaacaggccattgcagcaatgatgcgtgcgttggaagctaatccgacaaaccttgaagttcttcttgctcttggtgttagtcacacaaatgaattggagcagggagaagcattaaggtatctttataggtggcttcagaatcatccaaaatatggtggccttgtccctccgcagtcaactgattcaccttatggtcctgatgttgttagattgtttaatgacgctgctcagatgtcacctgaagatgcagatgttcatgtagttctgggagtcttatacaacctatcaagagagtatgataaagctataacttcatttaagacagcagtacagctcaaaccacaggactactcactctggaacaagcttggtgcaacccaagcaaacagcatccagagtgctgatgcaatattggcgtatcagcaggcactagacttgaaacccaactacgtgcgtgcatgggcgaacatgggaatcagctatgccaaccagggtctgtatgaggattccattcgatactatgtaagggcagttacaatgaacccaaaagctgacaacgcttggcagtacttgaggatttctcttggcaacgcttcaagagctgacatgattgccgcatgcgacgcccgcaacctcgacgctcttcagaaagagtttcctctctgagtcctccctagctttctccagcagcgatctccatggaaatggaattggaggaactaggaagtgagggggaacaacatcccgtcgatgtgtgaagtatcattgcaagaaggcaatagtggcaaagggggaattatacatctgtaagtacacaggaataaaggaatggttgagtaataaattgtttttagggcgaaccactgcttgttttataaagttaatataaaaaatgcaatgcgggtgcttcttggtggtggtgccagatcgagtttaactgagacgatccaaattaaattccatggtccacgccacgggtcctgctgggccgtta

SEQ ID NO: 41454 - DNA, 2618 bp, Zea Mays
accgccgcagtgccgcacggcgactccgactctgtctcctgcgcggctccagctcaccctctcctcacatcgaggcggaccggcccacgtcgccggcaaccgaaacgtcggccgtagcctcgcacctccggcatcggcgagcgcgcgcgcccgtccggcggcggagatggcgctgcggcacctggtcacgggccagaacaactgcgcgccggacggcgcctcgtcgtccaaccccctcaacgccctcgccaacgccttccttggccagtcctccaaggcgcagtcaataaaggaacttcctggttctgttagtgttccatctacatctggcttcagcgcgcctgctcccttgtcaaacatccctggttcagaaaatgagttcaaacaagaccagcgaccttttgtgcagtcttttcggcctccgggggttcctgaacttggtggaatagaagcacactttccagattttgagcaaatttataacaatgcaggaacaacctttcagccgccattggatggtccaccacaaagagtgttgtctggtgtcttgcattcctttctcacaagtggcccagctggtgtgccatttcaacctcttccagtaccagctgctcttggtttatctgaaagtgacaaacagtgcatacgtgatcgtagctgcataatggcacggcatattttttctgaccaaccggaagaatatatacaggctcaggtcaatactttgctgcattcgcttgatatagacaaccgtatgagaggacctatgcatggacaatacccagaactacaggagtactggaaccagtcccaaagttctatgggtcctgccctgatgcataataccgctgataaatggattactgagtttggcaaacaaaataataatccggaaaattgggcaaagtctttcgaacaacaatatggccccaatgggtgggcctctgagtttgaacagcatcagtctcagatggccatgggccagatgggaggagtgaacatggccaacctggctgctatggagcaatcccgaatgcttgcacaaactttagcaagtaataatgatcccaagtttcaggtaaaagaaggtttagcatcccaatccagtggctgggctgatgaatttcaaacacagtacaaagctaatgcaaactcatgggcggatcagtttgcacgtgaagagctttcacaaggggcggataagtgggttagtgagttctctagtcaacataatcaaggtgcgctaaatgagagctgggttgatgagttctcgaaattaaatgtcactgatgaatgggcagaggaattcagtggaggtggttttggcgaaagctctgctgatccgtgggtagatgagttccaagaacacttgtcatctttcaaacaaagttcaggcgcctctcgaggggtttatgtttattctgagaacaacccgtatgttggtcaccctaatccaatgcaagaaggacaggagctcttccgcaagggcctcttaagtgaagctgttcttgctttagaggctgaagttttgaagaatcctgataatgctgaaggttggaggttgttaggcataacacatgcagaaaatgatgatgaccaacaggccattgcagcaatgatgcgtgcgttggaagctaatccgacaaaccttgaagttcttcttgctcttggtgttagtcacacaaatgaattggagcagggagaagcattaaggtatctttataggtggcttcagaatcatccaaaatatggtggccttgtccctccgcagtcaactgattcaccttatggtcctgatatgttcatgtagttctgggagtcttatacaacctatcaagagagtatgataaagctataacttcatttaagacagcagtacagctcaaaccacaggactactcactctggaacaagcttggtgcaacccaagcaaacagcatccagagtgctgatgcaatattggcgtatcagcaggcactagacttgaaacccaactacgtgcgtgcatgggcgaacatgggaatcagctatgccaaccagggtctgtatgaggattccattcgatactatgtaagggcagttacaatgaacccaaaagctgacaacgcttggcagtacttgaggatttctcttggcaacgcttcaagagctgacatgattgccgcatgcgacgcccgcaacctcgacgctcttcagaaagagtttcctctctgagtcctccctagctttctccagcagcgatctccatggaaatggaattggaggccagtaacatttttgtatttgcctgttgattcttctgtttttattttgcttaagtgttgttgggtaaatgtataggaactaggaagtgagggggaacaacatcccgtcgatgtgtgaagtatcattgcaagaaggcaatagtggcaaagggggaattatacatctgtaagtacacaggaataaaggaatggttgagtaataaattgtttttagggcgaaccactgcttgttttataaagttaatataaaaaatgcaatgcgggtgcttcttggtggtggtgccagatcgagtttaactgagacgatccaaattaaattccatggtccacgccacgggtcctgctgggccgtta

SEQ ID NO: 41455 - DNA, 2556 bp, Zea Mays
accgccgcagtgccgcacggcgactccgactctgtctcctgcgcggctccagctcaccctctcctcacatcgaggcggaccggcccacgtcgccggcaaccgaaacgtcggccgtagcctcgcacctccggcatcggcgagcgcgcgcgcccgtccggcggcggagatggcgctgcggcacctggtcacgggccagaacaactgcgcgccggacggcgcctcgtcgtccaaccccctcaacgccctcgccaacgccttccttggccagtcctccaaggcgcagtcaataaaggaacttcctggttctgttagtgttccatctacatctggcttcagcgcgcctgctcccttgtcaaacatccctggttcagaaaatgagttcaaacaagaccagcgaccttttgtgcagtcttttcggcctccgggggttcctgaacttggtggaatagaagcacactttccagattttgagcaaatttataacaatgcaggaacaacctttcagccgccattggatggtccaccacaaagagtgttgtctggtgtcttgcattcctttctcacaagtggcccagctggtgtgccatttcaacctcttccagtaccagctgctcttggtttatctgaaagtgacaaacagtgcatacgtgatcgtagctgcataatggcacggcatattttttctgaccaaccggaagaatatatacaggctcaggtcaatactttgctgcattcgcttgatatagacaaccgtatgagaggacctatgcatggacaatacccagaactacaggagtactggaaccagtcccaaagttctatgggtcctgccctgatgcataataccgctgataaatggattactgagtttggcaaacaaaataataatccggaaaattgggcaaagtctttcgaacaacaatatggccccaatgggtgggcctctgagtttgaacagtctcagatggccatgggccagatgggaggagtgaacatggccaacctggctgctatggagcaatcccgaatgcttgcacaaactttagcaagtaataatgatcccaagtttcagctttcacaaggggcggataagtgggttagtgagttctctagtcaacataatcaaggtgcgctaaatgagagctgggttgatgagttctcgaaattaaatgtcactgatgaatgggcagaggaattcagtggaggtggttttggcgaaagctctgctgatccgtgggtagatgagttccaagaacacttgtcatctttcaaacaaagttcaggcgcctctcgaggggtttatgtttattctgagaacaacccgtatgttggtcaccctaatccaatgcaagaaggacaggagctcttccgcaagggcctcttaagtgaagctgttcttgctttagaggctgaagttttgaagaatcctgataatgctgaaggttggaggttgttaggcataacacatgcagaaaatgatgatgaccaacaggccattgcagcaatgatgcgtgcgttggaagctaatccgacaaaccttgaagttcttcttgctcttggtgttagtcacacaaatgaattggagcagggagaagcattaaggtatctttataggtggcttcagaatcatccaaaatatggtggccttgtccctccgcagtcaactgattcaccttatggtcctgatgttgttagattgtttaatgacgctgctcagatgtcacctgaagatgcagatgttcatgtagttctgggagtcttatacaacctatcaagagagtatgataaagctataacttcatttaagacagcagtacagctcaaaccacaggactactcactctggaacaagcttggtgcaacccaagcaaacagcatccagagtgctgatgcaatattggcgtatcagcaggcactagacttgaaacccaactacgtgcgtgcatgggcgaacatgggaatcagctatgccaaccagggtctgtatgaggattccattcgatactatgtaagggcagttacaatgaacccaaaagctgacaacgcttggcagtacttgaggatttctcttggcaacgcttcaagagctgacatgattgccgcatgcgacgcccgcaacctcgacgctcttcagaaagagtttcctctctgagtcctccctagctttctccagcagcgatctccatggaaatggaattggaggccagtaacatttttgtatttgcctgttgattcttctgtttttattttgcttaagtgttgttgggtaaatgtataggaactaggaagtgagggggaacaacatcccgtcgatgtgtgaagtatcattgcaagaaggcaatagtggcaaagggggaattatacatctgtaagtacacaggaataaaggaatggttgagtaataaattgtttttagggcgaaccactgcttgttttataaagttaatataaaaaatgcaatgcgggtgcttcttggtggtggtgccagatcgagtttaactgagacgatccaaattaaattccatggtccacgccacgggtcctgctgggccgtta

SEQ ID NO: 41456 - DNA, 2636 bp, Zea Mays
accgccgcagtgccgcacggcgactccgactctgtctcctgcgcggctccagctcaccctctcctcacatcgaggcggaccggcccacgtcgccggcaaccgaaacgtcggccgtagcctcgcacctccggcatcggcgagcgcgcgcgcccgtccggcggcggagatggcgctgcggcacctggtcacgggccagaacaactgcgcgccggacggcgcctcgtcgtccaaccccctcaacgccctcgccaacgccttccttggccagtcctccaaggcgcagtcaataaaggaacttcctggttctgttagtgttccatctacatctggcttcagcgcgcctgctcccttgtcaaacatccctggttcagaaaatgagttcaaacaagaccagcgaccttttgtgcagggctctgactttattcatggtggtcctgctaatgattggattaagtcttttcggcctccgggggttcctgaacttggtggaatagaagcacactttccagattttgagcaaatttataacaatgcaggaacaacctttcagccgccattggatggtccaccacaaagagtgttgtctggtgtcttgcattcctttctcacaagtggcccagctggtgtgccatttcaacctcttccagtaccagctgctcttggtttatctgaaagtgacaaacagtgcatacgtgatcgtagctgcataatggcacggcatattttttctgaccaaccggaagaatatatacaggctcaggtcaatactttgctgcattcgcttgatatagacaaccgtatgagaggacctatgcatggacaatacccagaactacaggagtactggaaccagtcccaaagttctatgggtcctgccctgatgcataataccgctgataaatggattactgagtttggcaaacaaaataataatccggaaaattgggcaaagtctttcgaacaacaatatggccccaatgggtgggcctctgagtttgaacagcatcagtctcagatggccatgggccagatgggaggagtgaacatggccaacctggctgctatggagcaatcccgaatgcttgcacaaactttagcaagtaataatgatcccaagtttcaggtaaaagaaggtttagcatcccaatccagtggctgggctgatgaatttcaaacacagtacaaagctaatgcaaactcatgggcggatcagtttgcacgtgaagagctttcacaaggggcggataagtgggttagtgagttctctagtcaacataatcaaggtgcgctaaatgagagctgggttgatgagttctcgaaattaaatgtcactgatgaatgggcagaggaattcagtggaggtggttttggcgaaagctctgctgatccgtgggtagatgagttccaagaacacttgtcatctttcaaacaaagttcaggcgcctctcgaggggtttatgtttattctgagaacaacccgtatgttggtcaccctaatccaatgcaagaaggacaggagctcttccgcaagggcctcttaagtgaagctgttcttgctttagaggctgaagttttgaagaatcctgataatgctgaaggttggaggttgttaggcataacacatgcagaaaatgatgatgaccaacaggccattgcagcaatgatgcgtgcgttggaagctaatccgacaaaccttgaagttcttcttgctcttggtgttagtcacacaaatgaattggagcagggagaagcattaaggtatctttataggtggcttcagaatcatccaaaatatggtggccttgtccctccgcagtcaactgattcaccttatggtcctgatgttgttagattgtttaatgacgctgctcagatgtcacctgaagatgcagatgttcatgtagttctgggagtcttatacaacctatcaagagagtatgataaagctataacttcatttaagacagcagtacagctcaaaccacaggactactcactctggaacaagcttggtgcaacccaagcaaacagcatccagagtgctgatgcaatattggcgtatcagcaggcactagacttgaaacccaactacgtgcgtgcatgggcgaacatgggaatcagctatgccaaccagggtctgtatgaggattccattcgatactatgtaagggcagttacaatgaacccaaaagctgacaacgcttggcagtacttgaggatttctcttggcaacgcttcaagagctgacatgattgccgcatgcgacgcccgcaacctcgacgctcttcagaaagagtttcctctctgagtcctccctagctttctccagcagcgatctccatggaaatggaattggaggaactaggaagtgagggggaacaacatcccgtcgatgtgtgaagtatcattgcaagaaggcaatagtggcaaagggggaattatacatctgtaagtacacaggaataaaggaatggttgagtaataaattgtttttagggcgaaccactgcttgttttataaagttaatataaaaaatgcaatgcgggtgcttcttggtggtggtgccagatcgagtttaactgagacgatccaaattaaattccatggtccacgccacgggtcctgctgggccgtta

SEQ ID NO: 41457 - DNA, 2443 bp, Zea Mays
accgccgcagtgccgcacggcgactccgactctgtctcctgcgcggctccagctcaccctctcctcacatcgaggcggaccggcccacgtcgccggcaaccgaaacgtcggccgtagcctcgcacctccggcatcggcgagcgcgcgcgcccgtccggcggcggagatggcgctgcggcacctggtcacgggccagaacaactgcgcgccggacggcgcctcgtcgtccaaccccctcaacgccctcgccaacgccttccttggccagtcctccaaggcgcagtcaataaaggaacttcctggttctgttagtgttccatctacatctggcttcagcgcgcctgctcccttgtcaaacatccctggttcagaaaatgagttcaaacaagaccagcgaccttttgtgcagtcttttcggcctccgggggttcctgaacttggtggaatagaagcacactttccagattttgagcaaatttataacaatgcaggaacaacctttcagccgccattggatggtccaccacaaagagtgttgtctggtgtcttgcattcctttctcacaagtggcccagctggtgtgccatttcaacctcttccagtaccagctgctcttggtttatctgaaagtgacaaacagtgcatacgtgatcgtagctgcataatggcacggcatattttttctgaccaaccggaagaatatatacaggctcaggtcaatactttgctgcattcgcttgatatagacaaccgtatgagaggacctatgcatggacaatacccagaactacaggagtactggaaccagtcccaaagttctatgggtcctgccctgatgcataataccgctgataaatggattactgagtttggcaaacaaaataataatccggaaaattgggcaaagtctttcgaacaacaatatggccccaatgggtgggcctctgagtttgaacagcatcagtctcagatggccatgggccagatgggaggagtgaacatggccaacctggctgctatggagcaatcccgaatgcttgcacaaactttagcaagtaataatgatcccaagtttcagctttcacaaggggcggataagtgggttagtgagttctctagtcaacataatcaaggtgcgctaaatgagagctgggttgatgagttctcgaaattaaatgtcactgatgaatgggcagaggaattcagtggaggtggttttggcgaaagctctgctgatccgtgggtagatgagttccaagaacacttgtcatctttcaaacaaagttcaggcgcctctcgaggggtttatgtttattctgagaacaacccgtatgttggtcaccctaatccaatgcaagaaggacaggagctcttccgcaagggcctcttaagtgaagctgttcttgctttagaggctgaagttttgaagaatcctgataatgctgaaggttggaggttgttaggcataacacatgcagaaaatgatgatgaccaacaggccattgcagcaatgatgcgtgcgttggaagctaatccgacaaaccttgaagttcttcttgctcttggtgttagtcacacaaatgaattggagcagggagaagcattaaggtatctttataggtggcttcagaatcatccaaaatatggtggccttgtccctccgcagtcaactgattcaccttatggtcctgatatgcagatgttcatgtagttctgggagtcttatacaacctatcaagagagtatgataaagctataacttcatttaagacagcagtacagctcaaaccacaggactactcactctggaacaagcttggtgcaacccaagcaaacagcatccagagtgctgatgcaatattggcgtatcagcaggcactagacttgaaacccaactacgtgcgtgcatgggcgaacatgggaatcagctatgccaaccagggtctgtatgaggattccattcgatactatgtaagggcagttacaatgaacccaaaagctgacaacgcttggcagtacttgaggatttctcttggcaacgcttcaagagctgacatgattgccgcatgcgacgcccgcaacctcgacgctcttcagaaagagtttcctctctgagtcctccctagctttctccagcagcgatctccatggaaatggaattggaggaactaggaagtgagggggaacaacatcccgtcgatgtgtgaagtatcattgcaagaaggcaatagtggcaaagggggaattatacatctgtaagtacacaggaataaaggaatggttgagtaataaattgtttttagggcgaaccactgcttgttttataaagttaatataaaaaatgcaatgcgggtgcttcttggtggtggtgccagatcgagtttaactgagacgatccaaattaaattccatggtccacgccacgggtcctgctgggccgtta

SEQ ID NO: 41458 - DNA, 2733 bp, Zea Mays
accgccgcagtgccgcacggcgactccgactctgtctcctgcgcggctccagctcaccctctcctcacatcgaggcggaccggcccacgtcgccggcaaccgaaacgtcggccgtagcctcgcacctccggcatcggcgagcgcgcgcgcccgtccggcggcggagatggcgctgcggcacctggtcacgggccagaacaactgcgcgccggacggcgcctcgtcgtccaaccccctcaacgccctcgccaacgccttccttggccagtcctccaaggcgcagtcaataaaggaacttcctggttctgttagtgttccatctacatctggcttcagcgcgcctgctcccttgtcaaacatccctggttcagaaaatgagttcaaacaagaccagcgaccttttgtgcagggctctgactttattcatggtggtcctgctaatgattggattaagtcttttcggcctccgggggttcctgaacttggtggaatagaagcacactttccagattttgagcaaatttataacaatgcaggaacaacctttcagccgccattggatggtccaccacaaagagtgttgtctggtgtcttgcattcctttctcacaagtggcccagctggtgtgccatttcaacctcttccagtaccagctgctcttggtttatctgaaagtgacaaacagtgcatacgtgatcgtagctgcataatggcacggcatattttttctgaccaaccggaagaatatatacaggctcaggtcaatactttgctgcattcgcttgatatagacaaccgtatgagaggacctatgcatggacaatacccagaactacaggagtactggaaccagtcccaaagttctatgggtcctgccctgatgcataataccgctgataaatggattactgagtttggcaaacaaaataataatccggaaaattgggcaaagtctttcgaacaacaatatggccccaatgggtgggcctctgagtttgaacagcatcagtctcagatggccatgggccagatgggaggagtgaacatggccaacctggctgctatggagcaatcccgaatgcttgcacaaactttagcaagtaataatgatcccaagtttcagaattctaagttcttccagtttgtttcaaagatgagccggggtgaacttattatagaagataatcaggtaaaagaaggtttagcatcccaatccagtggctgggctgatgaatttcaaacacagtacaaagctaatgcaaactcatgggcggatcagtttgcacgtgaagagctttcacaaggggcggataagtgggttagtgagttctctagtcaacataatcaaggtgcgctaaatgagagctgggttgatgagttctcgaaattaaatgtcactgatgaatgggcagaggaattcagtggaggtggttttggcgaaagctctgctgatccgtgggtagatgagttccaagaacacttgtcatctttcaaacaaagttcaggcgcctctcgaggggtttatgtttattctgagaacaacccgtatgttggtcaccctaatccaatgcaagaaggacaggagctcttccgcaagggcctcttaagtgaagctgttcttgctttagaggctgaagttttgaagaatcctgataatgctgaaggttggaggttgttaggcataacacatgcagaaaatgatgatgaccaacaggccattgcagcaatgatgcgtgcgttggaagctaatccgacaaaccttgaagttcttcttgctcttggtgttagtcacacaaatgaattggagcagggagaagcattaaggtatctttataggtggcttcagaatcatccaaaatatggtggccttgtccctccgcagtcaactgattcaccttatggtcctgatgtaaatgttcatgtagttctgggagtcttatacaacctatcaagagagtatgataaagctataacttcatttaagacagcagtacagctcaaaccacaggactactcactctggaacaagcttggtgcaacccaagcaaacagcatccagagtgctgatgcaatattggcgtatcagcaggcactagacttgaaacccaactacgtgcgtgcatgggcgaacatgggaatcagctatgccaaccagggtctgtatgaggattccattcgatactatgtaagggcagttacaatgaacccaaaagctgacaacgcttggcagtacttgaggatttctcttggcaacgcttcaagagctgacatgattgccgcatgcgacgcccgcaacctcgacgctcttcagaaagagtttcctctctgagtcctccctagctttctccagcagcgatctccatggaaatggaattggaggccagtaacatttttgtatttgcctgttgattcttctgtttttattttgcttaagtgttgttgggtaaatgtataggaactaggaagtgagggggaacaacatcccgtcgatgtgtgaagtatcattgcaagaaggcaatagtggcaaagggggaattatacatctgtaagtacacaggaataaaggaatggttgagtaataaattgtttttagggcgaaccactgcttgttttataaagttaatataaaaaatgcaatgcgggtgcttcttggtggtggtgccagatcgagtttaactgagacgatccaaattaaattccatggtccacgccacgggtcctgctgggccgtta

SEQ ID NO: 41459 - DNA, 2669 bp, Zea Mays
accgccgcagtgccgcacggcgactccgactctgtctcctgcgcggctccagctcaccctctcctcacatcgaggcggaccggcccacgtcgccggcaaccgaaacgtcggccgtagcctcgcacctccggcatcggcgagcgcgcgcgcccgtccggcggcggagatggcgctgcggcacctggtcacgggccagaacaactgcgcgccggacggcgcctcgtcgtccaaccccctcaacgccctcgccaacgccttccttggccagtcctccaaggcgcagtcaataaaggaacttcctggttctgttagtgttccatctacatctggcttcagcgcgcctgctcccttgtcaaacatccctggttcagaaaatgagttcaaacaagaccagcgaccttttgtgcagggctctgactttattcatggtggtcctgctaatgattggattaagtcttttcggcctccgggggttcctgaacttggtggaatagaagcacactttccagattttgagcaaatttataacaatgcaggaacaacctttcagccgccattggatggtccaccacaaagagtgttgtctggtgtcttgcattcctttctcacaagtggcccagctggtgtgccatttcaacctcttccagtaccagctgctcttggtttatctgaaagtgacaaacagtgcatacgtgatcgtagctgcataatggcacggcatattttttctgaccaaccggaagaatatatacaggctcaggtcaatactttgctgcattcgcttgatatagacaaccgtatgagaggacctatgcatggacaatacccagaactacaggagtactggaaccagtcccaaagttctatgggtcctgccctgatgcataataccgctgataaatggattactgagtttggcaaacaaaataataatccggaaaattgggcaaagtctttcgaacaacaatatggccccaatgggtgggcctctgagtttgaacagcatcagtctcagatggccatgggccagatgggaggagtgaacatggccaacctggctgctatggagcaatcccgaatgcttgcacaaactttagcaagtaataatgatcccaagtttcaggtaaaagaaggtttagcatcccaatccagtggctgggctgatgaatttcaaacacagtacaaagctaatgcaaactcatgggcggatcagtttgcacgtgaagagctttcacaaggggcggataagtgggttagtgagttctctagtcaacataatcaaggtgcgctaaatgagagctgggttgatgagttctcgaaattaaatgtcactgatgaatgggcagaggaattcagtggaggtggttttggcgaaagctctgctgatccgtgggtagatgagttccaagaacacttgtcatctttcaaacaaagttcaggcgcctctcgaggggtttatgtttattctgagaacaacccgtatgttggtcaccctaatccaatgcaagaaggacaggagctcttccgcaagggcctcttaagtgaagctgttcttgctttagaggctgaagttttgaagaatcctgataatgctgaaggttggaggttgttaggcataacacatgcagaaaatgatgatgaccaacaggccattgcagcaatgatgcgtgcgttggaagctaatccgacaaaccttgaagttcttcttgctcttggtgttagtcacacaaatgaattggagcagggagaagcattaaggtatctttataggtggcttcagaatcatccaaaatatggtggccttgtccctccgcagtcaactgattcaccttatggtcctgatatgcagatgttcatgtagttctgggagtcttatacaacctatcaagagagtatgataaagctataacttcatttaagacagcagtacagctcaaaccacaggactactcactctggaacaagcttggtgcaacccaagcaaacagcatccagagtgctgatgcaatattggcgtatcagcaggcactagacttgaaacccaactacgtgcgtgcatgggcgaacatgggaatcagctatgccaaccagggtctgtatgaggattccattcgatactatgtaagggcagttacaatgaacccaaaagctgacaacgcttggcagtacttgaggatttctcttggcaacgcttcaagagctgacatgattgccgcatgcgacgcccgcaacctcgacgctcttcagaaagagtttcctctctgagtcctccctagctttctccagcagcgatctccatggaaatggaattggaggccagtaacatttttgtatttgcctgttgattcttctgtttttattttgcttaagtgttgttgggtaaatgtataggaactaggaagtgagggggaacaacatcccgtcgatgtgtgaagtatcattgcaagaaggcaatagtggcaaagggggaattatacatctgtaagtacacaggaataaaggaatggttgagtaataaattgtttttagggcgaaccactgcttgttttataaagttaatataaaaaatgcaatgcgggtgcttcttggtggtggtgccagatcgagtttaactgagacgatccaaattaaattccatggtccacgccacgggtcctgctgggccgtta

SEQ ID NO: 41460 - DNA, 2577 bp, Zea Mays
accgccgcagtgccgcacggcgactccgactctgtctcctgcgcggctccagctcaccctctcctcacatcgaggcggaccggcccacgtcgccggcaaccgaaacgtcggccgtagcctcgcacctccggcatcggcgagcgcgcgcgcccgtccggcggcggagatggcgctgcggcacctggtcacgggccagaacaactgcgcgccggacggcgcctcgtcgtccaaccccctcaacgccctcgccaacgccttccttggccagtcctccaaggcgcagtcaataaaggaacttcctggttctgttagtgttccatctacatctggcttcagcgcgcctgctcccttgtcaaacatccctggttcagaaaatgagttcaaacaagaccagcgaccttttgtgcagggctctgactttattcatggtggtcctgctaatgattggattaagtcttttcggcctccgggggttcctgaacttggtggaatagaagcacactttccagattttgagcaaatttataacaatgcaggaacaacctttcagccgccattggatggtccaccacaaagagtgttgtctggtgtcttgcattcctttctcacaagtggcccagctggtgtgccatttcaacctcttccagtaccagctgctcttggtttatctgaaagtgacaaacagtgcatacgtgatcgtagctgcataatggcacggcatattttttctgaccaaccggaagaatatatacaggctcaggtcaatactttgctgcattcgcttgatatagacaaccgtatgagaggacctatgcatggacaatacccagaactacaggagtactggaaccagtcccaaagttctatgggtcctgccctgatgcataataccgctgataaatggattactgagtttggcaaacaaaataataatccggaaaattgggcaaagtctttcgaacaacaatatggccccaatgggtgggcctctgagtttgaacagcatcagtctcagatggccatgggccagatgggaggagtgaacatggccaacctggctgctatggagcaatcccgaatgcttgcacaaactttagcaagtaataatgatcccaagtttcagctttcacaaggggcggataagtgggttagtgagttctctagtcaacataatcaaggtgcgctaaatgagagctgggttgatgagttctcgaaattaaatgtcactgatgaatgggcagaggaattcagtggaggtggttttggcgaaagctctgctgatccgtgggtagatgagttccaagaacacttgtcatctttcaaacaaagttcaggcgcctctcgaggggtttatgtttattctgagaacaacccgtatgttggtcaccctaatccaatgcaagaaggacaggagctcttccgcaagggcctcttaagtgaagctgttcttgctttagaggctgaagttttgaagaatcctgataatgctgaaggttggaggttgttaggcataacacatgcagaaaatgatgatgaccaacaggccattgcagcaatgatgcgtgcgttggaagctaatccgacaaaccttgaagttcttcttgctcttggtgttagtcacacaaatgaattggagcagggagaagcattaaggtatctttataggtggcttcagaatcatccaaaatatggtggccttgtccctccgcagtcaactgattcaccttatggtcctgatatgtcacctgaagatgcagatgttcatgtagttctgggagtcttatacaacctatcaagagagtatgataaagctataacttcatttaagacagcagtacagctcaaaccacaggactactcactctggaacaagcttggtgcaacccaagcaaacagcatccagagtgctgatgcaatattggcgtatcagcaggcactagacttgaaacccaactacgtgcgtgcatgggcgaacatgggaatcagctatgccaaccagggtctgtatgaggattccattcgatactatgtaagggcagttacaatgaacccaaaagctgacaacgcttggcagtacttgaggatttctcttggcaacgcttcaagagctgacatgattgccgcatgcgacgcccgcaacctcgacgctcttcagaaagagtttcctctctgagtcctccctagctttctccagcagcgatctccatggaaatggaattggaggccagtaacatttttgtatttgcctgttgattcttctgtttttattttgcttaagtgttgttgggtaaatgtataggaactaggaagtgagggggaacaacatcccgtcgatgtgtgaagtatcattgcaagaaggcaatagtggcaaagggggaattatacatctgtaagtacacaggaataaaggaatggttgagtaataaattgtttttagggcgaaccactgcttgttttataaagttaatataaaaaatgcaatgcgggtgcttcttggtggtggtgccagatcgagtttaactgagacgatccaaattaaattccatggtccacgccacgggtcctgctgggccgtta

SEQ ID NO: 41461 - DNA, 2735 bp, Zea Mays
accgccgcagtgccgcacggcgactccgactctgtctcctgcgcggctccagctcaccctctcctcacatcgaggcggaccggcccacgtcgccggcaaccgaaacgtcggccgtagcctcgcacctccggcatcggcgagcgcgcgcgcccgtccggcggcggagatggcgctgcggcacctggtcacgggccagaacaactgcgcgccggacggcgcctcgtcgtccaaccccctcaacgccctcgccaacgccttccttggccagtcctccaaggcgcagtcaataaaggaacttcctggttctgttagtgttccatctacatctggcttcagcgcgcctgctcccttgtcaaacatccctggttcagaaaatgagttcaaacaagaccagcgaccttttgtgcagggctctgactttattcatggtggtcctgctaatgattggattaagtcttttcggcctccgggggttcctgaacttggtggaatagaagcacactttccagattttgagcaaatttataacaatgcaggaacaacctttcagccgccattggatggtccaccacaaagagtgttgtctggtgtcttgcattcctttctcacaagtggcccagctggtgtgccatttcaacctcttccagtaccagctgctcttggtttatctgaaagtgacaaacagtgcatacgtgatcgtagctgcataatggcacggcatattttttctgaccaaccggaagaatatatacaggctcaggtcaatactttgctgcattcgcttgatatagacaaccgtatgagaggacctatgcatggacaatacccagaactacaggagtactggaaccagtcccaaagttctatgggtcctgccctgatgcataataccgctgataaatggattactgagtttggcaaacaaaataataatccggaaaattgggcaaagtctttcgaacaacaatatggccccaatgggtgggcctctgagtttgaacagcatcagtctcagatggccatgggccagatgggaggagtgaacatggccaacctggctgctatggagcaatcccgaatgcttgcacaaactttagcaagtaataatgatcccaagtttcagaattctaagttcttccagtttgtttcaaagatgagccggggtgaacttattatagaagataatcaggtaaaagaaggtttagcatcccaatccagtggctgggctgatgaatttcaaacacagtacaaagctaatgcaaactcatgggcggatcagtttgcacgtgaagagctttcacaaggggcggataagtgggttagtgagttctctagtcaacataatcaaggtgcgctaaatgagagctgggttgatgagttctcgaaattaaatgtcactgatgaatgggcagaggaattcagtggaggtggttttggcgaaagctctgctgatccgtgggtagatgagttccaagaacacttgtcatctttcaaacaaagttcaggcgcctctcgaggggtttatgtttattctgagaacaacccgtatgttggtcaccctaatccaatgcaagaaggacaggagctcttccgcaagggcctcttaagtgaagctgttcttgctttagaggctgaagttttgaagaatcctgataatgctgaaggttggaggttgttaggcataacacatgcagaaaatgatgatgaccaacaggccattgcagcaatgatgcgtgcgttggaagctaatccgacaaaccttgaagttcttcttgctcttggtgttagtcacacaaatgaattggagcagggagaagcattaaggtatctttataggtggcttcagaatcatccaaaatatggtggccttgtccctccgcagtcaactgattcaccttatggtcctgatatgcagatgttcatgtagttctgggagtcttatacaacctatcaagagagtatgataaagctataacttcatttaagacagcagtacagctcaaaccacaggactactcactctggaacaagcttggtgcaacccaagcaaacagcatccagagtgctgatgcaatattggcgtatcagcaggcactagacttgaaacccaactacgtgcgtgcatgggcgaacatgggaatcagctatgccaaccagggtctgtatgaggattccattcgatactatgtaagggcagttacaatgaacccaaaagctgacaacgcttggcagtacttgaggatttctcttggcaacgcttcaagagctgacatgattgccgcatgcgacgcccgcaacctcgacgctcttcagaaagagtttcctctctgagtcctccctagctttctccagcagcgatctccatggaaatggaattggaggccagtaacatttttgtatttgcctgttgattcttctgtttttattttgcttaagtgttgttgggtaaatgtataggaactaggaagtgagggggaacaacatcccgtcgatgtgtgaagtatcattgcaagaaggcaatagtggcaaagggggaattatacatctgtaagtacacaggaataaaggaatggttgagtaataaattgtttttagggcgaaccactgcttgttttataaagttaatataaaaaatgcaatgcgggtgcttcttggtggtggtgccagatcgagtttaactgagacgatccaaattaaattccatggtccacgccacgggtcctgctgggccgtta

SEQ ID NO: 41462 - DNA, 945 bp, Zea Mays
ctcaaactggcccgttacgtgaatttggcggggctgccgcagggatccgagacgtggtggctgcacagcgacgtccgtgggagcgggcgagcgactgcaggcagagggtttcgtccgaaccctagtgtcctccacacgccgtcgccatggccgccgtccgcgccgccctccgcctgcagcgccagtgcctcgccgccaacccctttctcttctccgggcatggcctccgctaccgcaagcttgaggtcatcctcaccacgactattgataagctggggaaagcaggcgaggtggtcaaggtggcgcctggccacttccgcaaccaccttatgcccaagatgctcgcagtcccgaacctggacaaattcgccatactcatccgagagcagcgcaagctctatcaacgcgaagaggaggtcgcggtgaaacaagtcacggagaaagatgatgatgcacgggaagaaagaatgaagcagtaccaaacggcagcgaagcggctagataacgcactcttggtgttgaggaggttcatctcgactggaaacgagctgcgtactcctgtaacaaaagacgaaattgtttccgaggtggcgaggcagctcaacatcaacatccatccggagaacctgcatctgcactcacctttggcgtcgctcggcgaatttgagttgcccctccggttaccgcagaacataccgtgcccagaaggtaagctccagtggactctgaaggtgaagatcaggagaaaatgagcgcaggaactggggaagtttcttttgtccccccacaatctggtgtatggtaccaaaccattgttatgcaaagtttcctttgcataacccggtcccagtttagctccgaaacattttttttctgatgtataataaaagagtaaggttgcagaaagattgaatagcttctacatccttcagttcccttctttgc

SEQ ID NO: 41463 - DNA, 1295 bp, Zea Mays
cgtgaatttggcggggctgccgcagggatccgagacgtggtggctgcacagcgacgtccgtgggagcgggcgagcgactgcaggcagagggtttcgtccgaaccctagtgtcctccacacgccgtcgccatggccgccgtccgcgccgccctccgcctgcagcgccagtgcctcgccgccaacccctttctcttctccgggcatggcctccgctaccgcaagcttgaggtcatcctcaccacgactattgataagctggggaaagcaggcgaggtggtcaaggtggcgcctggccacttccgcaaccaccttatgcccaagatgctcgcagtcccgaacctggacaaattcgccatactcatccgagagcagcgcaaggtaagctccgtgccttcgtcctttaagacgctaccaccgcaagcatgtctgttcgggtgcctagtcgctgcaaaccatgaggtccagtgtttggccaggaaaaaactgtatcactgtccgaatatgtattgcacattggactaatggactatgcacagactgttcatgcaacattccctggcacagctgtttcctacggcaatctgataagtagcctaagaatttggtgctacttggtgcaacccgcattcaaaatgttgtggtgcgctggtgcctctactccattcctagttcctacccatgtttgctgtttatagctctgttcgtttgcaaccttataaggcgttgtttctttaaccagctctatcaacgcgaagaggaggtcgcggtgaaacaagtcacggagaaagatgatgatgcacggctacaggaagaaagaatgaagcagtaccaaacggcagcgaagcggctagataacgcactcttggtgttgaggaggttcatctcgactggaaacgagctgcgtactcctgtaacaaaagacgaaattgtttccgaggtggcgaggcagctcaacatcaacatccatccggagaacctgcatctgcactcacctttggcgtcgctcggcgaatttgagttgcccctccggttaccgcagaacataccgtgcccagaaggtaagctccagtggactctgaaggtgaagatcaggagaaaatgagcgcaggaactggggaagtttcttttgtccccccacaatctggtgtatggtaccaaaccattgttatgcaaagtttcctttgcataacccggtcccagtttagctccgaaacattttttttctgatgtataataaaagagtaaggttgcagaaagattgaatagcttctacatccttcagttcccttctttgc

SEQ ID NO: 41464 - DNA, 1309 bp, Zea Mays
cgtctacgcgaagcaaagctcctaaagctctaggatcgaaagatttgccctttccagattttgtttgttgatttgagtgctagtgttggagcaaaacgaaaaggtggtcctggagggttaaacaaagtctgtggtgtgtctccagagctgcaagctatcgttggtgaaccagccatggctagaactgagattgttaagcagctttgggcatacattcgcaggaacaatttgcaggatcctaacaataagagaaagattatatgcaatgatgagctccgattagtttttgagactgatagcacggacatgttccagatgaataagcttctgtccaagcatatacgtcctctggagagtaaaaatgattcgaaaccagaagcaaagaaattgaagccacagggtgatgaaccaatttcttcagttgaaactgatgttaaccaacttccccttatggtttctgatgcgcttgctaccttttttggtaccggagaaagagaaatggtccattctgaggctgttaagcgtgtctgggatcacattaaaagcaatgatttagaggatccagagaatcctacggtgatactgtgtgactcgaagcttaaacaactctttggacgtgaaagtcttaccgctcatggtgtctcggaggttgctttcagaccacctttacacgcaatctaccaatatctgactggcgatacgattttctggactcggctgggctaacatcctgggtagtaggcgctgatgaaaggacaagggatctgctcaaattaagtgttgtatttgtatcctccatattggtgaagactgatttacagtagtaagggaaaaggaaatggcagttgtgttgcatactatctagtcagacatagtagtctacgtgacttggaatgatgcggcgttaaactaaaaaggacagcgagagctgatgtaaattcggcagccgtataccgtaggcgcgtgcgttttctggtaagactctcttgcattgctagtgccctaagttgactcgaaacatctgtacctcgaaatgttgctgtgttaggtgatacctaaccttaatacagtttagatcgttatccttactcatccttttcctgaacccctgcatgtatcatcattgtgtgtgcatcgtatgcggcagcagctgtttacgaaaggaacagctagctactgcttttttctgttcctgcatgatgcaggccgtttacaagatcctgcctactgtacaaggctagatacttgctccttgccctcctggtggtgctgctggtggcgacggcgacgacgaagctacaagttcttg

SEQ ID NO: 41465 - DNA, 669 bp, Zea Mays
ctctgttaaatctgccgcaatagtaaaaggagtcgaccgaccgcagtcaaattggcgatacgattttctggactcggctgggctaacatcctgggtagtaggcgctgatgaaaggacaagggatctgctcaaattaagtgttgtatttgtatcctccatattggtgaagactgatttacagtagtaagggaaaaggaaatggcagttgtgttgcatactatctagtcagacatagtagtctacgtgacttggaatgatgcggcgttaaactaaaaaggacagcgagagctgatgtaaattcggcagccgtataccgtaggcgcgtgcgttttctggtaagactctcttgcattgctagtgccctaagttgactcgaaacatctgtacctcgaaatgttgctgtgttaggtgatacctaaccttaatacagtttagatcgttatccttactcatccttttcctgaacccctgcatgtatcatcattgtgtgtgcatcgtatgcggcagcagctgtttacgaaaggaacagctagctactgcttttttctgttcctgcatgatgcaggccgtttacaagatcctgcctactgtacaaggctagatacttgctccttgccctcctggtggtgctgctggtggcgacggcgacgacgaagctacaagttcttg

SEQ ID NO: 41466 - DNA, 2093 bp, Zea Mays
gctcgaacaagcatcaccggggctcatttcttctgtatgggtggcctataggctacaacgcccatcttctcgaccggaaaaaacaacaccgctccactgcggggctgcccatcttcttctgacctctttcttctccgcatccactgccgcgacgggacctcgccgcggtgcgacctcaccgctccactgacgcaacctcgtcggctgtgccatgggagctctggccccctcgcatcagctgctggcgggcccgcgagctagggtttccggtcaccgcggatctcgacggcctccttcgctgagctcctcacagccccgcgatgcaatatcgtcagccgtgccgcctgagactccggattatcaaaagttgatgcgatctcaccaccagtgacaagagctagccgttcaatgccctcaaaatcagcatgctcaattgcgaggatgccaacatcaacaaagagttcttcagggaagttatagattaactgcctgttgacaaaatagttgatcccatgcgctataatcttctgcaccttctttctcattttctgcttttcagcagcttcaatatctgcaaccttaaacattgaatccacccagacacatgccccatagtcttaaatctgtgtccatagcactgtttgcaaccaaaattttggcattctcaattctcttaggttgcccaatgccaattttcttgtcaagaatgaacccttcatccaaaaaggagtccttaagagatcctccaggtttcttcagaatttgaatggcttccaggctatttgaggagatgtcgtcatcgtcatcatcatccttactctctggctccaatactgtgagtgttgagcttcatctaatcccttgcaagctctgcaatggggtggtgattgagcgggtctccaaacaaccagaaagcacatcgaggaagttctaccggtgcagagccaagaaaatggatgggtctcaatgtgattttttccattggcaagcgagctatgctgttttgttaatcaaggatggggttgtcagtggtgaccattgccttgagttgttaatggtcgcacttaatgatcatggcaaagctgttgaatctctaaccaattccatcagagagatgaagaaaaagttgtccgacctggagttagtgatggaagagctggataacgtgaaaaagtcaatgaaggcagccatggttggaattgaggaaaacaataaaacgatagctgcattgaaactgatggagaatgagatgcaaatgctgaaagggtcaactaaagtgaaacctaggaatatggcactgtgttttctgcttttggcgttgattgggtggtttgtgatgggacagatgtattggggggaggattaggaagcatccggccgatttatgctgagaggctaatgaactttggatggacttttgtatagctagatataatcagaactggttaggcctagagatggcaatggggacccgatccccgattccccgcggggaattcatccattaggggatggggatggggaagaaacttcccccgcggggatataaacggggaaagtttatcccccgacgggtaaatggggatggggacggggaagcattccccatccccgttccccgtggggacccgttaacttgcatgtgactatgtttttgtgtaccggttaacaacaaaaataaataattaccttgtcaagagaccactaattgtacaaatgtgttcattttgatgtatgcataatgatttcttacatctgacaatgtgtataagtgataatgtttaacattaataacaaagaacatatgtattaattataattttaacggggatggggatccccgttggggatttatccccgcggggaacggggatggggaagaaatgttccccgcaagcgttcgtggggatccccgcggggaaattttttcgtcgcggggacgggtatggggagctattccccggcggggaattccccgttgccatcccttaggccccctgggagtggaagctagatgtaagaagttgattgtgctgcgatttgatgctctagaggatgatgatgagctctgatcgaagcaaagttgtgccact

SEQ ID NO: 41467 - DNA, 1665 bp, Zea Mays
gctcgaacaagcatcaccggggctcatttcttctgtatgggtggcctataggctacaacgcccatcttctcgaccggaaaaaacaacaccgctccactgcggggctgcccatcttcttctgacctctttcttctccgcatccactgccgcgacgggacctcgccgcggtgcgacctcaccgctccactgacgcaacctcgtcggctgtgccatgggagctctggccccctcgcatcagctgctggcgggcccgcgagctagggtttccggtcaccgcggatctcgacggcctccttcgctgagctcctcacagccccgcgatgcaatatcgtcagccgtgccgcctgaggctatttgaggagatgtcgtcatcgtcatcatcatccttactctctggctccaatactgtgagtgttgagcttcatctaatcccttgcaagctctgcaatggggtggtgattgagcgggtctccaaacaaccagaaagcacatcgaggaagttctaccggtgcagagccaagaaaatggatgggtctcaatgtgattttttccattggcaagcgagctatgctgttttgttaatcaaggatggggttgtcagtggtgaccattgccttgagttgttaatggtcgcacttaatgatcatggcaaagctgttgaatctctaaccaattccatcagagagatgaagaaaaagttgtccgacctggagttagtgatggaagagctggataacgtgaaaaagtcaatgaaggcagccatggttggaattgaggaaaacaataaaacgatagctgcattgaaactgatggagaatgagatgcaaatgctgaaagggtcaactaaagtgaaacctaggaatatggcactgtgttttctgcttttggcgttgattgggtggtttgtgatgggacagatgtattggggggaggattaggaagcatccggccgatttatgctgagaggctaatgaactttggatggacttttgtatagctagatataatcagaactggttaggcctagagatggcaatggggacccgatccccgattccccgcggggaattcatccattaggggatggggatggggaagaaacttcccccgcggggatataaacggggaaagtttatcccccgacgggtaaatggggatggggacggggaagcattccccatccccgttccccgtggggacccgttaacttgcatgtgactatgtttttgtgtaccggttaacaacaaaaataaataattaccttgtcaagagaccactaattgtacaaatgtgttcattttgatgtatgcataatgatttcttacatctgacaatgtgtataagtgataatgtttaacattaataacaaagaacatatgtattaattataattttaacggggatggggatccccgttggggatttatccccgcggggaacggggatggggaagaaatgttccccgcaagcgttcgtggggatccccgcggggaaattttttcgtcgcggggacgggtatggggagctattccccggcggggaattccccgttgccatcccttaggccccctgggagtggaagctagatgtaagaagttgattgtgctgcgatttgatgctctagaggatgatgatgagctctgatcgaagcaaagttgtgccact

SEQ ID NO: 41468 - DNA, 659 bp, Zea Mays
gctcgaacaagcatcaccggggctcatttcttctgtatgggtggcctataggctacaacgcccatcttctcgaccggaaaaaacaacaccgctccactgcggggctgcccatcttcttctgacctctttcttctccgcatccactgccgcgacgggacctcgccgcggtgcgacctcaccgctccactgacgcaacctcgtcggctgtgccatgggagctctggccccctcgcatcagctgctggcgggcccgcgagctagggtttccggtcaccgcggatctcgacggcctccttcgctgagctcctcacagccccgcgatgcaatatcgtcagccgtgccgcctgaggctatttgaggagatgtcgtcatcgtcatcatcatccttactctctggctccaatactgtgagtgttgagcttcatctaatcccttgcaagctctgcaatggggtggtgattgagcgggtctccaaacaaccagaaagcacatcgaggaagttctaccggtgcagagccaagaaaatgggcgccagaaaaaggaagggacacccagtggattttggagaagctcacgaaatatcacaaagttcctcactaggatatgatgagttcggagatagacgagaagccaggcgattcagattcagatggcaaaag

SEQ ID NO: 41469 - DNA, 1905 bp, Zea Mays
agccactcctcgtcatcggctaggccaggaagcatttaccagaagcatagatcttactatgctgcggtcaaaggtgagcacgtaagcgatataaaagcacgggtgtcgaacacattcttgccgttacaccctaagtttgcaccgagattacgtgagattgggctccatgtgttcgcatgcttggtgagtcgcaacagacggtttccatatgattaccccctgatgacatcaatgatagacaggtggcgcccagagacaaacacattccatcatagaattggtgaggtcaccccaactttgcaagatgtttctatgttatgtggccttccattgaaaggcaaaccagtgtattctatcaatgtgcgcaatgattggctggaagaccttaataaacggttttcaagtattccatggaaggagggaatgaatgtaccggaggttgaaaaaatcgataccaaacactcaaatggcccactcctgcattggctcaaatctctcagttctaaatacatgcctcatgatgctaatgaggccacaatatctctttccttggaagcatatctgctttggctttttggatatgttatgttttgcaacacttgggggtcagcagtactagcagcaacatatgaaggactttccaagatttgcataacaacaggactttcaatgcccaaggtacgcacacttacgggatgcccattgcttctcaacctctttgtgtatgagaggttcattgaattgcgtcctcgattaaaaaatgcatacaattattcgactccggacaacatggatggggacactatgggttcacggtggtgctgaagtgagttgaggtgggctagcgaggatcctaagaaggcacgtaaaacattcaccgaaatgttagataacattaaagacatagattttttgtggaacccatacaccagaacatgtattgaaacagttgcaccacatggtctctcattgttgtgctcttgtgacaaggaatattggaaaaccaaggatggcctcatcttcaacaacactgtccagaagcacccggtagagcgggtgatgcgacattttagtttataccaagagcagttgttggttgcagtagaggatcagcaagaaggtgagcagttgttggttgcagtagaggatcagcaagaaggtgttgcatggccagaaagagagccaacaaatgtactgaaggaggaaagggtacacgatgttgatgcattcaaggagtacctgaaatggtttagggaacgttcacgtgtacgtgtggctttcattcctgaggatcccagaatgaccaacgaggatcccaaaatgaccaacaacaaccatcttctttcaaaagcaataagttgatattatcacatgggcccaggagaaaacggcagcagactacaaccaggagactgtaacagatgaggccatgatattgttagatatcaatgtgaagtgcaaagaattcctggattattataatgaacttcagccaacgaccttggatgcataggatgaactaacagaggacaaaactcacacaaccatggatacagacgtcaatccaaattctgcttcagtttgtaacggctcttaaaattctacttccttttgtgaaggtggcagtcgtgaaggtggccatgaacaaaaaaatccaaacacttttgtgagagaaagcaggtcaaaaaggcgggctctgtataaagcttgcatagatttggcttgtacaaaaagtgaaaatgatacatacaaaaaaaatcataggaaacagggctgctttggcagaattatcaagcaaatatctgcgtcacctaatgcctgtgtaagcattttgtttctcaaatgttaaatcactctcaaagattttctttgctgataaaatattcctaaatcactctcaaagat

SEQ ID NO: 41470 - DNA, 1786 bp, Zea Mays
ctcctcgtcatcggctaggccaggaagattacgtgagattgggctccatgtgttcgcatgcttggtgagtcgcaacagacggtttccatatgattaccccctgatgacatcaatgatagacaggtggcgcccagagacaaacacattccatcatagaattggtgaggtcaccccaactttgcaagatgtttctatgttatgtggccttccattgaaaggcaaaccagtgtattctatcaatgtgcgcaatgattggctggaagaccttaataaacggttttcaagtattccatggaaggagggaatgaatgtaccggaggttgaaaaaatcgataccaaacactcaaatggcccactcctgcattggctcaaatctctcagttctaaatacatgcctcatgatgctaatgaggccacaatatctctttccttggaagcatatctgctttggctttttggatatgttatgttttgcaacacttgggggtcagcagtactagcagcaacatatgaaggactttccaagatttgcataacaacaggactttcaatgcccaaggtacgcacacttacgggatgcccattgcttctcaacctctttgtgtatgagaggttcattgaattgcgtcctcgattaaaaaatgcatacaattattcgactccggacaacatggatggggacactatgggttcacggtggtgctgaagtgagttgaggtgggctagcgaggatcctaagaaggcacgtaaaacattcaccgaaatgttagataacattaaagacatagattttttgtggaacccatacaccagaacatgtattgaaacagttgcaccacatggtctctcattgttgtgctcttgtgacaaggaatattggaaaaccaaggatggcctcatcttcaacaacactgtccagaagcacccggtagagcgggtgatgcgacattttagtttataccaagagcagttgttggttgcagtagaggatcagcaagaaggtgagcagttgttggttgcagtagaggatcagcaagaaggtgttgcatggccagaaagagagccaacaaatgtactgaaggaggaaagggtacacgatgttgatgcattcaaggagtacctgaaatggtttagggaacgttcacgtgtacgtgtggctttcattcctgaggatcccagaatgaccaacgaggatcccaaaatgaccaacaacaaccatcttctttcaaaagcaataagttgatattatcacatgggcccaggagaaaacggcagcagactacaaccaggagactgtaacagatgaggccatgatattgttagatatcaatgtgaagtgcaaagaattcctggattattataatgaacttcagccaacgaccttggatgcataggatgaactaacagaggacaaaactcacacaaccatggatacagacgtcaatccaaattctgcttcagtttgtaacggctcttaaaattctacttccttttgtgaaggtggcagtcgtgaaggtggccatgaacaaaaaaatccaaacacttttgtgagagaaagcaggtcaaaaaggcgggctctgtataaagcttgcatagatttggcttgtacaaaaagtgaaaatgatacatacaaaaaaaatcataggaaacagggctgctttggcagaattatcaagcaaatatctgcgtcacctaatgcctgtgtaagcattttgtttctcaaatgttaaatcactctcaaagattttctttgctgataaaatattcctaaatcactctcaaagat

SEQ ID NO: 41471 - DNA, 1609 bp, Zea Mays
ctcgtcatcggctaggccaggaagattacgtgagattgggctccatgtgttcgcatgcttggtgagtcgcaacagacggtttccatatgattaccccctgatgacatcaatgatagacaggtggcgcccagagacaaacacattccatcatagaattggtgaggtcaccccaactttgcaagatgtttctatgttatgtggccttccattgaaaggcaaaccagtgtattctatcaatgtgcgcaatgattggctggaagaccttaataaacggttttcaagtattccatggaaggagggaatgaatgtaccggaggttgaaaaaatcgataccaaacactcaaatggcccactcctgcattggctcaaatctctcagtggcaacgttgcagataagttcttcataacatatgctaagcttttagctgacatgaataacagagattgcatttatagttgggggtcagcagtactagcagcaacatatgaaggactttccaagatttgcataacaacaggactttcaatgcccaagttgaggtgggctagcgaggatcctaagaaggcacgtaaaacattcaccgaaatgttagataacattaaagacatagattttttgtggaacccatacaccagaacatgtattgaaacagttgcaccacatggtctctcattgttgtgctcttgtgacaaggaatattggaaaaccaaggatggcctcatcttcaacaacactgtccagaagcacccggtagagcgggtgatgcgacattttagtttataccaagagcagttgttggttgcagtagaggatcagcaagaaggtgagcagttgttggttgcagtagaggatcagcaagaaggtgttgcatggccagaaagagagccaacaaatgtactgaaggaggaaagggtacacgatgttgatgcattcaaggagtacctgaaatggtttagggaacgttcacgtgtacgtgtggctttcattcctgaggatcccagaatgaccaacgaggatcccaaaatgaccaacaacaaccatcttctttcaaaagcaataagttgatattatcacatgggcccaggagaaaacggcagcagactacaaccaggagactgtaacagatgaggccatgatattgttagatatcaatgtgaagtgcaaagaattcctggattattataatgaacttcagccaacgaccttggatgcataggatgaactaacagaggacaaaactcacacaaccatggatacagacgtcaatccaaattctgcttcagtttgtaacggctcttaaaattctacttccttttgtgaaggtggcagtcgtgaaggtggccatgaacaaaaaaatccaaacacttttgtgagagaaagcaggtcaaaaaggcgggctctgtataaagcttgcatagatttggcttgtacaaaaagtgaaaatgatacatacaaaaaaaatcataggaaacagggctgctttggcagaattatcaagcaaatatctgcgtcacctaatgcctgtgtaagcattttgtttctcaaatgttaaatcactctcaaagattttctttgctgataaaatattcctaaatcactctcaaagat

SEQ ID NO: 41472 - DNA, 2000 bp, Zea Mays
caagaaccgaacctcggtaaaacaaatctccgtgtctcacttgcttattcgcttgggatttgtttttgcgccctctctcgcggactcgtttatatttctaacgctaacccggcttgtagttgtgtttatatttgtaaatttcagtttcgccctattcacccccctctaggcgactatcacttatgttgtgcctcagctttttgatatcagcatttaccagaagcatagatcttactatgctgcggtcaaaggtgagcacgtaagcgatataaaagcacgggtgtcgaacacattcttgccgttacaccctaagtttgcaccgagattacgtgagattgggctccatgtgttcgcatgcttggtgagtcgcaacagacggtttccatatgattaccccctgatgacatcaatgatagacaggtggcgcccagagacaaacacattccatcatagaattggtgaggtcaccccaactttgcaagatgtttctatgttatgtggccttccattgaaaggcaaaccagtgtattctatcaatgtgcgcaatgattggctggaagaccttaataaacggttttcaagtattccatggaaggagggaatgaatgtaccggaggttgaaaaaatcgataccaaacactcaaatggcccactcctgcattggctcaaatctctcagtagattgcatttatagttgggggtcagcagtactagcagcaacatatgaaggactttccaagatttgcataacaacaggactttcaatgcccaaggtacgcacacttacgggatgcccattgcttctcaacctctttgtgtatgagaggttcattgaattgcgtcctcgattaaaaaatgcatacaattattcgactccggacaacatggatggggacactatgggttcacggtggtgctgaagtgagttgaggtgggctagcgaggatcctaagaaggcacgtaaaacattcaccgaaatgttagataacattaaagacatagattttttgtggaacccatacaccagaacatgtattgaaacagttgcaccacatggtctctcattgttgtgctcttgtgacaaggaatattggaaaaccaaggatggcctcatcttcaacaacactgtccagaagcacccggtagagcgggtgatgcgacattttagtttataccaagagcagttgttggttgcagtagaggatcagcaagaaggtgagcagttgttggttgcagtagaggatcagcaagaaggtgttgcatggccagaaagagagccaacaaatgtactgaaggaggaaagggtacacgatgttgatgcattcaaggagtacctgaaatggtttagggaacgttcacgtgtacgtgtggctttcattcctgaggatcccagaatgaccaacgaggatcccaaaatgaccaacaacaaccatcttctttcaaaagcaataagttgatattatcacatgggcccaggagaaaacggcagcagactacaaccaggagactgtaacagatgaggccatgatattgttagatatcaatgtgaagtgcaaagaattcctggattattataatgaacttcagccaacgaccttggatgcataggatgaactaacagaggacaaaactcacacaaccatggatacagacgtcaatccaaattctgcttcagtttgtaacggctcttaaaattctacttccttttgtgaaggtggcagtcgtgaaggtggccatgaacaaaaaaatccaaacacttttgtgagagaaagcaggtcaaaaaggcgggctctgtataaagcttgcatagatttggcttgtacaaaaagtgaaaatgatacatacaaaaaaaatcataggaaacagggctgctttggcagaattatcaagcaaatatctgcgtcacctaatgcctgtgtaagcattttgtttctcaaatgttaaatcactctcaaagattttctttgctgataaaatattcctaaatcactctcaaagat

SEQ ID NO: 41473 - DNA, 1771 bp, Zea Mays
caagaaccgaacctcggtaaaacaaatctccgtgtctcacttgcttattcgcttgggatttgtttttgcgccctctctcgcggactcgtttatatttctaacgctaacccggcttgtagttgtgtttatatttgtaaatttcagtttcgccctattcacccccctctaggcgactatcacttatgttgtgcctcagctttttgatatcagcatttaccagaagcatagatcttactatgctgcggtcaaaggtgagcacgtaagcgatataaaagcacgggtgtcgaacacattcttgccgttacaccctaagtttgcaccgagattacgtgagattgggctccatgtgttcgcatgcttggtgagtcgcaacagacggtttccatatgattaccccctgatgacatcaatgatagacaggtggcgcccagagacaaacacattccatcatagaattggtgaggtcaccccaactttgcaagatgtttctatgttatgtggccttccattgaaaggcaaaccagtgtattctatcaatgtgcgcaatgattggctggaagaccttaataaacggttttcaagtattccatggaaggagggaatgaatgtaccggaggttgaaaaaatcgataccaaacactcaaatggcccactcctgcattggctcaaatctctcagttctaaatacatgcctcatgatgctaatgaggccacaatatctctttccttggaagcatatctgctttggctttttggatatgttatgttttgcaacacttgggggtcagcagtactagcagcaacatatgaaggactttccaagatttgcataacaacaggactttcaatgcccaaggaatattggaaaaccaaggatggcctcatcttcaacaacactgtccagaagcacccggtagagcgggtgatgcgacattttagtttataccaagagcagttgttggttgcagtagaggatcagcaagaaggtgagcagttgttggttgcagtagaggatcagcaagaaggtgttgcatggccagaaagagagccaacaaatgtactgaaggaggaaagggtacacgatgttgatgcattcaaggagtacctgaaatggtttagggaacgttcacgtgtacgtgtggctttcattcctgaggatcccagaatgaccaacgaggatcccaaaatgaccaacaacaaccatcttctttcaaaagcaataagttgatattatcacatgggcccaggagaaaacggcagcagactacaaccaggagactgtaacagatgaggccatgatattgttagatatcaatgtgaagtgcaaagaattcctggattattataatgaacttcagccaacgaccttggatgcataggatgaactaacagaggacaaaactcacacaaccatggatacagacgtcaatccaaattctgcttcagtttgtaacggctcttaaaattctacttccttttgtgaaggtggcagtcgtgaaggtggccatgaacaaaaaaatccaaacacttttgtgagagaaagcaggtcaaaaaggcgggctctgtataaagcttgcatagatttggcttgtacaaaaagtgaaaatgatacatacaaaaaaaatcataggaaacagggctgctttggcagaattatcaagcaaatatctgcgtcacctaatgcctgtgtaagcattttgtttctcaaatgttaaatcactctcaaagattttctttgctgataaaatattcctaaatcactctcaaagat

SEQ ID NO: 41474 - DNA, 2083 bp, Zea Mays
caagaaccgaacctcggtaaaacaaatctccgtgtctcacttgcttattcgcttgggatttgtttttgcgccctctctcgcggactcgtttatatttctaacgctaacccggcttgtagttgtgtttatatttgtaaatttcagtttcgccctattcacccccctctaggcgactatcacttatgttgtgcctcagctttttgatatcagcatttaccagaagcatagatcttactatgctgcggtcaaaggtgagcacgtaagcgatataaaagcacgggtgtcgaacacattcttgccgttacaccctaagtttgcaccgagattacgtgagattgggctccatgtgttcgcatgcttggtgagtcgcaacagacggtttccatatgattaccccctgatgacatcaatgatagacaggtggcgcccagagacaaacacattccatcatagaattggtgaggtcaccccaactttgcaagatgtttctatgttatgtggccttccattgaaaggcaaaccagtgtattctatcaatgtgcgcaatgattggctggaagaccttaataaacggttttcaagtattccatggaaggagggaatgaatgtaccggaggttgaaaaaatcgataccaaacactcaaatggcccactcctgcattggctcaaatctctcagttctaaatacatgcctcatgatgctaatgaggccacaatatctctttccttggaagcatatctgctttggctttttggatatgttatgttttgcaacacttgggggtcagcagtactagcagcaacatatgaaggactttccaagatttgcataacaacaggactttcaatgcccaaggtacgcacacttacgggatgcccattgcttctcaacctctttgtgtatgagaggttcattgaattgcgtcctcgattaaaaaatgcatacaattattcgactccggacaacatggatggggacactatgggttcacggtggtgctgaagtgagttgaggtgggctagcgaggatcctaagaaggcacgtaaaacattcaccgaaatgttagataacattaaagacatagattttttgtggaacccatacaccagaacatgtattgaaacagttgcaccacatggtctctcattgttgtgctcttgtgacaaggaatattggaaaaccaaggatggcctcatcttcaacaacactgtccagaagcacccggtagagcgggtgatgcgacattttagtttataccaagagcagttgttggttgcagtagaggatcagcaagaaggtgagcagttgttggttgcagtagaggatcagcaagaaggtgttgcatggccagaaagagagccaacaaatgtactgaaggaggaaagggtacacgatgttgatgcattcaaggagtacctgaaatggtttagggaacgttcacgtgtacgtgtggctttcattcctgaggatcccagaatgaccaacgaggatcccaaaatgaccaacaacaaccatcttctttcaaaagcaataagttgatattatcacatgggcccaggagaaaacggcagcagactacaaccaggagactgtaacagatgaggccatgatattgttagatatcaatgtgaagtgcaaagaattcctggattattataatgaacttcagccaacgaccttggatgcataggatgaactaacagaggacaaaactcacacaaccatggatacagacgtcaatccaaattctgcttcagtttgtaacggctcttaaaattctacttccttttgtgaaggtggcagtcgtgaaggtggccatgaacaaaaaaatccaaacacttttgtgagagaaagcaggtcaaaaaggcgggctctgtataaagcttgcatagatttggcttgtacaaaaagtgaaaatgatacatacaaaaaaaatcataggaaacagggctgctttggcagaattatcaagcaaatatctgcgtcacctaatgcctgtgtaagcattttgtttctcaaatgttaaatcactctcaaagattttctttgctgataaaatattcctaaatcactctcaaagat

SEQ ID NO: 41475 - DNA, 1929 bp, Zea Mays
gtaaatttcagtttcgccctattcacccccctctaggcgactatcacttatgttgtgcctcagctttttgatatcagcatttaccagaagcatagatcttactatgctgcggtcaaaggtgagcacgtaagcgatataaaagcacgggtgtcgaacacattcttgccgttacaccctaagtttgcaccgagattacgtgagattgggctccatgtgttcgcatgcttggtgagtcgcaacagacggtttccatatgattaccccctgatgacatcaatgatagacaggtggcgcccagagacaaacacattccatcatagaattggtgaggtcaccccaactttgcaagatgtttctatgttatgtggccttccattgaaaggcaaaccagtgtattctatcaatgtgcgcaatgattggctggaagaccttaataaacggttttcaagtattccatggaaggagggaatgaatgtaccggaggttgaaaaaatcgataccaaacactcaaatggcccactcctgcattggctcaaatctctcagtggcaacgttgcagataagttcttcataacatatgctaagcttttagctgacatgaataacagagattgcatttatagttgggggtcagcagtactagcagcaacatatgaaggactttccaagatttgcataacaacaggactttcaatgcccaaggtacgcacacttacgggatgcccattgcttctcaacctctttgtgtatgagaggttcattgaattgcgtcctcgattaaaaaatgcatacaattattcgactccggacaacatggatggggacactatgggttcacggtggtgctgaagtgagttgaggtgggctagcgaggatcctaagaaggcacgtaaaacattcaccgaaatgttagataacattaaagacatagattttttgtggaacccatacaccagaacatgtattgaaacagttgcaccacatggtctctcattgttgtgctcttgtgacaaggaatattggaaaaccaaggatggcctcatcttcaacaacactgtccagaagcacccggtagagcgggtgatgcgacattttagtttataccaagagcagttgttggttgcagtagaggatcagcaagaaggtgagcagttgttggttgcagtagaggatcagcaagaaggtgttgcatggccagaaagagagccaacaaatgtactgaaggaggaaagggtacacgatgttgatgcattcaaggagtacctgaaatggtttagggaacgttcacgtgtacgtgtggctttcattcctgaggatcccagaatgaccaacgaggatcccaaaatgaccaacaacaaccatcttctttcaaaagcaataagttgatattatcacatgggcccaggagaaaacggcagcagactacaaccaggagactgtaacagatgaggccatgatattgttagatatcaatgtgaagtgcaaagaattcctggattattataatgaacttcagccaacgaccttggatgcataggatgaactaacagaggacaaaactcacacaaccatggatacagacgtcaatccaaattctgcttcagtttgtaacggctcttaaaattctacttccttttgtgaaggtggcagtcgtgaaggtggccatgaacaaaaaaatccaaacacttttgtgagagaaagcaggtcaaaaaggcgggctctgtataaagcttgcatagatttggcttgtacaaaaagtgaaaatgatacatacaaaaaaaatcataggaaacagggctgctttggcagaattatcaagcaaatatctgcgtcacctaatgcctgtgtaagcattttgtttctcaaatgttaaatcactctcaaagattttctttgctgataaaatattcctaaatcactctcaaagat

SEQ ID NO: 41476 - DNA, 1653 bp, Zea Mays
cttatgttgtgcctcagctttttgatatcagcatttaccagaagcatagatcttactatgctgcggtcaaaggtgagcacgtaagcgatataaaagcacgggtgtcgaacacattcttgccgttacaccctaagtttgcaccgagattacgtgagattgggctccatgtgttcgcatgcttggtgagtcgcaacagacggtttccatatgattaccccctgatgacatcaatgatagacaggtggcgcccagagacaaacacattccatcatagaattggtgaggtcaccccaactttgcaagatgtttctatgttatgtggccttccattgaaaggcaaaccagtgtattctatcaatgtgcgcaatgattggctggaagaccttaataaacggttttcaagtattccatggaaggagggaatgaatgtaccggaggttgaaaaaatcgataccaaacactcaaatggcccactcctgcattggctcaaatctctcagtttgggggtcagcagtactagcagcaacatatgaaggactttccaagatttgcataacaacaggactttcaatgcccaagttgaggtgggctagcgaggatcctaagaaggcacgtaaaacattcaccgaaatgttagataacattaaagacatagattttttgtggaacccatacaccagaacatgtattgaaacagttgcaccacatggtctctcattgttgtgctcttgtgacaaggaatattggaaaaccaaggatggcctcatcttcaacaacactgtccagaagcacccggtagagcgggtgatgcgacattttagtttataccaagagcagttgttggttgcagtagaggatcagcaagaaggtgagcagttgttggttgcagtagaggatcagcaagaaggtgttgcatggccagaaagagagccaacaaatgtactgaaggaggaaagggtacacgatgttgatgcattcaaggagtacctgaaatggtttagggaacgttcacgtgtacgtgtggctttcattcctgaggatcccagaatgaccaacgaggatcccaaaatgaccaacaacaaccatcttctttcaaaagcaataagttgatattatcacatgggcccaggagaaaacggcagcagactacaaccaggagactgtaacagatgaggccatgatattgttagatatcaatgtgaagtgcaaagaattcctggattattataatgaacttcagccaacgaccttggatgcataggatgaactaacagaggacaaaactcacacaaccatggatacagacgtcaatccaaattctgcttcagtttgtaacggctcttaaaattctacttccttttgtgaaggtggcagtcgtgaaggtggccatgaacaaaaaaatccaaacacttttgtgagagaaagcaggtcaaaaaggcgggctctgtataaagcttgcatagatttggcttgtacaaaaagtgaaaatgatacatacaaaaaaaatcataggaaacagggctgctttggcagaattatcaagcaaatatctgcgtcacctaatgcctgtgtaagcattttgtttctcaaatgttaaatcactctcaaagattttctttgctgataaaatattcctaaatcactctcaaagat

SEQ ID NO: 41477 - DNA, 1976 bp, Zea Mays
aaacggcaacggaacggaacgcgtcgcaggccgtccgcctccccgagcaacagacgagcggagtagtaggtggcctcccgacccggggttctcctccactcccgcagtcccgctccagctttctctgccccgaccccgatcgatgctaaattcccgcgccgagccgctcgcccgcctcccaccccatcaccgagccgcctcgcgcggccccccgtcattttcgcccgactctctcgcctcggaggacgtagagagaggagaagggagtcgtcgtcgtcctgcgcccggcgctcgggccactggatccaggggttgcggtggatttggagcccggagtggactgattgctgatggtattctccgagggaggaggcagggagagagcggggcaggacgatggcgtcggaggatctcggcgtcgccactaaggatacagaagttgtaaacacaaaaccagcaaagcgatacccacttgcgttatggatagccatattgggcctgataatgctagttggtgtgtacatattctcgttgtctctaaagcaaaatgggatgcttttcgggctcatgcagacaaatttgatagaaaaggaaagggagaaaccttgtcatgatcccggtattccagacacagaaatcccttacttgcactacccaatgccaaatacttatgataggaaagaatgtgcgtgcacgggggttaggttctttgctatattgtcaatgcagaggtcagggagtggatgggttgagacattgttgaatagccatcctaatattagctccaatggagagatcttctctgtcaaagaaagacgcagtaatttcactgcgattaagaaaacactggacaaattgtacaatttggattggtacagcagtgctgctaagaatgaatgtacagctgctgtggggctgaaatggatgctcaatcagtgaaaattatagggcttaatgaagcaccatcaagagatagttgaatacttcaaccgaaggggcgtttctgcaatttttctactaagaagaaatcttctcaggcgttatgtctctatattagcaaatgctcatgatagtgccatgaaacagctgaatggaactcataaagctcatgtgcactccaaacatgaggctgaaattcttgctcaatataagccaaccattgacaaaaaaacattgatcgctgaactaaaacggtctgataagtttgcagctgatgctttggtgaatttcaagaacaccaggcatgtcgttctgtactatgaggatgttgtcaggagtcggacgatgctcatggatgtcctggattttctaagactgcctaagaggaagctgttgagtcgacatgtgaaaatccacactaaacgattgcgtgatcatattgataactgggcagacgttaataattttttgaaggggacgccgttcgagagctttttgaatggctcaaggagatgacatcgctagctgatgtatatagggctatagtgtgctgcccttttgacgctttggtacccctttctaaggttaacagagttagcacagtaggcaaaaaaaatttgacatcatgatcgaataagtttgggtcagtgagagaaatagttaggaagcagaagtagatatgcttgatccaggttagtctcatagatatggacttcatgacagcagaatgaagacgagaaacaatacctttggggttatcaaatattcaatgcaagaacttgtaaaagctgtctggactcattcatgaatacatcgaagtttacacttgaaaatgatagcccagccggattgccgccacaagtgctcaactgctcatactccttttgtgcacatgttggccccctcgaaagtatcttggggtgtgtttggctagtgggttgatacccgtgtttagttcaaaaggttttcgggttaggttggttccgagtcagaatctttcttaaaaatgcgggttctagtgattcctcgaaaacaac

SEQ ID NO: 41478 - DNA, 1930 bp, Zea Mays
cccgagcaacagacgagcggagtagtaggtggcctcccgacccggggttctcctccactcccgcagtcccgctccagctttctctgccccgaccccgatcgatgctaaattcccgcgccgagccgctcgcccgcctcccaccccatcaccgagccgcctcgcgcggccccccgtcattttcgcccgactctctcgcctcggaggacgtagagagaggagaagggagtcgtcgtcgtcctgcgcccggcgctcgggccactggatccaggggttgcggtggatttggagcccggagtggactgattgctgatggtattctccgagggaggaggcagggagagagcggggcaggacgatggcgtcggaggatctcggcgtcgccactaaggatacagaagttgtaaacacaaaaccagcaaagcgatacccacttgcgttatggatagccatattgggcctgataatgctagttggtgtgtacatattctcgttgtctctaaagcaaaatgggatgcttttcgggctcatgcagacaaatttgatagaaaaggaaagggagaaaccttgtcatgatcccggtattccagacacagaaatcccttacttgcactacccaatgccaaatacttatgatagaatgtgcgtgcacgggggttaggttctttgctatattgtcaatgcagaggtcagggagtggatgggttgagacattgttgaatagccatcctaatattagctccaatggagagatcttctctgtcaaagaaagacgcagtaatttcactgcgattaagaaaacactggacaaattgtacaatttggattggtacagcagtgctgctaagaatgaatgtacagctgctgtggggctgaaatggatgctcaatcagtgaaaattatagggcttaatgaagcaccatcaagagatagttgaatacttcaaccgaaggggcgtttctgcaatttttctactaagaagaaatcttctcaggcgttatgtctctatattagcaaatgctcatgatagtgccatgaaacagctgaatggaactcataaagctcatgtgcactccaaacatgaggctgaaattcttgctcaatataagccaaccattgacaaaaaaacattgatcgctgaactaaaacggtctgataagtttgcagctgatgctttggtgaatttcaagaacaccaggcatgtcgttctgtactatgaggatgttgtcaggagtcggacgatgctcatggatgtcctggattttctaagactgcctaagaggaagctgttgagtcgacatgtgaaaatccacactaaacgattgcgtgatcatattgataactgggcagacgttaataattttttgaaggggacgccgttcgagagctttttgaatggctcaaggagatgacatcgctagctgatgtatatagggctatagtgtgctgcccttttgacgctttggtacccctttctaaggttaacagagttagcacagtaggcaaaaaaaatttgacatcatgatcgaataagtttgggtcagtgagagaaatagttaggaagcagaagtagatatgcttgatccaggttagtctcatagatatggacttcatgacagcagaatgaagacgagaaacaatacctttggggttatcaaatattcaatgcaagaacttgtaaaagctgtctggactcattcatgaatacatcgaagtttacacttgaaaatgatagcccagccggattgccgccacaagtgctcaactgctcatactccttttgtgcacatgttggccccctcgaaagtatcttggggtgtgtttggctagtgggttgatacccgtgtttagttcaaaaggttttcgggttaggttggttccgagtcagaatctttcttaaaaatgcgggttctagtgattcctcgaaaacaac

SEQ ID NO: 41479 - DNA, 1697 bp, Zea Mays
cccgagcaacagacgagcggagtagtaggtggcctcccgacccggggttctcctccactcccgcagtcccgctccagctttctctgccccgaccccgatcgatgctaaattcccgcgccgagccgctcgcccgcctcccaccccatcaccgagccgcctcgcgcggccccccgtcattttcgcccgactctctcgcctcggaggacgtagagagaggagaagggagtcgtcgtcgtcctgcgcccggcgctcgggccactggatccaggggttgcggtggatttggagcccggagtggactgattgacgatggcgtcggaggatctcggcgtcgccactaaggatacagaagttgtaaacacaaaaccagcaaagcgatacccacttgcgttatggatagccatattgggcctgataatgctagttggtgtgtacatattctcgttgtctctaaagcaaaatgggatgcttttcgggctcatgcagacaaatttgatagaaaaggaaagggagaaaccttgtcatgatcccggtattccagacacagaaatcccttacttgcactacccaatgccaaatacttatgataggaaagaatgtgcgtgcacgggggttaggttctttgctatattgtcaatgcagaggtcagggagtggatgggttgagacattgttgaatagccatcctaatattagctccaatggagagatcttctctgtcaaagaaagacgcagtaatttcactgcgattaagaaaacactggacaaattgtacaatttggattggtacagcagtgctgctaagaatgaatgtacagctgctgtggggctgaaatggatgctcaatcaggctgaaattcttgctcaatataagccaaccattgacaaaaaaacattgatcgctgaactaaaacggtctgataagtttgcagctgatgctttggtgaatttcaagaacaccaggcatgtcgttctgtactatgaggatgttgtcaggagtcggacgatgctcatggatgtcctggattttctaagactgcctaagaggaagctgttgagtcgacatgtgaaaatccacactaaacgattgcgtgatcatattgataactgggcagacgttaataattttttgaaggggacgccgttcgagagctttttgaatggctcaaggagatgacatcgctagctgatgtatatagggctatagtgtgctgcccttttgacgctttggtacccctttctaaggttaacagagttagcacagtaggcaaaaaaaatttgacatcatgatcgaataagtttgggtcagtgagagaaatagttaggaagcagaagtagatatgcttgatccaggttagtctcatagatatggacttcatgacagcagaatgaagacgagaaacaatacctttggggttatcaaatattcaatgcaagaacttgtaaaagctgtctggactcattcatgaatacatcgaagtttacacttgaaaatgatagcccagccggattgccgccacaagtgctcaactgctcatactccttttgtgcacatgttggccccctcgaaagtatcttggggtgtgtttggctagtgggttgatacccgtgtttagttcaaaaggttttcgggttaggttggttccgagtcagaatctttcttaaaaatgcgggttctagtgattcctcgaaaacaac

SEQ ID NO: 41480 - DNA, 1663 bp, Zea Mays
actgtctcctttccgttagtgttttgtgattaggaggtcactgattgggggtctgggggagtaattactgtgcccctgattctgtttcggcgttctcaatttctctggaccagacactacacgttgctgtgaggatacagaagttgtaaacacaaaaccagcaaagcgatacccacttgcgttatggatagccatattgggcctgataatgctagttggtgtgtacatattctcgttgtctctaaagcaaaatgggatgcttttcgggctcatgcagacaaatttgatagaaaaggaaagggagaaaccttgtcatgatcccggtattccagacacagaaatcccttacttgcactacccaatgccaaatacttatgatagaatgtgcgtgcacgggggttaggttctttgctatattgtcaatgcagaggtcagggagtggatgggttgagacattgttgaatagccatcctaatattagctccaatggagagatcttctctgtcaaagaaagacgcagtaatttcactgcgattaagaaaacactggacaaattgtacaatttggattggtacagcagtgctgctaagaatgaatgtacagctgctgtggggctgaaatggatgctcaatcagggcttaatgaagcaccatcaagagatagttgaatacttcaaccgaaggggcgtttctgcaatttttctactaagaagaaatcttctcaggcgttatgtctctatattagcaaatgctcatgatagtgccatgaaacagctgaatggaactcataaagctcatgtgcactccaaacatgaggctgaaattcttgctcaatataagccaaccattgacaaaaaaacattgatcgctgaactaaaacggtctgataagtttgcagctgatgctttggtgaatttcaagaacaccaggcatgtcgttctgtactatgaggatgttgtcaggagtcggacgatgctcatggatgtcctggattttctaagactgcctaagaggaagctgttgagtcgacatgtgaaaatccacactaaacgattgcgtgatcatattgataactgggcagacgttaataattttttgaaggggacgccgttcgagagctttttgaatggctcaaggagatgacatcgctagctgatgtatatagggctatagtgtgctgcccttttgacgctttggtacccctttctaaggttaacagagttagcacagtaggcaaaaaaaatttgacatcatgatcgaataagtttgggtcagtgagagaaatagttaggaagcagaagtagatatgcttgatccaggttagtctcatagatatggacttcatgacagcagaatgaagacgagaaacaatacctttggggttatcaaatattcaatgcaagaacttgtaaaagctgtctggactcattcatgaatacatcgaagtttacacttgaaaatgatagcccagccggattgccgccacaagtgctcaactgctcatactccttttgtgcacatgttggccccctcgaaagtatcttggggtgtgtttggctagtgggttgatacccgtgtttagttcaaaaggttttcgggttaggttggttccgagtcagaatctttcttaaaaatgcgggttctagtgattcctcgaaaacaac

SEQ ID NO: 41481 - DNA, 1638 bp, Zea Mays
taggaggtcactgattgggggtctgggggagtaattactgtgcccctgattctgtttcggcgttctcaatttctctggaccagacactacacgttgctgtgaggatacagaagttgtaaacacaaaaccagcaaagcgatacccacttgcgttatggatagccatattgggcctgataatgctagttggtgtgtacatattctcgttgtctctaaagcaaaatgggatgcttttcgggctcatgcagacaaatttgatagaaaaggaaagggagaaaccttgtcatgatcccggtattccagacacagaaatcccttacttgcactacccaatgccaaatacttatgataggaaagaatgtgcgtgcacgggggttaggttctttgctatattgtcaatgcagaggtcagggagtggatgggttgagacattgttgaatagccatcctaatattagctccaatggagagatcttctctgtcaaagaaagacgcagtaatttcactgcgattaagaaaacactggacaaattgtacaatttggattggtacagcagtgctgctaagaatgaatgtacagctgctgtggggctgaaatggatgctcaatcagggcttaatgaagcaccatcaagagatagttgaatacttcaaccgaaggggcgtttctgcaatttttctactaagaagaaatcttctcaggcgttatgtctctatattagcaaatgctcatgatagtgccatgaaacagctgaatggaactcataaagctcatgtgcactccaaacatgaggctgaaattcttgctcaatataagccaaccattgacaaaaaaacattgatcgctgaactaaaacggtctgataagtttgcagctgatgctttggtgaatttcaagaacaccaggcatgtcgttctgtactatgaggatgttgtcaggagtcggacgatgctcatggatgtcctggattttctaagactgcctaagaggaagctgttgagtcgacatgtgaaaatccacactaaacgattgcgtgatcatattgataactgggcagacgttaataattttttgaaggggacgccgttcgagagctttttgaatggctcaaggagatgacatcgctagctgatgtatatagggctatagtgtgctgcccttttgacgctttggtacccctttctaaggttaacagagttagcacagtaggcaaaaaaaatttgacatcatgatcgaataagtttgggtcagtgagagaaatagttaggaagcagaagtagatatgcttgatccaggttagtctcatagatatggacttcatgacagcagaatgaagacgagaaacaatacctttggggttatcaaatattcaatgcaagaacttgtaaaagctgtctggactcattcatgaatacatcgaagtttacacttgaaaatgatagcccagccggattgccgccacaagtgctcaactgctcatactccttttgtgcacatgttggccccctcgaaagtatcttggggtgtgtttggctagtgggttgatacccgtgtttagttcaaaaggttttcgggttaggttggttccgagtcagaatctttcttaaaaatgcgggttctagtgattcctcgaaaacaac

SEQ ID NO: 41482 - DNA, 2134 bp, Zea Mays
ccaaaacaaaaacccaataaaaatctcgcctcacctctcgcagtccagccaaccccgtcgcccaccccaatctccacgcgtcgccgccgcttgccggcgagtctattcccctccgtcacgccgccgaggctacccggaccccgcagcggttcggataagactgccgcccgccgtccgccacctgccacccgccctcctttgactcccactactctcggccccgggaccgcttcggcctggatctagggttgtgtggggaggggttctggaagccttggccgcgatgggcgagtcagacgatgacgcccgcaccttcaaggtcgttttcaccaccaccggagaggagcagttccgggagctcgtgagggagaagctgcgcggattcaggaggggtctggacgacaccctcgtggattatgttaccatcatgctcaagaatggaaaaagtaaggatcatgccagtgaggaactccatgtatttctaggggatgatactgcagtattcatttcctggttgtggggccatctttcttcaaatatgcacttatatgtgcaaccacaagaacgaactcgggaggttaaggatgatgaggcccccaaagaagtatctggaagagaaaaatcatcagatgtgctcccgagaagcaaacatcaaactcattctgggcacacaattgaatcaagtgaagctactagtaggagacggagtaaccgggaatggaaagggattggtcggaagggtaatgaaaaatttccgcttcgaaatgtactaactgatattcttcatggggaggacaaaagatcgcaaaagtccaatgaagtacgaccccctccatcaaaacaacagaacgacaggaagcgtgaaagggatgatgagacacatcaaacaaagaaggactcctcatcacgctccatgcttggtgatggtgcttcccgtcgtcttctacagtttgctgtccgagatgctgtaaaagctgtacagccaaccagtacctctgctgaaccagcatccaagcgcctgtgctctgtggtcgccactacttctacagagcacatgcgtgataggagatcagaaagatctcaggactacctgaacgatagaagatcagaaagatctcaagacaacttgagtgacagaagatcagaaagaactaggccaatgctacaggtacatggagctgctttagctcttagagctgcagcggaagctgctgcagattctgcaaaggttagatctactggaagtgttttcaagcgattgggtcaagggaatgttgtgaaacagccatctcgttctcgtgaagagaagagagattatgaagattttgagccagttacgatcgcagatgaacatgattctgatcaatatgttaataatgaggaatccgaagaggaatctggagagctaaccatggcagatagggtagctggaagtggaatgtatgttgattcgagctctgaagatgatatggaccgagatgagggtattacaagataccaaacttctctttcacatgacgatactttctcaccatttgcagagaagaaaactgtatcggcaccatgcagtgttgaactagagactaatgcaataagaccttcaagtgtgaatgacgaggaacaacctgttccttcaacaccaacagcaagtaaagctgtcgctatttctgttgatgtaaatatggtggagcctcccagttatgcaacaccaaaagatgttcatgttgtggagaagccttatgttgcacccatgaattcaaatgccgccagtattgctaccaatgccaaagaattaggtcatgctgaagttcaaaaggattctcagcggtctgcaccatctgttccggtttcatatagcacagcgcatccgatggaggatgcagattcaagaacgctttatgttaacaatgttcactttgctgccaccaaggactcattatctcgccatttcaacaagtttggtgcagtgctgaaagtagtcattgtcactaatgccgcaacgggccagccaacagggtttaatgaaaagaaccacatcatcaacataaatggagattctattattgacattgttgcaactcaaaggatgcagaagacccatatgttcagccttatcaaacagactgcaaaggac

SEQ ID NO: 41483 - DNA, 2209 bp, Zea Mays
taaaaatctcgcctcacctctcgcagtccagccaaccccgtcgcccaccccaatctccacgcgtcgccgccgcttgccggcgagtctattcccctccgtcacgccgccgaggctacccggaccccgcagcggttcggataagactgccgcccgccgtccgccacctgccacccgccctcctttgactcccactactctcggccccgggaccgcttcggcctggatctagggttgtgtggggaggggttctggaagccttggccgcgatgggcgagtcagacgatgacgcccgcaccttcaaggtcgttttcaccaccaccggagaggagcagttccgggagctcgtgagggagaagctgcgcggattcaggaggggtctggacgacaccctcgtggattatgttaccatcatgctcaagaatggaaaaagtaaggatcatgccagtgaggaactccatgtatttctaggggatgatactgcagtattcatttcctggttgtggggccatctttcttcaaatatgcacttatatgtgcaaccacaagaacgaactcgggaggttaaggatgatgaggcccccaaagaagtatctggaagagaaaaatcatcagatgtgctcccgagaagcaaacatcaaactcattctgggcacacaattgaatcaagtgaagctactagtaggagacggagtaaccgggaatggaaagggattggtcggaagggtaatgaaaaatttccgcttcgaaatgtactaactgatattcttcatggggaggacaaaagatcgcaaaagtccaatgaagtacgaccccctccatcaaaacaacagaacgacaggaagcgtgaaagggatgatgagacacatcaaacaaagaaggactcctcatcacgctccatgcttggtgatggtgcttcccgtcgtcttctacagtttgctgtccgagatgctgtaaaagctgtacagccaaccagtacctctgctgaaccagcatccaagcgcctgtgctctgtggtcgccactacttctacagagcacatgcgtgataggagatcagaaagatctcaggactacctgaacgatagaagatcagaaagatctcaagacaacttgagtgacagaagatcagaaagaactaggccaatgctacaggtacatggagctgctttagctcttagagctgcagcggaagctgctgcagattctgcaaaggttagatctactggaagtgttttcaagcgattgggtcaagggaatgttgtgaaacagccatctcgttctcgtgaagagaagagagattatgaagattttgagccagttacgatcgcagatgaacatgattctgatcaatatgttaataatgaggaatccgaagaggaatctggagagctaaccatggcagatagggtagctggaagtggaatgtatgttgattcgagctctgaagatgatatggaccgagatgagggtattacaagataccaaacttctctttcacatgacgatactttctcaccatttgcagagaagaaaactgtatcggcaccatgcagtgttgaactagagactaatgcaataagaccttcaagtgtgaatgacgaggaacaacctgttccttcaacaccaacagcaagtaaagctgtcgctatttctgttgatgtaaatatggtggagcctcccagttatgcaacaccaaaagatgttcatgttgtggagaagccttatgttgcacccatgaattcaaatgccgccagtattgctaccaatgccaaagaattaggtcatgctgaagttcaaaaggattctcagcggtctgcaccatctgttccggtttcatatagcacagcgcatccgatggaggatgcagattcaagaacgctttatgttaacaatgttcactttgctgccaccaaggactcattatctcgccatttcaacaagtttggtgcagtgctgaaagtagtcattgtcactaatgccgcaacgggccagccaacagggtcagtttaattgtaaaatttttaacgcttattatggctgagctaagatttgtatcatgctattcattttacctttccgtcccacaacaagattttttttcttgaacgcgcaggagagctgcacatctttatattagagatagaaaaacaggacttacacccaagctaaaacaggaaaataaacaaaagaaaagataagaaaaggaaaaa

SEQ ID NO: 41484 - DNA, 2970 bp, Zea Mays
taaaaatctcgcctcacctctcgcagtccagccaaccccgtcgcccaccccaatctccacgcgtcgccgccgcttgccggcgagtctattcccctccgtcacgccgccgaggctacccggaccccgcagcggttcggataagactgccgcccgccgtccgccacctgccacccgccctcctttgactcccactactctcggccccgggaccgcttcggcctggatctagggttgtgtggggaggggttctggaagccttggccgcgatgggcgagtcagacgatgacgcccgcaccttcaaggtcgttttcaccaccaccggagaggagcagttccgggagctcgtgagggagaagctgcgcggattcaggaggggtctggacgacaccctcgtggattatgttaccatcatgctcaagaatggaaaaagtaaggatcatgccagtgaggaactccatgtatttctaggggatgatactgcagtattcatttcctggttgtggggccatctttcttcaaatatgcacttatatgtgcaaccacaagaacgaactcgggaggttaaggatgatgaggcccccaaagaagtatctggaagagaaaaatcatcagatgtgctcccgagaagcaaacatcaaactcattctgggcacacaattgaatcaagtgaagctactagtaggagacggagtaaccgggaatggaaagggattggtcggaagggtaatgaaaaatttccgcttcgaaatgtactaactgatattcttcatggggaggacaaaagatcgcaaaagtccaatgaagtacgaccccctccatcaaaacaacagaacgacaggaagcgtgaaagggatgatgagacacatcaaacaaagaaggactcctcatcacgctccatgcttggtgatggtgcttcccgtcgtcttctacagtttgctgtccgagatgctgtaaaagctgtacagccaaccagtacctctgctgaaccagcatccaagcgcctgtgctctgtggtcgccactacttctacagagcacatgcgtgataggagatcagaaagatctcaggactacctgaacgatagaagatcagaaagatctcaagacaacttgagtgacagaagatcagaaagaactaggccaatgctacaggtacatggagctgctttagctcttagagctgcagcggaagctgctgcagattctgcaaaggttagatctactggaagtgttttcaagcgattgggtcaagggaatgttgtgaaacagccatctcgttctcgtgaagagaagagagattatgaagattttgagccagttacgatcgcagatgaacatgattctgatcaatatgttaataatgaggaatccgaagaggaatctggagagctaaccatggcagatagggtagctggaagtggaatgtatgttgattcgagctctgaagatgatatggaccgagatgagggtattacaagataccaaacttctctttcacatgacgatactttctcaccatttgcagagaagaaaactgtatcggcaccatgcagtgttgaactagagactaatgcaataagaccttcaagtgtgaatgacgaggaacaacctgttccttcaacaccaacagcaagtaaagctgtcgctatttctgttgatgtaaatatggtggagcctcccagttatgcaacaccaaaagatgttcatgttgtggagaagccttatgttgcacccatgaattcaaatgccgccagtattgctaccaatgccaaagtcatgctgaagttcaaaaggattctcagcggtctgcaccatctggttcactttgctgccaccaaggactcattatctcgccatttcaacaagtttggtgcagtgctgaaagtagtcattgtcactaatgccgcaacgggccagccaacagggtctgcctatgtagagttcttacacaaagaatcagctgaacgagcattgtcgttgaatggcacatcatttatgacccgtattctcaaggttgtccggcgaagttctcatgaagcagctcacttttatggttggcctggtagtggacggtcatcaatatatgggaggcatggtaggatggcatacccaagagctgttatccctggtggttcctttagagggcgtgctccgatgaaagctggtgctagaagtttacagtggaaacgggagccttcaggcactgattcaagtgcaggtgcgaaaactgacatgagtgtggcattttcctctgaacaggtgcttccacgtgcaacataggggagtatgttaccgctgagctgatataatgagaaccaagtggtatcccactcgtcgctcctggccctaatggctgaatatggacagcaagctgagaagattgttccttcctgctgcactgtaaaagaaaagtacaaaaaaaatgaaaaatataaaaatctaaaacaagagattctgggggagtttggcatcagattatggctatcattctggtgactggatttggtcctcttggccatatgcgagtaggctgacagcctgagcaattttctatggactccagcaatctgaaagaggattcacattcaaaataatcagagcttggatgtattggatggaagatgcttttcaagtagaacaagatgtgcagattttggaccaggtatttagtgacaatccgggcgtcatcgatgtaagcctcaactgtatagaagtaacctatctatctgtacccttgtgtgaatcaatctccttcccaacaaaaaggggggaaaaggcagcacaaaaaaatatgttctcttttgttttttcctctccatgaactgttttatttattgtactaatatagctgattattcagttggacattcatttttttgtcaaacagtttaacaatactttttttcctgtgtggtctacaattagattgaccgtgctacctgacttgcatttccaccatttcatgttttaa

SEQ ID NO: 41485 - DNA, 2977 bp, Zea Mays
taaaaatctcgcctcacctctcgcagtccagccaaccccgtcgcccaccccaatctccacgcgtcgccgccgcttgccggcgagtctattcccctccgtcacgccgccgaggctacccggaccccgcagcggttcggataagactgccgcccgccgtccgccacctgccacccgccctcctttgactcccactactctcggccccgggaccgcttcggcctggatctagggttgtgtggggaggggttctggaagccttggccgcgatgggcgagtcagacgatgacgcccgcaccttcaaggtcgttttcaccaccaccggagaggagcagttccgggagctcgtgagggagaagctgcgcggattcaggaggggtctggacgacaccctcgtggattatgttaccatcatgctcaagaatggaaaaagtaaggatcatgccagtgaggaactccatgtatttctaggggatgatactgcagtattcatttcctggttgtggggccatctttcttcaaatatgcacttatatgtgcaaccacaagaacgaactcgggaggttaaggatgatgaggcccccaaagaagtatctggaagagaaaaatcatcagatgtgctcccgagaagcaaacatcaaactcattctgggcacacaattgaatcaagtgaagctactagtaggagacggagtaaccgggaatggaaagggattggtcggaagggtaatgaaaaatttccgcttcgaaatgtactaactgatattcttcatggggaggacaaaagatcgcaaaagtccaatgaagtacgaccccctccatcaaaacaacagaacgacaggaagcgtgaaagggatgatgagacacatcaaacaaagaaggactcctcatcacgctccatgcttggtgatggtgcttcccgtcgtcttctacagtttgctgtccgagatgctgtaaaagctgtacagccaaccagtacctctgctgaaccagcatccaagcgcctgtgctctgtggtcgccactacttctacagagcacatgcgtgataggagatcagaaagatctcaggactacctgaacgatagaagatcagaaagatctcaagacaacttgagtgacagaagatcagaaagaactaggccaatgctacaggtacatggagctgctttagctcttagagctgcagcggaagctgctgcagattctgcaaaggttagatctactggaagtgttttcaagcgattgggtcaagggaatgttgtgaaacagccatctcgttctcgtgaagagaagagagattatgaagattttgagccagttacgatcgcagatgaacatgattctgatcaatatgttaataatgaggaatccgaagaggaatctggagagctaaccatggcagatagggtagctggaagtggaatgtatgttgattcgagctctgaagatgatatggaccgagatgagggtattacaagataccaaacttctctttcacatgacgatactttctcaccatttgcagagaagaaaactgtatcggcaccatgcagtgttgaactagagactaatgcaataagaccttcaagtgtgaatgacgaggaacaacctgttccttcaacaccaacagcaagtaaagctgtcgctatttctgttgatgtaaatatggtggagcctcccagttatgcaacaccaaaagatgttcatgttgtggagaagccttatgttgcacccatgaattcaaatgccgccagtattgctaccaatgccaaagaattaggtcatgctgaagttcaaaaggattctcagcggtctgcaccatctggttcactttgctgccaccaaggactcattatctcgccatttcaacaagtttggtgcagtgctgaaagtagtcattgtcactaatgccgcaacgggccagccaacagggtctgcctatgtagagttcttacacaaagaatcagctgaacgagcattgtcgttgaatggcacatcatttatgacccgtattctcaaggttgtccggcgaagttctcatgaagcagctcacttttatggttggcctggtagtggacggtcatcaatatatgggaggcatggtaggatggcatacccaagagctgttatccctggtggttcctttagagggcgtgctccgatgaaagctggtgctagaagtttacagtggaaacgggagccttcaggcactgattcaagtgcaggtgcgaaaactgacatgagtgtggcattttcctctgaacaggtgcttccacgtgcaacataggggagtatgttaccgctgagctgatataatgagaaccaagtggtatcccactcgtcgctcctggccctaatggctgaatatggacagcaagctgagaagattgttccttcctgctgcactgtaaaagaaaagtacaaaaaaaatgaaaaatataaaaatctaaaacaagagattctgggggagtttggcatcagattatggctatcattctggtgactggatttggtcctcttggccatatgcgagtaggctgacagcctgagcaattttctatggactccagcaatctgaaagaggattcacattcaaaataatcagagcttggatgtattggatggaagatgcttttcaagtagaacaagatgtgcagattttggaccaggtatttagtgacaatccgggcgtcatcgatgtaagcctcaactgtatagaagtaacctatctatctgtacccttgtgtgaatcaatctccttcccaacaaaaaggggggaaaaggcagcacaaaaaaatatgttctcttttgttttttcctctccatgaactgttttatttattgtactaatatagctgattattcagttggacattcatttttttgtcaaacagtttaacaatactttttttcctgtgtggtctacaattagattgaccgtgctacctgacttgcatttccaccatttcatgttttaa

SEQ ID NO: 41486 - DNA, 3571 bp, Zea Mays
taaaaatctcgcctcacctctcgcagtccagccaaccccgtcgcccaccccaatctccacgcgtcgccgccgcttgccggcgagtctattcccctccgtcacgccgccgaggctacccggaccccgcagcggttcggataagactgccgcccgccgtccgccacctgccacccgccctcctttgactcccactactctcggccccgggaccgcttcggcctggatctagggttgtgtggggaggggttctggaagccttggccgcgatgggcgagtcagacgatgacgcccgcaccttcaaggtcgttttcaccaccaccggagaggagcagttccgggagctcgtgagggagaagctgcgcggattcaggaggggtctggacgacaccctcgtgttggtgctctttccttagaagcacgggagaactaaagaaacgagaaagagataaggaagggagagaaagagaagggagagggccagcaccagaacttggcggcgtggcacagcaccagatctgggtggcggcgcgacacagcaccagtaggtggtggtgcggcgagccagggcgcgacgcagcgaacaggcaagggcgcggcgcgcgcgcgacaagccagcaggcaagggcgggcaagcaggcaagggcgagcaagcaggcaatggcgcacgacgatcaagcaggattatgttaccatcatgctcaagaatggaaaaagtaaggatcatgccagtgaggaactccatgtatttctaggggatgatactgcagtattcatttcctggttgtggggccatctttcttcaaatatgcacttatatgtgcaaccacaagaacgaactcgggaggttaaggatgatgaggcccccaaagaagtatctggaagagaaaaatcatcagatgtgctcccgagaagcaaacatcaaactcattctgggcacacaattgaatcaagtgaagctactagtaggagacggagtaaccgggaatggaaagggattggtcggaagggtaatgaaaaatttccgcttcgaaatgtactaactgatattcttcatggggaggacaaaagatcgcaaaagtccaatgaagtacgaccccctccatcaaaacaacagaacgacaggaagcgtgaaagggatgatgagacacatcaaacaaagaaggactcctcatcacgctccatgcttggtgatggtgcttcccgtcgtcttctacagtttgctgtccgagatgctgtaaaagctgtacagccaaccagtacctctgctgaaccagcatccaagcgcctgtgctctgtggtcgccactacttctacagagcacatgcgtgataggagatcagaaagatctcaggactacctgaacgatagaagatcagaaagatctcaagacaacttgagtgacagaagatcagaaagaactaggccaatgctacaggtacatggagctgctttagctcttagagctgcagcggaagctgctgcagattctgcaaaggttagatctactggaagtgttttcaagcgattgggtcaagggaatgttgtgaaacagccatctcgttctcgtgaagagaagagagattatgaagattttgagccagttacgatcgcagatgaacatgattctgatcaatatgttaataatgaggaatccgaagaggaatctggagagctaaccatggcagatagggtagctggaagtggaatgtatgttgattcgagctctgaagatgatatggaccgagatgagggtattacaagataccaaacttctctttcacatgacgatactttctcaccatttgcagagaagaaaactgtatcggcaccatgcagtgttgaactagagactaatgcaataagaccttcaagtgtgaatgacgaggaacaacctgttccttcaacaccaacagcaagtaaagctgtcgctatttctgttgatgtaaatatggtggagcctcccagttatgcaacaccaaaagatgttcatgttgtggagaagccttatgttgcacccatgaattcaaatgccgccagtattgctaccaatgccaaagaattaggtcatgctgaagttcaaaaggattctcagcggtctgcaccatctgttccggtttcatatagcacagcgcatccgatggaggatgcagattcaagaacgctttatgttaacaatgttcactttgctgccaccaaggactcattatctcgccatttcaacaagtttggtgcagtgctgaaagtagtcattgtcactaatgccgcaacgggccagccaacagggtttaatgaaaagaaccacatcatcaacataaatggagattctattattgacattgttgcaactcaaaggatgcagaagacccatatgttcagccttatcaaacagactgcaaaggacatcaattactaagataaaaagcatgggcgagaggggatcaccctggcgtaacccccctacaatgcttaatagaatctctcggatatccattaagaagcacttgagtcgaagaagaatcaagcaggtctgcctatgtagagttcttacacaaagaatcagctgaacgagcattgtcgttgaatggcacatcatttatgacccgtattctcaaggttgtccggcgaagttctcatgaagcagctcacttttatggttggcctggtagtggacggtcatcaatatatgggaggcatggtaggatggcatacccaagagctgttatccctggtggttcctttagagggcgtgctccgatgaaagctggtgctagaagtttacagtggaaacgggagccttcaggcactgattcaagtgcaggtgcgaaaactgacatgagtgtggcattttcctctgaacaggtgcttccacgtgcaacataggggagtatgttaccgctgagctgatataatgagaaccaagtggtatcccactcgtcgctcctggccctaatggctgaatatggacagcaagctgagaagattgttccttcctgctgcactgtaaaagaaaagtacaaaaaaaatgaaaaatataaaaatctaaaacaagagattctgggggagtttggcatcagattatggctatcattctggtgactggatttggtcctcttggccatatgcgagtaggctgacagcctgagcaattttctatggactccagcaatctgaaagaggattcacattcaaaataatcagagcttggatgtattggatggaagatgcttttcaagtagaacaagatgtgcagattttggaccaggtatttagtgacaatccgggcgtcatcgatgtaagcctcaactgtatagaagtaacctatctatctgtacccttgtgtgaatcaatctccttcccaacaaaaaggggggaaaaggcagcacaaaaaaatatgttctcttttgttttttcctctccatgaactgttttatttattgtactaatatagctgattattcagttggacattcatttttttgtcaaacagtttaacaatactttttttcctgtgtggtctacaattagattgaccgtgctacctgacttgcatttccaccatttcatgttttaa

SEQ ID NO: 41487 - DNA, 5193 bp, Zea Mays
gtacgatttacttctctcaccccggctcgctagattctggtcttagcatttgatttcggttgtttggggacttgggttctctgcagctgtagattctggtcttagcatttagcatttgatttagatggaacttaattggcacttaacagtatgtaaaggactagctagaattcaagatggtttggcaagttacgcgactgtggactgtattttttgttcagtgccaccatgcatacagtagcggacccaccgcttgatcatagcctgtgcaagtctcactgagctaatcaaaactcgacctgcgggggtaagacagcccccgggcattgtattaagaagaagaccttctcacacaggtcgagaaaacctccgaacccctgccccacccgtacacagcggcatcgaagcccatgtgagaacgaccacaaccggggctgagccttagacctatgctttagcgtgggacagaattcaggatttttttaaccacaacctgaaattctctcccacggagagtcgaacccaggacctgaggagtgctactcagacggtcagaccacctaaccaactcagctagaggccctttcgcctcactgagccaatcagatcatgcgttttggagctcatagcaaaacatgctgcaatagagacccaaggatgcactggcatcacaaccctgggttcagtgcgcatacaacacctattgctggaagcaatcagtagtctaatgtcgttggatatcatgggcctgcagcttctgctatgtgatggctgcagtcttcgtttgtttaggctagacatgcatgcgggctggatcgtgactggacaccaaggcacattgcttgccgcaaagttcagccactaagataccgactttgcgatcaaatgttccgtgggcacaacagacttggctgcaaaacccgatggatctgctacacctatactcctatagcatctctctatttcatggaaaaagcttctatgcatccaaacaaaacacatgtgtggttgtttcatgcaacctcccggccttgttttggtgccgggccttagaccagtgcttggcgtgggacagacgaggggatttttttaaccacagtctgaaatttgctcccacgggggagtcgaacccaggacctgagcagtgctactaagaccacctaaccaactcagctagaggccctttcgccccccacccctaatgacctcctcctttcaactggtctcgattatgtagacctcctgctgctgctgcctgtgtgtgtctgtcatctactaattaattaactcgctgcccatcgtcttcactggactagaaaccataaggtcaaatccaagcggcaacggcagtaaggacatggcgacgagctgctgctgctggtgcatgttgtctgtggacatggacgacgatgtggcagtggtgcaagatagcttgccatcgttgatggctcgacgtgccatgcggcggctgtgaggagctgatacggaggggtgcgttgtcgtgcatcatgtcaataaagacgctgccatccacaaaggcggaggggatgatgtgctcgaggaggcgtgggatccatgatccagaggtagtacgtgaggtcctcgtctttatccaccacggaggagcgatggtcggggttctgttgccagcacctgcctcatccgcaaacttagtttctatctgtgcgcgcggaggtagagcgggcagaggagatgacgtgcggatgtctgtggcgccgatcgtggtattggtttgatagaaacagtagctggctggttcttgcgggttgttgcaggttcttactgttgtcgcgcgggcttgagcaatcaaaagatgtcgggccacaatgaagctgcagctctctcgcattggtcactaatgctgattttgtgggttgggttggtgggtacgttaacagcctgccccgcctgcacaagtttaggatgactgctatctgttttttttccaacttaatgtgctcactatgtacacttagatgcttataggtgagttcaactagtgtaatggactggtgcactattatgcaccaaactgttgtgtacggtatatactacatacttatgaagcctcttctcaaactgcgaatcaggatgaatatggaatgtttgtctaattgaagcatgccttagtttgtactggttcagtaactatcatgttacttggtgaccatttttatcaaactatagaatggatcttatttgttgccgcttcactacaacaacaacaaagtctttcagtcccaagcaagttggggtaagctagagttgaaacccaacatttgttgctgcttcactagtcaatatttatagttgggcatgcaaactttgtgaattagctgtctcactctcatgtgaacaaatgtacattacaaatcacaatcatcgaattgtttacccagttcaaaagtattgcatgttatcggtggtgttttttatgcaactgaaatgtaatacttatttcaagcacggtataccataccatccttgcatgttaacatatgctattgctacgagtctttgctgcattttccattcattacaattgcactattcatctacttttagccttaaatttatactattagtcaagagcacccaaacttccctaaaaacagtgctgtatgcagtttcactggtggaacaaagggaacctatgaaagaatctgccatctgccattatgcttttccctgtctttagtgaacaatcctggcctggtctttgtcttttctgaggaagcaccacattacgtgaattacattgtttatatgtatacttcctctgattgaaaatggatgtcattttatacttcctaacttttttaaaaaatgaccccactttccagtgtactataaataaagggcaacaaggtcattctactaacttccttaatccttgtgcgcaactctgaaatagcattgcattttgatttacggggagcaatacttttaattgccgtgttccatggttccatggtttaaaaggtgtcgcctaggcgacgcctaggcgtccaggcaccaaatttttctgggcgtcggcctcgccttgccctggtcgactaaggcgtccgactaggcgttgtaggcgttgccctggacgccttagccgttgaatagaaccgcccaatagtgtcttctcttctaaaaatctggcgccttccctggaaagttggtgctctttccttagaagcacgggagaactaaagaaacgagaaagagataaggaagggagagaaagagaagggagagggccagcaccagaacttggcggcgtggcacagcaccagatctgggtggcggcgcgacacagcaccagtaggtggtggtgcggcgagccagggcgcgacgcagcgaacaggcaagggcgcggcgcgcgcgcgacaagccagcaggcaagggcgggcaagcaggcaagggcgagcaagcaggcaatggcgcacgacgatcaagcaggattatgttaccatcatgctcaagaatggaaaaagtaaggatcatgccagtgaggaactccatgtatttctaggggatgatactgcagtattcatttcctggttgtggggccatctttcttcaaatatgcacttatatgtgcaaccacaagaacgaactcgggaggttaaggatgatgaggcccccaaagaagtatctggaagagaaaaatcatcagatgtgctcccgagaagcaaacatcaaactcattctgggcacacaattgaatcaagtgaagctactagtaggagacggagtaaccgggaatggaaagggattggtcggaagggtaatgaaaaatttccgcttcgaaatgtactaactgatattcttcatggggaggacaaaagatcgcaaaagtccaatgaagtacgaccccctccatcaaaacaacagaacgacaggaagcgtgaaagggatgatgagacacatcaaacaaagaaggactcctcatcacgctccatgcttggtgatggtgcttcccgtcgtcttctacagtttgctgtccgagatgctgtaaaagctgtacagccaaccagtacctctgctgaaccagcatccaagcgcctgtgctctgtggtcgccactacttctacagagcacatgcgtgataggagatcagaaagatctcaggactacctgaacgatagaagatcagaaagatctcaagacaacttgagtgacagaagatcagaaagaactaggccaatgctacaggtacatggagctgctttagctcttagagctgcagcggaagctgctgcagattctgcaaaggttagatctactggaagtgttttcaagcgattgggtcaagggaatgttgtgaaacagccatctcgttctcgtgaagagaagagagattatgaagattttgagccagttacgatcgcagatgaacatgattctgatcaatatgttaataatgaggaatccgaagaggaatctggagagctaaccatggcagatagggtagctggaagtggaatgtatgttgattcgagctctgaagatgatatggaccgagatgagggtattacaagataccaaacttctctttcacatgacgatactttctcaccatttgcagagaagaaaactgtatcggcaccatgcagtgttgaactagagactaatgcaataagaccttcaagtgtgaatgacgaggaacaacctgttccttcaacaccaacagcaagtaaagctgtcgctatttctgttgatgtaaatatggtggagcctcccagttatgcaacaccaaaagatgttcatgttgtggagaagccttatgttgcacccatgaattcaaatgccgccagtattgctaccaatgccaaagaattaggtcatgctgaagttcaaaaggattctcagcggtctgcaccatctgttccggtttcatatagcacagcgcatccgatggaggatgcagattcaagaacgctttatgttaacaatgttcactttgctgccaccaaggactcattatctcgccatttcaacaagtttggtgcagtgctgaaagtagtcattgtcactaatgccgcaacgggccagccaacagggtttaatgaaaagaaccacatcatcaacataaatggagattctattattgacattgttgcaactcaaaggatgcagaagacccatatgttcagccttatcaaacagactgcaaaggac

SEQ ID NO: 41488 - DNA, 6121 bp, Zea Mays
gtacgatttacttctctcaccccggctcgctagattctggtcttagcatttgatttcggttgtttggggacttgggttctctgcagctgtagattctggtcttagcatttagcatttgatttagatggaacttaattggcacttaacagtatgtaaaggactagctagaattcaagatggtttggcaagttacgcgactgtggactgtattttttgttcagtgccaccatgcatacagtagcggacccaccgcttgatcatagcctgtgcaagtctcactgagctaatcaaaactcgacctgcgggggtaagacagcccccgggcattgtattaagaagaagaccttctcacacaggtcgagaaaacctccgaacccctgccccacccgtacacagcggcatcgaagcccatgtgagaacgaccacaaccggggctgagccttagacctatgctttagcgtgggacagaattcaggatttttttaaccacaacctgaaattctctcccacggagagtcgaacccaggacctgaggagtgctactcagacggtcagaccacctaaccaactcagctagaggccctttcgcctcactgagccaatcagatcatgcgttttggagctcatagcaaaacatgctgcaatagagacccaaggatgcactggcatcacaaccctgggttcagtgcgcatacaacacctattgctggaagcaatcagtagtctaatgtcgttggatatcatgggcctgcagcttctgctatgtgatggctgcagtcttcgtttgtttaggctagacatgcatgcgggctggatcgtgactggacaccaaggcacattgcttgccgcaaagttcagccactaagataccgactttgcgatcaaatgttccgtgggcacaacagacttggctgcaaaacccgatggatctgctacacctatactcctatagcatctctctatttcatggaaaaagcttctatgcatccaaacaaaacacatgtgtggttgtttcatgcaacctcccggccttgttttggtgccgggccttagaccagtgcttggcgtgggacagacgaggggatttttttaaccacagtctgaaatttgctcccacgggggagtcgaacccaggacctgagcagtgctactaagaccacctaaccaactcagctagaggccctttcgccccccacccctaatgacctcctcctttcaactggtctcgattatgtagacctcctgctgctgctgcctgtgtgtgtctgtcatctactaattaattaactcgctgcccatcgtcttcactggactagaaaccataaggtcaaatccaagcggcaacggcagtaaggacatggcgacgagctgctgctgctggtgcatgttgtctgtggacatggacgacgatgtggcagtggtgcaagatagcttgccatcgttgatggctcgacgtgccatgcggcggctgtgaggagctgatacggaggggtgcgttgtcgtgcatcatgtcaataaagacgctgccatccacaaaggcggaggggatgatgtgctcgaggaggcgtgggatccatgatccagaggtagtacgtgaggtcctcgtctttatccaccacggaggagcgatggtcggggttctgttgccagcacctgcctcatccgcaaacttagtttctatctgtgcgcgcggaggtagagcgggcagaggagatgacgtgcggatgtctgtggcgccgatcgtggtattggtttgatagaaacagtagctggctggttcttgcgggttgttgcaggttcttactgttgtcgcgcgggcttgagcaatcaaaagatgtcgggccacaatgaagctgcagctctctcgcattggtcactaatgctgattttgtgggttgggttggtgggtacgttaacagcctgccccgcctgcacaagtttaggatgactgctatctgttttttttccaacttaatgtgctcactatgtacacttagatgcttataggtgagttcaactagtgtaatggactggtgcactattatgcaccaaactgttgtgtacggtatatactacatacttatgaagcctcttctcaaactgcgaatcaggatgaatatggaatgtttgtctaattgaagcatgccttagtttgtactggttcagtaactatcatgttacttggtgaccatttttatcaaactatagaatggatcttatttgttgccgcttcactacaacaacaacaaagtctttcagtcccaagcaagttggggtaagctagagttgaaacccaacatttgttgctgcttcactagtcaatatttatagttgggcatgcaaactttgtgaattagctgtctcactctcatgtgaacaaatgtacattacaaatcacaatcatcgaattgtttacccagttcaaaagtattgcatgttatcggtggtgttttttatgcaactgaaatgtaatacttatttcaagcacggtataccataccatccttgcatgttaacatatgctattgctacgagtctttgctgcattttccattcattacaattgcactattcatctacttttagccttaaatttatactattagtcaagagcacccaaacttccctaaaaacagtgctgtatgcagtttcactggtggaacaaagggaacctatgaaagaatctgccatctgccattatgcttttccctgtctttagtgaacaatcctggcctggtctttgtcttttctgaggaagcaccacattacgtgaattacattgtttatatgtatacttcctctgattgaaaatggatgtcattttatacttcctaacttttttaaaaaatgaccccactttccagtgtactataaataaagggcaacaaggtcattctactaacttccttaatccttgtgcgcaactctgaaatagcattgcattttgatttacggggagcaatacttttaattgccgtgttccatggttccatggtttaaaaggtgtcgcctaggcgacgcctaggcgtccaggcaccaaatttttctgggcgtcggcctcgccttgccctggtcgactaaggcgtccgactaggcgttgtaggcgttgccctggacgccttagccgttgaatagaaccgcccaatagtgtcttctcttctaaaaatctggcgccttccctggaaagttggtgctctttccttagaagcacgggagaactaaagaaacgagaaagagataaggaagggagagaaagagaagggagagggccagcaccagaacttggcggcgtggcacagcaccagatctgggtggcggcgcgacacagcaccagtaggtggtggtgcggcgagccagggcgcgacgcagcgaacaggcaagggcgcggcgcgcgcgcgacaagccagcaggcaagggcgggcaagcaggcaagggcgagcaagcaggcaatggcgcacgacgatcaagcaggattatgttaccatcatgctcaagaatggaaaaagtaaggatcatgccagtgaggaactccatgtatttctaggggatgatactgcagtattcatttcctggttgtggggccatctttcttcaaatatgcacttatatgtgcaaccacaagaacgaactcgggaggttaaggatgatgaggcccccaaagaagtatctggaagagaaaaatcatcagatgtgctcccgagaagcaaacatcaaactcattctgggcacacaattgaatcaagtgaagctactagtaggagacggagtaaccgggaatggaaagggattggtcggaagggtaatgaaaaatttccgcttcgaaatgtactaactgatattcttcatggggaggacaaaagatcgcaaaagtccaatgaagtacgaccccctccatcaaaacaacagaacgacaggaagcgtgaaagggatgatgagacacatcaaacaaagaaggactcctcatcacgctccatgcttggtgatggtgcttcccgtcgtcttctacagtttgctgtccgagatgctgtaaaagctgtacagccaaccagtacctctgctgaaccagcatccaagcgcctgtgctctgtggtcgccactacttctacagagcacatgcgtgataggagatcagaaagatctcaggactacctgaacgatagaagatcagaaagatctcaagacaacttgagtgacagaagatcagaaagaactaggccaatgctacaggtacatggagctgctttagctcttagagctgcagcggaagctgctgcagattctgcaaaggttagatctactggaagtgttttcaagcgattgggtcaagggaatgttgtgaaacagccatctcgttctcgtgaagagaagagagattatgaagattttgagccagttacgatcgcagatgaacatgattctgatcaatatgttaataatgaggaatccgaagaggaatctggagagctaaccatggcagatagggtagctggaagtggaatgtatgttgattcgagctctgaagatgatatggaccgagatgagggtattacaagataccaaacttctctttcacatgacgatactttctcaccatttgcagagaagaaaactgtatcggcaccatgcagtgttgaactagagactaatgcaataagaccttcaagtgtgaatgacgaggaacaacctgttccttcaacaccaacagcaagtaaagctgtcgctatttctgttgatgtaaatatggtggagcctcccagttatgcaacaccaaaagatgttcatgttgtggagaagccttatgttgcacccatgaattcaaatgccgccagtattgctaccaatgccaaagaattaggtcatgctgaagttcaaaaggattctcagcggtctgcaccatctgttccggtttcatatagcacagcgcatccgatggaggatgcagattcaagaacgctttatgttaacaatgttcactttgctgccaccaaggactcattatctcgccatttcaacaagtttggtgcagtgctgaaagtagtcattgtcactaatgccgcaacgggccagccaacagggtctgcctatgtagagttcttacacaaagaatcagctgaacgagcattgtcgttgaatggcacatcatttatgacccgtattctcaaggttgtccggcgaagttctcatgaagcagctcacttttatggttggcctggtagtggacggtcatcaatatatgggaggcatggtaggatggcatacccaagagctgttatccctggtggttcctttagagggcgtgctccgatgaaagctggtgctagaagtttacagtggaaacgggagccttcaggcactgattcaagtgcaggtgcgaaaactgacatgagtgtggcattttcctctgaacaggtgcttccacgtgcaacataggggagtatgttaccgctgagctgatataatgagaaccaagtggtatcccactcgtcgctcctggccctaatggctgaatatggacagcaagctgagaagattgttccttcctgctgcactgtaaaagaaaagtacaaaaaaaatgaaaaatataaaaatctaaaacaagagattctgggggagtttggcatcagattatggctatcattctggtgactggatttggtcctcttggccatatgcgagtaggctgacagcctgagcaattttctatggactccagcaatctgaaagaggattcacattcaaaataatcagagcttggatgtattggatggaagatgcttttcaagtagaacaagatgtgcagattttggaccaggtatttagtgacaatccgggcgtcatcgatgtaagcctcaactgtatagaagtaacctatctatctgtacccttgtgtgaatcaatctccttcccaacaaaaaggggggaaaaggcagcacaaaaaaatatgttctcttttgttttttcctctccatgaactgttttatttattgtactaatatagctgattattcagttggacattcatttttttgtcaaacagtttaacaatactttttttcctgtgtggtctacaattagattgaccgtgctacctgacttgcatttccaccatttcatgttttaa

SEQ ID NO: 41489 - DNA, 6126 bp, Zea Mays
gtacgatttacttctctcaccccggctcgctagattctggtcttagcatttgatttcggttgtttggggacttgggttctctgcagctgtagattctggtcttagcatttagcatttgatttagatggaacttaattggcacttaacagtatgtaaaggactagctagaattcaagatggtttggcaagttacgcgactgtggactgtattttttgttcagtgccaccatgcatacagtagcggacccaccgcttgatcatagcctgtgcaagtctcactgagctaatcaaaactcgacctgcgggggtaagacagcccccgggcattgtattaagaagaagaccttctcacacaggtcgagaaaacctccgaacccctgccccacccgtacacagcggcatcgaagcccatgtgagaacgaccacaaccggggctgagccttagacctatgctttagcgtgggacagaattcaggatttttttaaccacaacctgaaattctctcccacggagagtcgaacccaggacctgaggagtgctactcagacggtcagaccacctaaccaactcagctagaggccctttcgcctcactgagccaatcagatcatgcgttttggagctcatagcaaaacatgctgcaatagagacccaaggatgcactggcatcacaaccctgggttcagtgcgcatacaacacctattgctggaagcaatcagtagtctaatgtcgttggatatcatgggcctgcagcttctgctatgtgatggctgcagtcttcgtttgtttaggctagacatgcatgcgggctggatcgtgactggacaccaaggcacattgcttgccgcaaagttcagccactaagataccgactttgcgatcaaatgttccgtgggcacaacagacttggctgcaaaacccgatggatctgctacacctatactcctatagcatctctctatttcatggaaaaagcttctatgcatccaaacaaaacacatgtgtggttgtttcatgcaacctcccggccttgttttggtgccgggccttagaccagtgcttggcgtgggacagacgaggggatttttttaaccacagtctgaaatttgctcccacgggggagtcgaacccaggacctgagcagtgctactaagaccacctaaccaactcagctagaggccctttcgccccccacccctaatgacctcctcctttcaactggtctcgattatgtagacctcctgctgctgctgcctgtgtgtgtctgtcatctactaattaattaactcgctgcccatcgtcttcactggactagaaaccataaggtcaaatccaagcggcaacggcagtaaggacatggcgacgagctgctgctgctggtgcatgttgtctgtggacatggacgacgatgtggcagtggtgcaagatagcttgccatcgttgatggctcgacgtgccatgcggcggctgtgaggagctgatacggaggggtgcgttgtcgtgcatcatgtcaataaagacgctgccatccacaaaggcggaggggatgatgtgctcgaggaggcgtgggatccatgatccagaggtagtacgtgaggtcctcgtctttatccaccacggaggagcgatggtcggggttctgttgccagcacctgcctcatccgcaaacttagtttctatctgtgcgcgcggaggtagagcgggcagaggagatgacgtgcggatgtctgtggcgccgatcgtggtattggtttgatagaaacagtagctggctggttcttgcgggttgttgcaggttcttactgttgtcgcgcgggcttgagcaatcaaaagatgtcgggccacaatgaagctgcagctctctcgcattggtcactaatgctgattttgtgggttgggttggtgggtacgttaacagcctgccccgcctgcacaagtttaggatgactgctatctgttttttttccaacttaatgtgctcactatgtacacttagatgcttataggtgagttcaactagtgtaatggactggtgcactattatgcaccaaactgttgtgtacggtatatactacatacttatgaagcctcttctcaaactgcgaatcaggatgaatatggaatgtttgtctaattgaagcatgccttagtttgtactggttcagtaactatcatgttacttggtgaccatttttatcaaactatagaatggatcttatttgttgccgcttcactacaacaacaacaaagtctttcagtcccaagcaagttggggtaagctagagttgaaacccaacatttgttgctgcttcactagtcaatatttatagttgggcatgcaaactttgtgaattagctgtctcactctcatgtgaacaaatgtacattacaaatcacaatcatcgaattgtttacccagttcaaaagtattgcatgttatcggtggtgttttttatgcaactgaaatgtaatacttatttcaagcacggtataccataccatccttgcatgttaacatatgctattgctacgagtctttgctgcattttccattcattacaattgcactattcatctacttttagccttaaatttatactattagtcaagagcacccaaacttccctaaaaacagtgctgtatgcagtttcactggtggaacaaagggaacctatgaaagaatctgccatctgccattatgcttttccctgtctttagtgaacaatcctggcctggtctttgtcttttctgaggaagcaccacattacgtgaattacattgtttatatgtatacttcctctgattgaaaatggatgtcattttatacttcctaacttttttaaaaaatgaccccactttccagtgtactataaataaagggcaacaaggtcattctactaacttccttaatccttgtgcgcaactctgaaatagcattgcattttgatttacggggagcaatacttttaattgccgtgttccatggttccatggtttaaaaggtgtcgcctaggcgacgcctaggcgtccaggcaccaaatttttctgggcgtcggcctcgccttgccctggtcgactaaggcgtccgactaggcgttgtaggcgttgccctggacgccttagccgttgaatagaaccgcccaatagtgtcttctcttctaaaaatctggcgccttccctggaaagttggtgctctttccttagaagcacgggagaactaaagaaacgagaaagagataaggaagggagagaaagagaagggagagggccagcaccagaacttggcggcgtggcacagcaccagatctgggtggcggcgcgacacagcaccagtaggtggtggtgcggcgagccagggcgcgacgcagcgaacaggcaagggcgcggcgcgcgcgcgacaagccagcaggcaagggcgggcaagcaggcaagggcgagcaagcaggcaatggcgcacgacgatcaagcagtgcaggattatgttaccatcatgctcaagaatggaaaaagtaaggatcatgccagtgaggaactccatgtatttctaggggatgatactgcagtattcatttcctggttgtggggccatctttcttcaaatatgcacttatatgtgcaaccacaagaacgaactcgggaggttaaggatgatgaggcccccaaagaagtatctggaagagaaaaatcatcagatgtgctcccgagaagcaaacatcaaactcattctgggcacacaattgaatcaagtgaagctactagtaggagacggagtaaccgggaatggaaagggattggtcggaagggtaatgaaaaatttccgcttcgaaatgtactaactgatattcttcatggggaggacaaaagatcgcaaaagtccaatgaagtacgaccccctccatcaaaacaacagaacgacaggaagcgtgaaagggatgatgagacacatcaaacaaagaaggactcctcatcacgctccatgcttggtgatggtgcttcccgtcgtcttctacagtttgctgtccgagatgctgtaaaagctgtacagccaaccagtacctctgctgaaccagcatccaagcgcctgtgctctgtggtcgccactacttctacagagcacatgcgtgataggagatcagaaagatctcaggactacctgaacgatagaagatcagaaagatctcaagacaacttgagtgacagaagatcagaaagaactaggccaatgctacaggtacatggagctgctttagctcttagagctgcagcggaagctgctgcagattctgcaaaggttagatctactggaagtgttttcaagcgattgggtcaagggaatgttgtgaaacagccatctcgttctcgtgaagagaagagagattatgaagattttgagccagttacgatcgcagatgaacatgattctgatcaatatgttaataatgaggaatccgaagaggaatctggagagctaaccatggcagatagggtagctggaagtggaatgtatgttgattcgagctctgaagatgatatggaccgagatgagggtattacaagataccaaacttctctttcacatgacgatactttctcaccatttgcagagaagaaaactgtatcggcaccatgcagtgttgaactagagactaatgcaataagaccttcaagtgtgaatgacgaggaacaacctgttccttcaacaccaacagcaagtaaagctgtcgctatttctgttgatgtaaatatggtggagcctcccagttatgcaacaccaaaagatgttcatgttgtggagaagccttatgttgcacccatgaattcaaatgccgccagtattgctaccaatgccaaagaattaggtcatgctgaagttcaaaaggattctcagcggtctgcaccatctgttccggtttcatatagcacagcgcatccgatggaggatgcagattcaagaacgctttatgttaacaatgttcactttgctgccaccaaggactcattatctcgccatttcaacaagtttggtgcagtgctgaaagtagtcattgtcactaatgccgcaacgggccagccaacagggtctgcctatgtagagttcttacacaaagaatcagctgaacgagcattgtcgttgaatggcacatcatttatgacccgtattctcaaggttgtccggcgaagttctcatgaagcagctcacttttatggttggcctggtagtggacggtcatcaatatatgggaggcatggtaggatggcatacccaagagctgttatccctggtggttcctttagagggcgtgctccgatgaaagctggtgctagaagtttacagtggaaacgggagccttcaggcactgattcaagtgcaggtgcgaaaactgacatgagtgtggcattttcctctgaacaggtgcttccacgtgcaacataggggagtatgttaccgctgagctgatataatgagaaccaagtggtatcccactcgtcgctcctggccctaatggctgaatatggacagcaagctgagaagattgttccttcctgctgcactgtaaaagaaaagtacaaaaaaaatgaaaaatataaaaatctaaaacaagagattctgggggagtttggcatcagattatggctatcattctggtgactggatttggtcctcttggccatatgcgagtaggctgacagcctgagcaattttctatggactccagcaatctgaaagaggattcacattcaaaataatcagagcttggatgtattggatggaagatgcttttcaagtagaacaagatgtgcagattttggaccaggtatttagtgacaatccgggcgtcatcgatgtaagcctcaactgtatagaagtaacctatctatctgtacccttgtgtgaatcaatctccttcccaacaaaaaggggggaaaaggcagcacaaaaaaatatgttctcttttgttttttcctctccatgaactgttttatttattgtactaatatagctgattattcagttggacattcatttttttgtcaaacagtttaacaatactttttttcctgtgtggtctacaattagattgaccgtgctacctgacttgcatttccaccatttcatgttttaa

SEQ ID NO: 41490 - DNA, 4849 bp, Zea Mays
tggtctcgattatgtagacctcctgctgctgctgcctgtgtgtgtctgtcatctactaattaattaactcgctgcccatcgtcttcactggactagaaaccataaggtcaaatccaagcggcaacggcagtaaggacatggcgacgagctgctgctgctggtgcatgttgtctgtggacatggacgacgatgtggcagtggtgcaagatagcttgccatcgttgatggctcgacgtgccatgcggcggctgtgaggagctgatacggaggggtgcgttgtcgtgcatcatgtcaataaagacgctgccatccacaaaggcggaggggatgatgtgctcgaggaggcgtgggatccatgatccagaggtagtacgtgaggtcctcgtctttatccaccacggaggagcgatggtcggggttctgttgccagcacctgcctcatccgcaaacttagtttctatctgtgcgcgcggaggtagagcgggcagaggagatgacgtgcggatgtctgtggcgccgatcgtggtattggtttgatagaaacagtagctggctggttcttgcgggttgttgcaggttcttactgttgtcgcgcgggcttgagcaatcaaaagatgtcgggccacaatgaagctgcagctctctcgcattggtcactaatgctgattttgtgggttgggttggtgggtacgttaacagcctgccccgcctgcacaagtttaggatgactgctatctgttttttttccaacttaatgtgctcactatgtacacttagatgcttataggtgagttcaactagtgtaatggactggtgcactattatgcaccaaactgttgtgtacggtatatactacatacttatgaagcctcttctcaaactgcgaatcaggatgaatatggaatgtttgtctaattgaagcatgccttagtttgtactggttcagtaactatcatgttacttggtgaccatttttatcaaactatagaatggatcttatttgttgccgcttcactacaacaacaacaaagtctttcagtcccaagcaagttggggtaagctagagttgaaacccaacatttgttgctgcttcactagtcaatatttatagttgggcatgcaaactttgtgaattagctgtctcactctcatgtgaacaaatgtacattacaaatcacaatcatcgaattgtttacccagttcaaaagtattgcatgttatcggtggtgttttttatgcaactgaaatgtaatacttatttcaagcacggtataccataccatccttgcatgttaacatatgctattgctacgagtctttgctgcattttccattcattacaattgcactattcatctacttttagccttaaatttatactattagtcaagagcacccaaacttccctaaaaacagtgctgtatgcagtttcactggtggaacaaagggaacctatgaaagaatctgccatctgccattatgcttttccctgtctttagtgaacaatcctggcctggtctttgtcttttctgaggaagcaccacattacgtgaattacattgtttatatgtatacttcctctgattgaaaatggatgtcattttatacttcctaacttttttaaaaaatgaccccactttccagtgtactataaataaagggcaacaaggtcattctactaacttccttaatccttgtgcgcaactctgaaatagcattgcattttgatttacggggagcaatacttttaattgccgtgttccatggttccatggtttaaaaggtgtcgcctaggcgacgcctaggcgtccaggcaccaaatttttctgggcgtcggcctcgccttgccctggtcgactaaggcgtccgactaggcgttgtaggcgttgccctggacgccttagccgttgaatagaaccgcccaatagtgtcttctcttctaaaaatctggcgccttccctggaaagttggtgctctttccttagaagcacgggagaactaaagaaacgagaaagagataaggaagggagagaaagagaagggagagggccagcaccagaacttggcggcgtggcacagcaccagatctgggtggcggcgcgacacagcaccagtaggtggtggtgcggcgagccagggcgcgacgcagcgaacaggcaagggcgcggcgcgcgcgcgacaagccagcaggcaagggcgggcaagcaggcaagggcgagcaagcaggcaatggcgcacgacgatcaagcaggattatgttaccatcatgctcaagaatggaaaaagtaaggatcatgccagtgaggaactccatgtatttctaggggatgatactgcagtattcatttcctggttgtggggccatctttcttcaaatatgcacttatatgtgcaaccacaagaacgaactcgggaggttaaggatgatgaggcccccaaagaagtatctggaagagaaaaatcatcagatgtgctcccgagaagcaaacatcaaactcattctgggcacacaattgaatcaagtgaagctactagtaggagacggagtaaccgggaatggaaagggattggtcggaagggtaatgaaaaatttccgcttcgaaatgtactaactgatattcttcatggggaggacaaaagatcgcaaaagtccaatgaagtacgaccccctccatcaaaacaacagaacgacaggaagcgtgaaagggatgatgagacacatcaaacaaagaaggactcctcatcacgctccatgcttggtgatggtgcttcccgtcgtcttctacagtttgctgtccgagatgctgtaaaagctgtacagccaaccagtacctctgctgaaccagcatccaagcgcctgtgctctgtggtcgccactacttctacagagcacatgcgtgataggagatcagaaagatctcaggactacctgaacgatagaagatcagaaagatctcaagacaacttgagtgacagaagatcagaaagaactaggccaatgctacaggtacatggagctgctttagctcttagagctgcagcggaagctgctgcagattctgcaaaggttagatctactggaagtgttttcaagcgattgggtcaagggaatgttgtgaaacagccatctcgttctcgtgaagagaagagagattatgaagattttgagccagttacgatcgcagatgaacatgattctgatcaatatgttaataatgaggaatccgaagaggaatctggagagctaaccatggcagatagggtagctggaagtggaatgtatgttgattcgagctctgaagatgatatggaccgagatgagggtattacaagataccaaacttctctttcacatgacgatactttctcaccatttgcagagaagaaaactgtatcggcaccatgcagtgttgaactagagactaatgcaataagaccttcaagtgtgaatgacgaggaacaacctgttccttcaacaccaacagcaagtaaagctgtcgctatttctgttgatgtaaatatggtggagcctcccagttatgcaacaccaaaagatgttcatgttgtggagaagccttatgttgcacccatgaattcaaatgccgccagtattgctaccaatgccaaattccggtttcatatagcacagcgcatccgatggaggatgcagattcaagaacgctttatgttaacaatgttcactttgctgccaccaaggactcattatctcgccatttcaacaagtttggtgcagtgctgaaagtagtcattgtcactaatgccgcaacgggccagccaacagggtctgcctatgtagagttcttacacaaagaatcagctgaacgagcattgtcgttgaatggcacatcatttatgacccgtattctcaaggttgtccggcgaagttctcatgaagcagctcacttttatggttggcctggtagtggacggtcatcaatatatgggaggcatggtaggatggcatacccaagagctgttatccctggtggttcctttagagggcgtgctccgatgaaagctggtgctagaagtttacagtggaaacgggagccttcaggcactgattcaagtgcaggtgcgaaaactgacatgagtgtggcattttcctctgaacaggtgcttccacgtgcaacataggggagtatgttaccgctgagctgatataatgagaaccaagtggtatcccactcgtcgctcctggccctaatggctgaatatggacagcaagctgagaagattgttccttcctgctgcactgtaaaagaaaagtacaaaaaaaatgaaaaatataaaaatctaaaacaagagattctgggggagtttggcatcagattatggctatcattctggtgactggatttggtcctcttggccatatgcgagtaggctgacagcctgagcaattttctatggactccagcaatctgaaagaggattcacattcaaaataatcagagcttggatgtattggatggaagatgcttttcaagtagaacaagatgtgcagattttggaccaggtatttagtgacaatccgggcgtcatcgatgtaagcctcaactgtatagaagtaacctatctatctgtacccttgtgtgaatcaatctccttcccaacaaaaaggggggaaaaggcagcacaaaaaaatatgttctcttttgttttttcctctccatgaactgttttatttattgtactaatatagctgattattcagttggacattcatttttttgtcaaacagtttaacaatactttttttcctgtgtggtctacaattagattgaccgtgctacctgacttgcatttccaccatttcatgttttaa

SEQ ID NO: 41491 - DNA, 1649 bp, Zea Mays
gttgtgcttcctaaatactttgcattaggttgtggggccatctttcttcaaatatgcacttatatgtgcaaccacaagaacgaactcgggaggttaaggatgatgaggcccccaaagaagtatctggaagagaaaaatcatcagatgtgctcccgagaagcaaacatcaaactcattctgggcacacaattgaatcaagtgaagctactagtaggagacggagtaaccgggaatggaaagggattggtcggaagggtaatgaaaaatttccgcttcgaaatgtactaactgatattcttcatggggaggacaaaagatcgcaaaagtccaatgaagtacgaccccctccatcaaaacaacagaacgacaggaagcgtgaaagggatgatgagacacatcaaacaaagaaggactcctcatcacgctccatgcttggtgatggtgcttcccgtcgtcttctacagtttgctgtccgagatgctgtaaaagctgtacagccaaccagtacctctgctgaaccagcatccaagcgcctgtgctctgtggtcgccactacttctacagagcacatgcgtgataggagatcagaaagatctcaggactacctgaacgatagaagatcagaaagatctcaagacaacttgagtgacagaagatcagaaagaactaggccaatgctacaggtacatggagctgctttagctcttagagctgcagcggaagctgctgcagattctgcaaaggttagatctactggaagtgttttcaagcgattgggtcaagggaatgttgtgaaacagccatctcgttctcgtgaagagaagagagattatgaagattttgagccagttacgatcgcagatgaacatgattctgatcaatatgttaataatgaggaatccgaagaggaatctggagagctaaccatggcagatagggtagctggaagtggaatgtatgttgattcgagctctgaagatgatatggaccgagatgagggtattacaagataccaaacttctctttcacatgacgatactttctcaccatttgcagagaagaaaactgtatcggcaccatgcagtgttgaactagagactaatgcaataagaccttcaagtgtgaatgacgaggaacaacctgttccttcaacaccaacagcaagtaaagctgtcgctatttctgttgatgtaaatatggtggagcctcccagttatgcaacaccaaaagatgttcatgttgtggagaagccttatgttgcacccatgaattcaaatgccgccagtattgctaccaatgccaaagaattaggtcatgctgaagttcaaaaggattctcagcggtctgcaccatctgttccggtttcatatagcacagcgcatccgatggaggatgcagattcaagaacgctttatgttaacaatgttcactttgctgccaccaaggactcattatctcgccatttcaacaagtttggtgcagtgctgaaagtagtcattgtcactaatgccgcaacgggccagccaacagggtttaatgaaaagaaccacatcatcaacataaatggagattctattattgacattgttgcaactcaaaggatgcagaagacccatatgttcagccttatcaaacagactgcaaaggac

SEQ ID NO: 41492 - DNA, 7642 bp, Zea Mays
ccgcaggggagagggagagggccaccgcggtgaccgggaggcccggtggcgcgccagctgcgggggagggggccgccgcgggggtggcgagtcctgcaggagcgccggccgcaggggagaggaccgccgcgggggcggcgaagcccggcggcgcgccggccgcgagggagaggcccgccaggggcgcggcgagggccgccctgtaggagagaggaaggggaaggggagggaaggggtcgccggagaagggagggggcggcggccgatcggccatggagaggcgacgatggcggctggatgggtggggtggcggcggcggctggacctagagctctggtaccatattggagagcgaatgaacagtcgtcgctacagtaaaccctaaccctaacagatatatacccctagtgggatgtgggctaggcccatgtacacagatagctaacactcacgagtttaatttacaatggggggaaataggcgtcaccgaattgaagcaatgtctgcttcttctcaaaggagtctgccttcagagacgagtgtcttcgctccaggctaaggccttgttcatttccgtcggattgcacccggaatcgttccagctaatcaaagtttatataaattagagaagcaatccggtcaggaatcgttccgacccaccaatccggcagaaacgaacaaggcctaattgtaggtggctcaaggacgggtgtcttcgctccaggctaattgtttgtaggtggctcaaggacgggtttccgccacaagaacacaacgtcatgcattcatgcctatgtttccagatattccaacagcacatgagtttgtcttgctatgtaaattagtctttcagtcaaaccgagaattaaatggcattttccctcagttacagggattggtggcctcaaagtaacttgcctttgatcaaaaggaaacaaacacagtgaaattataggaagggttcaaacttatttttatgcggcctgttgtttctataggaagcttggtgattttaatttcaagcatagaaataagaacaacaattatgtaagacttcactagaaagcctgctgaaagcagaaaaaaaatgccaagcaatgcagcaacacggttgctagaattgtggtcagataaataaaccatcataacatactaacaataacaaaaagaaaatagtggtaggacatgaatgccgatgcaataaataaaatggccaacttcttaaacatggcacattcaatatttattatccatagtaaccaactgtgagaaaccctaaccctaacttggggttgggtgttatattaataggcatgagttaactgggcatgtcctattacccaggggtgagagagtaatttcacggggagaacctcaaaccctaaacgagatcctaacatatctcgcagtcgcaactctatcctgtacatatgttgagactggatcgaaagtctaaaaatacactcgacggtaaccccttggtaaagatgtcggcgaactgcagcgtggtggggacgctgagaactcgaacgtcaccggcagcgacacgctcacgaatgaagtgcaggtcgccgacacgctcgcttcgtgccctgatgttgcacggggttggtggagaggtagaccacgctgatgttgtcacagtagacgaaggttgcgcactgaagagggttgtggagctcgtgtagtagctgacgcatccaggaggcctctgccacaccgttggccacagcgcggtactcggcctctgcgctggagtgagagacgacgggttgccgcttggcggcccaggagacgaggttggcgcctagaaacacggcataactggagtggaccggcacatgtcgggatagccgacccagtcagcgtcggtgtcaggcccgtgccagagggcgtgcaggctgtgcactggaacagggcccctaaatatttagggcctccaaacgtgtaaatttgcagtacatttgtataataatctatttttatactatatgaaagcacaagttgttttggttccacgttgtctccacatttaaattgaaaaaatgttaacattatgtcggatcactttgctaattaggggtgtctgaatgcactagaactaatagttagctgttaaaattagctaaagacacccaaacagtatagccaatagttcagctattaacctcttttagtaaattaactaatagttagctagctatttgttagctagctaatttcactagcaattttcagttaattaactattagctttaatgcattcaaacatctctaattctttattaatctgtctgtacgtatgcttctattccatgacgtgagtcatgagtttagctgcaggtttacaatgtttttgttcaccgatagctaacgtcctcgactagtaaagatgtcttattttaaaatctgtacagggcctcggattttgtcggcacggccctggtcggtgtagaccacgagctccgacgtcagggatggtcggattaggaggccgtagtcgagggagttgcggatgtagcacatgatccacttgagaacggtgagatggggctcccacggggtgtgcatatgcaggcacacctgctggacggcgtaggcgatgtcgggcctggagaagatgaggtactggagcgtgccggtcaaggtccggtaagacgtcgcatcggcgaccgagggcctgttgtcctcagagaacttcgcctgagtgtcgaaagccgtggagcagggcttgtagtcggacaagtcagcccgctccaggatgtcgatggcgtactggggctggtgaaggaagagaccctgggaccgacgttcagcggtgatgttgaggaagctgtgaagcggccccaggtccttcatcgcgaactcccgctgaagggcaacgatcgtgcgctgtagaaggtcgacgatgtatgtcgtgagcacaatatcgtcgacgtagagcaggaggtaaacggtgtcgttgtcgcgccggtaggtgaagagtgacgtgtctgacttggcctcgacgaagccgatggaggccaagtaggaggccaagcgactgtaccatgcccacggcgcctgcttgaggctgtatagggagcggttcagccgacagaccaaatccgggtgagcagcatcgacgaagctggtgggctgacttggaggaaggcattcttgacgtcgagcagatggatggctcagtctcgagagagggcgagggagagatgacgcgaacggtggcgaacttgacgacggggctaaaggtctcgtagtagtccacttcggagcgctggttgaagccccgaaggacccaacaggccttgtagcgatcgagggagccgttcgagatcagcttgtggcaaaagagccgcttgctggtgaccacattggtacctggtggacacggcactagggcccaggtgtggttggccagcagggccgcgtactcctcctccatagcacgacatcagtgtgggtcgacgaggacggtgcgatggaggggggggcggggaggcatccggaggagtggcggtcatattagcggccagaatcagccagtcgacgaaccgcgcgacgaaacagcgtggatacccaggcgaagacgcgtgtgatggtggtgaacgtgtcggacttcaaccaaagaggaaaagtctaaagaaaatggggaaaatcatccaaaatcaccaaatagtatttataaccagaaagactgagtacaggggaggtccagagatcaaaatgaaccaggtcaaaagcttgctcagctagagaaaaggaagtaataaatgggagacgagtatgtcgacctaactgacaagcatgacggaggccctcaaaatgtcccctactacatgaaggatctaaactgctagtaagcttggccatgacgtcaggtcctagatggtcgagacaacgatgccaagtggtgggggaggcggtggagaccaggacaggaggtggacgcatcggtggtggaaggccggagcgtgtagagtggccccgcgctgtcacagcgaacgagaggggtcctggtggccaaatccttcacaaaaaaacaagaggggtcaaactcaatggaacaagaattgtcggtggtgaaccaacgaacagagagaagattatgggtgatgtgtgaggctacgagaacgtcgttgagatagaacggcccatggaaaaccgggacacctactgaggtgaccggcagagtggaaccatttccaacgacgatcgaggagggggtccctaggggcgggagctggggcagtgttggcggcgtcagtggcatgacatagggaggtacgccataggcgtctgaggcacgccgtagggggcacaaacatgagagtcgatgccggagatcgggaggcactcgaggcctgacccggccacatggagatggtcaggccccagccacatggagatggtcccggtccagtgattgtagaatgacgaccacgcctggccgccaccccgaccggtggaacctccacgggtggagccaccacccccgcgtccgcccttgcgggggcgacgtcctccgtcgacggtggaagccggacgagggccgcaggggccgcggtaggagggcgagcagggccctggtcgacggaggacgaggggtctgccccccggaaggcgcctaaccacccggaggagcgttgtagagtgccgagatcggagtgggtgcctcggtcaccgtggtgagctcctcgaggagaagctcgttccgcacaacatgaaaggtgggaaagggcacggtcctcttgatgagaaccttcaggaggccatagtgggagctgaggccacgcagaaggttcagcaccaaggtacgatcgcgcgaccggctcgccaaggtcgcagagggagtctgccatgcctttcatctggcggcaatactccccacggagagaccccctgagagaactggtggaactggacgtcgaggtggagagcccgagcatcctagttcctgaggaactgttcctcgagggcgagtcacgcctgtcgacttgtgtccgcctggtcacggatgatgttctgtagctcgacggtgagggtgtcgtgcagccacgagagcaccaaactgtccatcaggcaccaagctagagaaggcggggcgacaaggttgtcgaggacgtggtcgacgagagcataccgccgaagcgtgaggaggacctgaccccatcaccgggggtagtgtgaggacgtcgggtccaatatgatggacacgagggaccgaatgttgtggagtccggcggactgagcgtggagcacagcgatgtggtcgacgtcgagtccagaggcgaggggggcctcgggagtgagcggagggccctcatggacgaccgaaggagggtcgtggatgagacgtcgcgcaatggtcatctgggcagtcaaagcagcacccaaggcacgctcttgctccagggcgagggacgcagtgcgctcgcgctcctgagaggcggtcaaggtgacctggatagtggcgatggcggtggccagtgcagagtcagtggatggcaccagggaagtccatgtggcgtcggtgacgagcgagcaagtggtggggaagccaggggcggctgccaggagaagcgagccggcgagatggggtcagaggccacgatggtggcgagggtgcccatgctcgttgggtaccccgggaggccgagcctagaggggagaacgccggcaacgcgcgctggctgccgcggctgcggtcgcagcgctttgtgcgagcgcgaaagtggtgcgggtcgctgcatcagcgatgaccgcggcgacgccagggacgatggcggctgtggctacggttgcctccaggggatccatcgcagggaggcaagcgacgaaggggaggggccgacggtggtgcaggcgatgcagggaggcgacgacggcccgtcaggggcgcgaccgtcgggggtggcgcggccggtagggggcatggccggcgtcgagggaggttggtggtggggggcacggtcgacgggggggctggcgcaggaggagtagaggggccgcggcggggtgcgcccgcgactgggaagggggccgatggtggccgacagcgagggacaggatgccggcggcgggctgcagggaagagatggccgacgacggctaggaggcagaggttgggagaaaaaacctagctctataccatgtgggaaacataaccctaacttggtgttgggtgttgtattaataggcatgagttaattaggcctggcccattacacaggggtgagagagtaattacacggggagaaccccaaaccctaaacgggattctaacaccaacacacagaactcaagaatatagacataaaaaacagggttttagcatattgtttgtgtcatagtcatacctgagcaaaaaggttgtgatgtgggtcatgatgcaaaggagttattgtcccatgagggccgaaccaagcattaagtgactggagtttgccaccaccagctgaacagtactcaggaacagcaatatcttcgtggagctcctttatctgtcaaatgttacaaattaaatccaaatgtttggtgaacccaaatgtttggtgaactgctaaatcggtacatacatgggtttggttgctacacaaattttctcacctggtcaaacaattgatgctgcgcaatatatgccaagtttgcagaatcacttgaccacatcctctcaagaaattgagaaaatgtgataagctcctgtttcaactcagtacatgcataattttttccaacctgtggcaccatttgttatgagtgcgcttggaccatttatcactgaatgttgaagcaccatgaagtattgctgacggtatattcaaccagaaagcagacctaacttaaccaaaaagaagctacagcagtacagcccacgctctagagaagcagcacttgcttatggacaggatttattttccatggataataaaggccacacatttctttaaacgaatactagaaatctaatgcagatgattgagcaaggcaaatctggtaatccaaaagttagacaacttttaatgatgagccattgaaacatttggtcttatacttgtctaattaatactttcataccagatggtgaagaaaattctgtaagcagaagcatggtgtcagaagttataattaaggtatgaaaaagagaagagggcagtagttaaaaaaatgttttgctgatgccatcaattatgacagcaagttaactaatggagcgtgtgatgcagatatccatgtgtaataatttgatattccaaatgtaataaattttaggttgagttcgaagagttaaggatctttagtgtcctagcaactcagaagttggttttcccacctggaatttgaaactaaccttatgctgcaccacaaattcacaacttcactagtcaacttaagtagcataaataatacaaaggataaattatggaacggacaagactattatatttccattcttcctgaaaccagctgaacttaagtcctgaaaaataagcttgcgtacttaatgacaaccggccaaattactggatcaatgcacttgcgggatgaagttttactatgcttttcccccagataaaaccataatttgtttgcaattttacctgaacaggaatagtccgatctccagctacactctctaggtact

SEQ ID NO: 41493 - DNA, 2402 bp, Zea Mays
atttcggtttgactatttaggatatttttgtttgctgacagttccgtacgagttcaaaccaattttctaggtgccaaatggaaagcgtagtccaaccaaagtggaaagtgtgaccgggatccccatccgttccagcccccccagaacccagagctccaaacctaggccggagccgcggtgcaagcagctacgtggattggacttggacgtctggctctggaggtcccaagttcccaacgcttgctggagttgagatctggtgggcttccggaggagacgccgacggtttgcgaggtttgctggctccgtggcgtcgcggaaggtcatggagcaccgcgccttcgactgcagcgggagtgatgatgatctccctccaacatatcaaattagagtaccgagaatgcatttcagtgggaacagaaggcaattagcaggcccattttctcagccaagaccacacaacaagttggatagcgatatacatcagattgagcaacaggcatatactggtgttcttagagcattcaaaatgcaatcggatgccctgacatgggaaaaagaaagtctaattactgaactaagaagagagttgaaagtctctgatgtggaacacaggatgctattaaacatggtcaatgaagaggaggctatccatagaataaggcagtcaaggcagggatgtggaatgcaatctagcttgccttataatagcgtagttgatcacaaccttggacctatcaagcggcagaagaaatcacatcccatctattcactccctgtggatccccattcacccagcatgcctttgaaagcattggtggacaacaagatatatacagtaggtttggagtattcctgatcctgctttttgttcaccatcaagagtgtgcttatagttcttaatagttgacctcctgtcaagcgcgaaaaacatgccagttgcaaacaaattatgttcaagtggcacacgcacatacacaaattgaaccaagatgaaaaattaatcttttgaaaaataggcaagccaggaaaggtaatatgaaagcatgttgtggcatcctttttcattggcgatgttttgttgacgaggagccagaattctctagcgtctgatattttgcttgatcaattacatttttagtgaatgcttgatcaagcattgccctaacctagcgtctgatattttgcttaatgagttgggttcaacgcccattttattgtttcaaaatcttaatcatcattgaacactcatgtgtagttagtgtagcatgctttgtgtcgcactggcagttaaaaagttccccaccccccaccgcaccccgacagctggcacctgaaaacataagacggggatctgcctatcaaacccttccacatcagggtggttggctggcatctgatggtgctacgaaaggtatggatgggagaagcggaaggtatcacacgaacgagtattatgcttcacataatgacatggggcttttgaacttcaatcgtactgacatacctgatactgaaactcttgtgaaaaaggtggagagggtattatcccggccagatgtgtatgcaattgaaagggcaaaggaactgcttataggccaagagcagtcattgcttgatgcaattgccaaacttgatgaagcatctgaccatgaaagcgatgatacactcgttgggagctggatacacgccgccattgggtgacgcgggcagcacgcctctgacagggggcgatgctttggagttcagacctctggcagcaggcggagaggcaacgatatgtgaaatagtgctgtgtaagtaaaacgctacctgttgttagtccggtaggttaggttcttttggcagccaggcaaatctgtgtatgcaccatgcagtgtgatgggaatatatgtcttgagcaccatcacatgtgatgtgatgctgtctcgtttcatcttcaacgtgagtaagcccgactcctggaaatatgggtcgggtcactagttgtagtattgtagattcattgcccttccccaagttgcacaacttggaaatatgggtcggtttcactagttgtagtcttgtagattcattgcccttctccaagttgcacaactgctaatatcttaggatgtcccttgaaatggtatgctatttaaactttaccagagttcaccccaagcttagtttaacgaaaatgcttcacgtatgacccaccggtacaagagcaacatggtggttgtttacttagtaaccaggttcccggatcgatgggatcgaggaacgggaacgtggtacgcgatacgctactaaaactaggatttaacactactggaacgagattgttcccatgttcccggaacggaacgaacgttcccggaacgaggaacgtggctaagttcccagttcccggttactaa

SEQ ID NO: 41494 - DNA, 2120 bp, Zea Mays
cgattttgtatatgttgatgctttctgaatactgatgatggaagatggaccacatatttagattactgggaggagtgatgatgatctccctccaacatatcaaattagagtaccgagaatgcatttcagtgggaacagaaggcaattagcaggcccattttctcagccaagaccacacaacaagttggatagcgatatacatcagattgagcaacaggcatatactggtgttcttagagcattcaaaatgcaatcggatgccctgacatgggaaaaagaaagtctaattactgaactaagaagagagttgaaagtctctgatgtggaacacaggatgctattaaacatggtcaatgaagaggaggctatccatagaataaggcagtcaaggcagggatgtggaatgcaatctagcttgccttataatagcgtagttgatcacaaccttggacctatcaagcggcagaagaaatcacatcccatctattcactccctgtggatccccattcacccagcatgcctttgaaagcattggtggacaacaagatatatacagtaggtttggagtattcctgatcctgctttttgttcaccatcaagagtgtgcttatagttcttaatagttgacctcctgtcaagcgcgaaaaacatgccagttgcaaacaaattatgttcaagtggcacacgcacatacacaaattgaaccaagatgaaaaattaatcttttgaaaaataggcaagccaggaaaggtaatatgaaagcatgttgtggcatcctttttcattggcgatgttttgttgacgaggagccagaattctctagcgtctgatattttgcttgatcaattacatttttagtgaatgcttgatcaagcattgccctaacctagcgtctgatattttgcttaatgagttgggttcaacgcccattttattgtttcaaaatcttaatcatcattgaacactcatgtgtagttagtgtagcatgctttgtgtcgcactggcagttaaaaagttccccaccccccaccgcaccccgacagctggcacctgaaaacataagacggggatctgcctatcaaacccttccacatcagggtggttggctggcatctgatggtgctacgaaaggtatggatgggagaagcggaaggtatcacacgaacgagtattatgcttcacataatgacatggggcttttgaacttcaatcgtactgacatacctgatactgaaactcttgtgaaaaaggtggagagggtattatcccggccagatgtgtatgcaattgaaagggcaaaggaactgcttataggccaagagcagtcattgcttgatgcaattgccaaacttgatgaagcatctgaccatgaaagcgatgatacactcgttgggagctggatacacgccgccattgggtgacgcgggcagcacgcctctgacagggggcgatgctttggagttcagacctctggcagcaggcggagaggcaacgatatgtgaaatagtgctgtgtaagtaaaacgctacctgttgttagtccggtaggttaggttcttttggcagccaggcaaatctgtgtatgcaccatgcagtgtgatgggaatatatgtcttgagcaccatcacatgtgatgtgatgctgtctcgtttcatcttcaacgtgagtaagcccgactcctggaaatatgggtcgggtcactagttgtagtattgtagattcattgcccttccccaagttgcacaacttggaaatatgggtcggtttcactagttgtagtcttgtagattcattgcccttctccaagttgcacaactgctaatatcttaggatgtcccttgaaatggtatgctatttaaactttaccagagttcaccccaagcttagtttaacgaaaatgcttcacgtatgacccaccggtacaagagcaacatggtggttgtttacttagtaaccaggttcccggatcgatgggatcgaggaacgggaacgtggtacgcgatacgctactaaaactaggatttaacactactggaacgagattgttcccatgttcccggaacggaacgaacgttcccggaacgaggaacgtggctaagttcccagttcccggttactaa

SEQ ID NO: 41495 - DNA, 525 bp, Zea Mays
aatcgactcatccgcacacatcctctctctttcccattgtctgcgtccagccatgagaagcaggcagagcggaggcctggcgagcggagctgtagcacgtgaccacccgacgacctaggacctcggcaagcgaagccccgccccttcgtcaaatgcatctcaagagtgagggctatgatgcatcgtcaatccaaggaatattatccataagaagtattgaaaaccccttaatacagaatgagtgtcctaaaggttttggtggcaactgataattttggagcaattctgtgtttctgttcctttacccacatagattgtagaatttgtgttcaggactccgtgtaggtaaatgttaggctgtaatggcaaattttatctgcacattcttaaggttgtaatatgggctgaagaaaattttcagtctaaataatatactttctgcacttacaattaaaagattattactaaagttgtgtgccacttgtgacttgtgaacttctttttccattgtctgcaagtaatttg

SEQ ID NO: 41496 - DNA, 2229 bp, Zea Mays
ttccccgaggccgcccgcgtcccgaggagtggaggaggtcaccccgagacagtcgcttcaccgccggtctctcctccccacctccacgcggctcgcggccggccatacaccgcagcactaccttggtgggggcttgcgccagagctcgcgaccactgcccgtgacgcctgtctttgactcgttgaccgcggagtgagcgcgcgcgccggagccggccagccatggaagtgcgcggcggagtggggcagggttcggcggcccggcacccgcccgcgccggagccgtcccgggcggcggcgcgggttcaggcgggggacgcgctgccgctgccgatacggcacacgaacctcatcttctcggccctgttcgcggcgtcgctggcgtacctcatgcggcggtggcgcgagaagatccgctcgtccacgccgctccacgccgttgggctcgccgagatgctcgccatattcggcctcgtcgcctcgctcatctacctgctcagcttcttcggcatcgccttcgtccagtccatcgtctcgtccggcgacgacgacgaggacttcctggtcgggtcgggagctccggcctccgccgccgcgccctcccggcagcatgcgcaggcgccggccccgtgcgagctgctcgggagccccgccgcggcgcccgagaaaatgccggaggacgacgaggagatcgtcgcctcggtcgtcgccgggaaggttccgtcctacgcgctcgaggccaggctcggcgactgccgccgcgccgccggcatccggcgcgaggccctgcggcggatcacggggcgggacatcgagggcctcccgctcgacggcttcgactacgcgtccatactaggccagtgctgcgagctgccggtcgggtacgtgcagctgccggtgggcgtcgccgggccgctgctgctcgacggccggaggttctacctgcccatggccaccaccgagggctgcctcgtcgccagcaccaaccgaggctgcaaggccatcgccgagtcgggcggcgccaccagcgtcgtgctgcgggacgcgatgacgcgcgcccccgtcgcccgcttccccaccgcgcgccgcgcagccgagctcaaggcattcctggaggaccctgctaattttgacacgctttccgtcgtcttcaacaggtcgagcaggttcgcgaggctgcagggggtgcagtgcgcgatggcggggaggaacctgtacatgagattcagctgcagcacaggggacgccatggggatgaacatggtctcaaagggcgtgcagaacgtgctggattttcttcaggatgacttccatgacatggatgtcattagcatatctggcaacttctgctccgacaagaagccgtccgccgtgaactggatcgaggggcgcgggaagtccgtggtgtgcgaggccgtgatcggggaggaagtggtgaagaaggtcctgaagaccgacgtgcaatcgctggtcgagctgaacacgatcaagaacctcgccggctcggccgtcgccggcgcgctgggggggttcaacgcccacgcgagcaacatcgttacagccatcttcatcgccaccggccaggaccccgcgcagaacgtggagagctcccactgcatcacgatgctggagcccgtcaacgcagggagagatctccacatttccgtcaccatgccttctatcgaggtgggcacagtcgggggcgggactcagctggcgtcgcagtccgcctgcctggacctcctgggcgtgaggggcgcgagccgggaccgtcccgggtcgaacgcgaggctgctggccaccgtggtcgccggcggggtcctcgccggcgagctctccctgctgtcggcgctcgccgcggggcagctcgtgaagagccacatgaagtacaacaggtcgagcaaggacgtctcgtccacgacggccaccgagaagacgcgtcaacgtgaagtggacgtgtgaacagcagggattttagtttttgttcttccttttggtgtgttcataagaaagagctctggccgtctaggcgcagaaagaagtgttgtttgcaggtcgtggttggttggttggtagattagatctctctctctctctcctttgttgttctttcggcttggttgatctctctccttccctctttgcgtcaggaagcagcagcttgcaaacctggtctcagcactgtaattatttcttctgttctactaccacatcttttgtttgttgctcg

SEQ ID NO: 41497 - DNA, 1978 bp, Zea Mays
ttccccgaggccgcccgcgtcccgaggagtggaggaggtcaccccgagacagtcgcttcaccgccggtctctcctccccacctccacgcggctcgcggccggccatacaccgcagcactaccttggtgggggcttgcgccagagctcgcgaccactgcccgtgacgcctgtctttgactcgttgaccgcggagtgagcgcgcgcgccggagccggccagccatggaagtgcgcggcggagtggggcagggttcggcggcccggcacccgcccgcgccggagccgtcccgggcggcggcgcgggttcaggcgggggacgcgctgccgctgccgatacggcacacgaacctcatcttctcggccctgttcgcggcgtcgctggcgtacctcatgcggcggtggcgcgagaagatccgctcgtccacgccgctccacgccgttgggctcgccgagatgctcgccatattcggcctcgtcgcctcgctcatctacctgctcagcttcttcggcatcgccttcgtccagtccatcgtctcgtccggcgacgacgacgaggacttcctggtcgggtcgggagctccggcctccgccgccgcgccctcccggcagcatgcgcaggcgccggccccgtgcgagctgctcgggagccccgccgcggcgcccgagaaaatgccggaggacgacgaggagatcgtcgcctcggtcgtcgccgggaaggttccgtcctacgcgctcgaggccaggctcggcgactgccgccgcgccgccggcatccggcgcgaggccctgcggcggatcacggggcgggacatcgagggcctcccgctcgacggcttcgactacgcgtccatactaggccagtgctgcgagctgccggtcgggtcgagcaggttcgcgaggctgcagggggtgcagtgcgcgatggcggggaggaacctgtacatgagattcagctgcagcacaggggacgccatggggatgaacatggtctcaaagggcgtgcagaacgtgctggattttcttcaggatgacttccatgacatggatgtcattagcatatctggttcatcttgctctctcggtttttggcaacttctgctccgacaagaagccgtccgccgtgaactggatcgaggggcgcgggaagtccgtggtgtgcgaggccgtgatcggggaggaagtggtgaagaaggtcctgaagaccgacgtgcaatcgctggtcgagctgaacacgatcaagaacctcgccggctcggccgtcgccggcgcgctgggggggttcaacgcccacgcgagcaacatcgttacagccatcttcatcgccaccggccaggaccccgcgcagaacgtggagagctcccactgcatcacgatgctggagcccgtcaacgcagggagagatctccacatttccgtcaccatgccttctatcgaggtgggcacagtcgggggcgggactcagctggcgtcgcagtccgcctgcctggacctcctgggcgtgaggggcgcgagccgggaccgtcccgggtcgaacgcgaggctgctggccaccgtggtcgccggcggggtcctcgccggcgagctctccctgctgtcggcgctcgccgcggggcagctcgtgaagagccacatgaagtacaacaggtcgagcaaggacgtctcgtccacgacggccaccgagaagacgcgtcaacgtgaagtggacgtgtgaacagcagggattttagtttttgttcttccttttggtgtgttcataagaaagagctctggccgtctaggcgcagaaagaagtgttgtttgcaggtcgtggttggttggttggtagattagatctctctctctctctcctttgttgttctttcggcttggttgatctctctccttccctctttgcgtcaggaagcagcagcttgcaaacctggtctcagcactgtaattatttcttctgttctactaccacatcttttgtttgttgctcg

SEQ ID NO: 41498 - DNA, 2195 bp, Zea Mays
tttcttgcggaccaacgcgagacaccgaggcgaagggcggtcggggccagggaagtgcggaaggcgtcggtcggcggcagctctgctcggtcacagcgcttgaggggcggtgtagaggccgccggagggagtgaagagggagatggctccggccagcgggtggggccgggcggtggggaacacgcggtcgttcgtgggcaacgcgctgggcggcctccgcgggtggagcaacctcgcctcctggaccgtcgccggaaccctcgcctactacctctgggtgaagcccgcgcgccagctccagaaggagcaggaggagcgagccgctttggctgctgcaacggatccttatcgttacgtcgagaagcggaaaccgattcctgacactggccttatctatgggaagaagagggagcctaccaaatctcaagattagctagcgccctgggcacatcttgtaccaaatgtgccgccagtttatgtgcaacaataccaggaatggtttctgcgtatctgctggatacatggtaaacgttttttttcatgaaactgttcctgctttgtgcgagcaaaaagcagctgtagatggattttcagtctgggtacttgagcggttgtgcccaggaagtgttgttcatcttcactatcgtctaggagagatgaagatgctttcagaatagaacaaaagagagagagagaatgatttctgtactttttttatagcaagttaatcatgttggcgtgtttatgtgtcacactatcaatgtacaccatggccaggggctttatgttttttttccttcggcgtactgttactgctaagtaattgtattccatgaactttggagctgaattgcgattgaatttagcttactttggagggaatttattaaactccaagaaaaagaagggacaaaggattgcaatacttctgggcgcagtgggcacgggaaagagtttctttggctgatctccgtggtgaggtgtcttccgtggaatgatggtagtgccatcaaagagatcaaaaatggaaagaagggtcgcaggtacaaggatgattttactgttgatctgacttccatgaaacttggatctggatgagttagattatccgcagtgaggagctgcaaatggtgccgtggagcaccctacaggccaacgtaaatttaaggagggatgggagaacgagtcactctctctctcctgctcgaaatctctccgtgcgtgtcttgggaggtggagaagagaggcaagcagcagtgatgtcagcagtgatgtgaagagagctggaaaaaaatgataaaatatatggctgttgatatatggttgagatatagagtaaatatgactataaatgattatgttatagggtaaagaattttaatgataaagacaaaatattctttttagtgtagaaatttggagtcgtataagtgtggatagccttattgaaaacaaggagaaccgttcttgaccctcattgggaaggtgcaaatttgatccctggggatatgctttggtctgatccttccttgcagatgggtctttcttcgaataaagaactaggcatcggtttgctttagggtccagatatcactccgcggacaaatcatttgaaggctctcgaagatttctgggtccgccaccggtgtttaccagtttgggctatagagctacagttaatatcctctttgttgcactattattacatatggcactttgttatatatttcatgatatggcttacctagtaccaatggccaccttcgaacttagccagtttgtatgttttgccttgtagcccgttgagcatttagctccatgataatatttgaaagctagcatcatggtagtagaactatatttgctctaagttggcacgatctcttaggaatggataaaaggatacacaatggaccacgaagtagaatgtagaatgtgggaaactgattactctcttcagtgcgccagactacccacagtttcaggcgtgatactgttctgctgcccatcttcgatatagaatccatcccttcttgcctttttttgttgttattgttttattcaacttctataaataagttctgtttttttgggtggggctaatataatacggtcttaactctttgtttaaggttgatctgcattaattcgttggttcttcttgacggcctcctcattcgttggctcagtttaag

SEQ ID NO: 41499 - DNA, 2204 bp, Zea Mays
tttcttgcggaccaacgcgagacaccgaggcgaagggcggtcggggccagggaagtgcggaaggcgtcggtcggcggcagctctgctcggtcacagcgcttgaggggcggtgtagaggccgccggagggagtgaagagggagatggctccggccagcgggtggggccgggcggtggggaacacgcggtcgttcgtgggcaacgcgctgggcggcctccgcgggtggagcaacctcgcctcctggaccgtcgccggaaccctcgcctactacctctgggtgaagcccgcgcgccagctccagaaggagcaggaggagcgagccgctttggctgctgcaacggatccttatcgttacgtcgagaagcggaaaccgattcctgatccacaggacactggccttatctatgggaagaagagggagcctaccaaatctcaagattagctagcgccctgggcacatcttgtaccaaatgtgccgccagtttatgtgcaacaataccaggaatggtttctgcgtatctgctggatacatggtaaacgttttttttcatgaaactgttcctgctttgtgcgagcaaaaagcagctgtagatggattttcagtctgggtacttgagcggttgtgcccaggaagtgttgttcatcttcactatcgtctaggagagatgaagatgctttcagaatagaacaaaagagagagagagaatgatttctgtactttttttatagcaagttaatcatgttggcgtgtttatgtgtcacactatcaatgtacaccatggccaggggctttatgttttttttccttcggcgtactgttactgctaagtaattgtattccatgaactttggagctgaattgcgattgaatttagcttactttggagggaatttattaaactccaagaaaaagaagggacaaaggattgcaatacttctgggcgcagtgggcacgggaaagagtttctttggctgatctccgtggtgaggtgtcttccgtggaatgatggtagtgccatcaaagagatcaaaaatggaaagaagggtcgcaggtacaaggatgattttactgttgatctgacttccatgaaacttggatctggatgagttagattatccgcagtgaggagctgcaaatggtgccgtggagcaccctacaggccaacgtaaatttaaggagggatgggagaacgagtcactctctctctcctgctcgaaatctctccgtgcgtgtcttgggaggtggagaagagaggcaagcagcagtgatgtcagcagtgatgtgaagagagctggaaaaaaatgataaaatatatggctgttgatatatggttgagatatagagtaaatatgactataaatgattatgttatagggtaaagaattttaatgataaagacaaaatattctttttagtgtagaaatttggagtcgtataagtgtggatagccttattgaaaacaaggagaaccgttcttgaccctcattgggaaggtgcaaatttgatccctggggatatgctttggtctgatccttccttgcagatgggtctttcttcgaataaagaactaggcatcggtttgctttagggtccagatatcactccgcggacaaatcatttgaaggctctcgaagatttctgggtccgccaccggtgtttaccagtttgggctatagagctacagttaatatcctctttgttgcactattattacatatggcactttgttatatatttcatgatatggcttacctagtaccaatggccaccttcgaacttagccagtttgtatgttttgccttgtagcccgttgagcatttagctccatgataatatttgaaagctagcatcatggtagtagaactatatttgctctaagttggcacgatctcttaggaatggataaaaggatacacaatggaccacgaagtagaatgtagaatgtgggaaactgattactctcttcagtgcgccagactacccacagtttcaggcgtgatactgttctgctgcccatcttcgatatagaatccatcccttcttgcctttttttgttgttattgttttattcaacttctataaataagttctgtttttttgggtggggctaatataatacggtcttaactctttgtttaaggttgatctgcattaattcgttggttcttcttgacggcctcctcattcgttggctcagtttaag

SEQ ID NO: 41500 - DNA, 989 bp, Zea Mays
aaaaactgcagtttggaaaaactgtgttcccaaacagggcctagtatttttggagttggccaaaactatagtattgcagtattgcaaaaccatggtttttgaggaacattgttaccaaacagaccctaatatgtgggtacagtgaatgtgaaataattattaaaatatttaattcgttgcatgattctaatagctcctgtgttggtgctcaatgatggcttgctgagtatttatggtattatttgaacttggtcagttagttggggataatttatggtcatatctgaacatgattctagttgcatcgaggtagaactgtatttatttttaaattcacatgcttccttcatcttttctgtggacagattagtttgaaggtttgttttgtttcatgtgttattattgctgtatttaaaattgtttgtttagtagaatgatttcttacttgctagtgtctaatgataatgaggtgttggagtatccgtttcgcgacataagtgcttgcattttgtatctctgtgcgggttttaaaattactacatatttcatctcaagattagtgttaacgaacgtatacacgtgcaacaaacagtaaaatatatttaaacatgggtacaaattatgtaaagctatatacttacagtatgaatatcatttttgcccaggctctcgaagatttctgggtccgccaccggtgtttaccagtttgggctatagagctacagttaatatcctctttgttgcactattattacatatggcactttgttatatatttcatgatatggcttacctagtaccaatggccaccttcgaacttagccagtttgtatgttttgccttgtagcccgttgagcatttagctccatgataatatttgaaagctagcatcatggtagtagaactatatttgctctaagttggcacgatctcttaggaatggataaaaggatacacaatggaccacgaagtagaatgtagaatgtggg

SEQ ID NO: 41501 - DNA, 4277 bp, Zea Mays
gcggcctcctccctctcacacacgccttccctctaggctccagcgccgcaccacgccaccagggcgggcagcccactcctctcgctgctccactccacctctatcctacgcgctctttctgccgccgaatcagcactactcatcacccggccagggaagagagatattttctgctctggccctatttctggagggcgggagggggaggcggcgaggtgacgtgacggttgcgactggcgccgaagacttgcgtgagtggtaactggaacggaatctttctcctcgactgctcggtgctggcctcgcccctgttgcggcgccgctcgtgtccccctgttgctgcgggcgctggtcggctcgtttgacctcgtctgcgtagattcgtcgaagaggtgggccgtggctgtggctgaggctgagtggggcgagcccggaggacttgagaagcgatgcagagggaggtgggcccgcaggtggcccctccgctcttcatccaccaccagatccagccgatgcctccccacgccgcggccgccgtgaagaagcgcggccagccgtgtccggccgccgcggcggcgcccgcggaggccgctgcggggaactggaaccccaggctgtgggactgggacagccgcgcgctcaccgccaggccgtcggccgatgcactccgcctcgccggtggccagccccagccccagccccagcaggcggccgaggtgcaccgtcagggggccggaggaagcggcgcgctgaagctccagctcggcccgcgggaaggctccacggccccgacggacgccagcccgacggctcccgcggcgtcgctgtcgccgtccccgcctgcttcggggcaggacctggtggtcaggccgagcaagcgggtgcggtcaggatcgccaggcagcgcgggcggtggcggtggcggggctgccaacggaggcgcgggctacccgatgtgccaggtggatgagtgccgagcggatctgaccggcgccaaggactaccacaggaggcacaaggtctgcgagacccacagcaagaccatcagggccgtcgtcgccaaccaggcgcagcgcttctgccagcagtgtagtagatttcacccactcgcggagtttgacgagggtaagaggagctgccggcgtaggcttgctgggcacaaccggcggagaagaaaaacccagccagcagatgtttcttcgcagttgctgctacctggaaaccaagaaaatgcagcaaataggacgcaggatattgtcaatctaattacagtgattgcgcacttgcatggttctagcgtcggtaaagtgcctagcattcctcccataccagataagcagaatctggttgaaattatcagcaaaataaattcattcaacaatatgacctctgcggacaaatctcctccatctgaagtcgttgatttggatgctttgcaagagcaacaagtgcaacggcaggattctgtggggaagacgaccaacggaatcgacaagcaaactgtgccatcaaccatggatttgctaggagtttttccaactggccttgcaacttcaacacctgagaccaatacatctcagtcccaagggagcagtgacagcagtggtaataacaagagcaagagccattcaacagagccagtaactgttgtaaattcacatgataaatcaacccgagatttctctgctgctggtttcatgagaagcaacagcacacacgaaagccaacctcatatatacaagcagacagaacaagaaaccagaccatacttgtcactgcagctgtttggcagcactgaggaggattttccacctaagatggactcagtgaataagtacttatcttctgagagtagcaatcctctggatgagagatctccttcatcctctccgcctataacccgcaagtttttccccatacactcggttgatgaagaggttcggcaccctcatattacagattatggggaagatgctacgatgggtgaagttagcacaaatcaggcatggttggcaccaccacttgatctcttcaaggattcagagcgtcccatcgagaacggatcgccaccaaatcctggttaccagtcctgctatgcctcaacatcttgttcagatcattcaccttcaacctcaaactcagatggacaggatcggactggtaggattatttttaagctgtttggcaaggaacctagcacaatacctgggaaccttcgtgatgatatagtaaattggctcaaacacagccctactgaaatggagggttacattcgccccggttgccttgtactatccatgtacctattaatgccgggtattgcatgggatgagcttgaagaaaatctcctccagagagtaaactcattagttcaaagttctgatttggatttctggagaaaaggaaggtttttagttcgaaccaactcccagttggtatcatataaagcaggaatgacccgtttatcgaaatcgtggagaacatggaatacccctgaattgacccttgtgtcaccaattgctgttgttggtgggcagaagacctccctcattcttaaaggccgcaatctatctattcctggcacacagatccactgtacaagcatagggaagtacatatccaaagaagttctgtgctcagcatatccaggtaccatatatgatgattcaggtgttgagacatttgacttgccaggacaaccagatcttattcttgggcgctgctttgttgaggtagaaaacaggttcaggggtaacagcttccctgttattgttgctagttcaagcgtttgccaggagttgcgaaatctagaagttgagttcgaggattcgcaggttcttgatgtttcttcggatggtcagattcatgattctcggcagccaaagacatcggttcaagttctgcacttccttaatgaactcggctggctctttcagagggcttctgcctgtacatcgtccaccagatctgatgtgtctgatttggatttgattcggttttcaaccgcacggttcagataccttttactgttctgtagtgagcgcgactggtgctctcttactaaaacacttctggacattcttgccaagagaagcctggccagcgaggaactatcaaaggagactatggagatgctggctgagattcacctcctgaacagagcagtaaaaagaaagagtaggaacatggtgcacctacttgtgaagttcgttgtaatttgccccgacaattccaaggtttaccccttccttccgaacttgcctggccctggtggtttaactccgctgcatcttgctgcgtccatcgagaatgcagaggatatagttgacgccttgacagacgaccctcaacagactggtgtaacctgttggcagacagttctagacgacgacggccaatctcccgaaacatatgccaagttgaggaaccataattcctataatgagctcgtagcgcaaaagctggtggacatgaagaacaaccaggtcacagtaagggttaacggcgatgggattcgtgcggatcggttaggaaatgatgttggtgaccgcaaaagatctggggttcaggcgctgcaaataagatcctgctcccagtgtgccattctggagtctggtgtgctaatgcagcccgtgcggtcaagggggttccttgctcggccctatatccattcgatgcttgctatagcggcagtatgcgtctgcgtctgtgtattcatgcgagcgttgctgcggatcaattctggtaaatccttcaagtgggagaggctggattatggtacgatataaactgcccgcccgccggggaagacctgagcctcgtggtaattattgagttagcaagcagttggtggccttggacggtatggagattgttctatgcagggttcggtggcataaggtagtatcgtcgttggacagttccttttacctcatgtgaaatggaagtgttaacatgtgaggagccggagatgtcagatgttaaatactggtaccgaaggtggatgagcttgagcagagctggcacatctgatggagatgttttagacgtaatcacagcccggggggataagaggagcctttttcccgtcgaggctggctacttcgactcgcatcttcattgctcgtgcatgtagatgaagcttttctccatgttgcttcggtcaaaggccatcttcgttctgcctgtattatacacctgaaacagccaaaggctgatttcgtccggcttccattatacacatggaacatacttgattatgcaatacaagtgttttg

SEQ ID NO: 41502 - DNA, 4291 bp, Zea Mays
ctccctctcacacacgccttccctctaggctccagcgccgcaccacgccaccagggcgggcagcccactcctctcgctgctccactccacctctatcctacgcgctctttctgccgccgaatcagcactactcatcacccggccagggaagagagatattttctgctctggccctatttctggagggcgggagggggaggcggcgaggtgacgtgacggttgcgactggcgccgaagacttgcgtgagtggtaactggaacggaatctttctcctcgactgctcggtgctggcctcgcccctgttgcggcgccgctcgtgtccccctgttgctgcgggcgctggtcggctcgtttgacctcgtctgcgtagattcgtcgaagaggtgggccgtggctgtggctgaggctgagtggggcgagcccggaggacttgagaagcgatgcagagggaggtgggcccgcaggtggcccctccgctcttcatccaccaccagatccagccgatgcctccccacgccgcggccgccgtgaagaagcgcggccagccgtgtccggccgccgcggcggcgcccgcggaggccgctgcggggaactggaaccccaggctgtgggactgggacagccgcgcgctcaccgccaggccgtcggccgatgcactccgcctcgccggtggccagccccagccccagccccagcaggcggccgaggtgcaccgtcagggggccggaggaagcggcgcgctgaagctccagctcggcccgcgggaaggctccacggccccgacggacgccagcccgacggctcccgcggcgtcgctgtcgccgtccccgcctgcttcggggcaggacctggtggtcaggccgagcaagcgggtgcggtcaggatcgccaggcagcgcgggcggtggcggtggcggggctgccaacggaggcgcgggctacccgatgtgccaggtggatgagtgccgagcggatctgaccggcgccaaggactaccacaggaggcacaaggtctgcgagacccacagcaagaccatcagggccgtcgtcgccaaccaggcgcagcgcttctgccagcagtgtagtagatttcacccactcgcggagtttgacgagggtaagaggagctgccggcgtaggcttgctgggcacaaccggcggagaagaaaaacccagccagcagatgtttcttcgcagttgctgctacctggaaaccaagaaaatgcagcaaataggacgcaggatattgtcaatctaattacagtgattgcgcacttgcatggttctagcgtcggtaaagtgcctagcattcctcccataccagataagcagaatctggttgaaattatcagcaaaataaattcattcaacaatatgacctctgcggacaaatctcctccatctgaagtcgttgatttggatgctttgcaagagcaacaagtgcaacggcaggattctgtggggaagacgaccaacggaatcgacaagcaaactgtgccatcaaccatggatttgctaggagtttttccaactggccttgcaacttcaacacctgagaccaatacatctcagtcccaagggagcagtgacagcagtggtaataacaagagcaagagccattcaacagagccagtaactgttgtaaattcacatgataaatcaacccgagatttctctgctgctggtttcatgagaagcaacagcacacacgaaagccaacctcatatatacaagcagacagaacaagaaaccagaccatacttgtcactgcagctgtttggcagcactgaggaggattttccacctaagatggactcagtgaataagtacttatcttctgagagtagcaatcctctggatgagagatctccttcatcctctccgcctataacccgcaagtttttccccatacactcggttgatgaagaggttcggcaccctcatattacagattatggggaagatgctacgatgggtgaagttagcacaaatcaggcatggttggcaccaccacttgatctcttcaaggattcagagcgtcccatcgagaacggatcgccaccaaatcctggttaccagtcctgctatgcctcaacatcttgttcagatcattcaccttcaacctcaaactcagatggacaggatcggactggtaggattatttttaagctgtttggcaaggaacctagcacaatacctgggaaccttcgtgatgatatagtaaattggctcaaacacagccctactgaaatggagggttacattcgccccggttgccttgtactatccatgtacctattaatgccgggtattgcatgggatgagcttgaagaaaatctcctccagagagtaaactcattagttcaaagttctgatttggatttctggagaaaaggaaggtttttagttcgaaccaactcccagttggtatcatataaagcaggaatgacccgtttatcgaaatcgtggagaacatggaatacccctgaattgacccttgtgtcaccaattgctgttgttggtgggcagaagacctccctcattcttaaaggccgcaatctatctattcctggcacacagatccactgtacaagcatagggaagtacatatccaaagaagttctgtgctcagcatatccaggtaccatatatgatgattcaggtgttgagacatttgacttgccaggacaaccagatcttattcttgggcgctgctttgttgaggtagaaaacaggttcaggggtaacagcttccctgttattgttgctagttcaagcgtttgccaggagttgcgaaatctagaagttgagttcgaggattcgcaggttcttgatgtttcttcggatggtcagattcatgattctcggcagccaaagacatcggttcaagttctgcacttccttaatgaactcggctggctctttcagagggcttctgcctgtacatcgtccaccagatctgatgtgtctgatttggatttgattcggttttcaaccgcacggttcagataccttttactgttctgtagtgagcgcgactggtgctctcttactaaaacacttctggacattcttgccaagagaagcctggccagcgaggaactatcaaaggagactatggagatgctggctgagattcacctcctgaacagagcagtaaaaagaaagagtaggaacatggtgcacctacttgtgaagttcgttgtaatttgccccgacaattccaaggtttaccccttccttccgaacttgcctggccctggtggtttaactccgctgcatcttgctgcgtccatcgagaatgcagaggatatagttgacgccttgacagacgaccctcaacagactggtgtaacctgttggcagacagttctagacgacgacggccaatctcccgaaacatatgccaagttgaggaaccataattcctataatgagctcgtagcgcaaaagctggtggacatgaagaacaaccaggtcacagtaagggttaacggcgatgggattcgtgcggatcggttaggaaatgatgttggtgaccgcaaaagatctggggttcaggcgctgcaaataagatcctgctcccagtgtgccattctggagtctggtgtgctaatgcagcccgtgcggtcaagggggttccttgctcggccctatatccattcgatgcttgctatagcggcagtatgcgtctgcgtctgtgtattcatgcgagcgttgctgcggatcaattctggtaaatccttcaagtgggagaggctggattatggtacgatataaactgcccgcccgccggggaagacctgagcctcgtggtaattattgagttagcaagcagttggtggccttggacggtatggagattgttctatgcagggttcggtggcataaggtagtatcgtcgttggacagttccttttacctcatgtgaaatggaagtgttaacatgtgaggagccggagatgtcagatgttaaatactggtaccgaaggtggatgagcttgagcagagctggcacatctgatggagatgttttagacgtaatcacagcccggggggataagaggatgctctagcatgaccgtatcttgtatctactttagatatatatatagtagtagaatggggtaaatgaaaaggaggcttgcgtatgggtctgtatcgaccattttgacttgtagctacaaagaaatgaagcggatctgaagtgtacctggatctttttgttttgttttgttttgttttgtttttgctggactggacgtccagcataggttcccgttctgaagaa

SEQ ID NO: 41503 - DNA, 4075 bp, Zea Mays
ctctaggctccagcgccgcaccacgccaccagggcgggcagcccactcctctcgctgctccactccacctctatcctacgcgctctttctgccgccgaatcagcactactcatcacccggccagggaagagagatattttctgctctggccctatttctggagggcgggagggggaggcggcgaggtgacgtgacggttgcgactggcgccgaagacttgcgtgagtggtaactggaacggaatctttctcctcgactgctcggtgctggcctcgcccctgttgcggcgccgctcgtgtccccctgttgctgcgggcgctggtcggctcgtttgacctcgtctgcgtagattcgtcgaagaggtgggccgtggctgtggctgaggctgagtggggcgagcccggaggacttgagaagcgatgcagagggaggtgggcccgcaggtggcccctccgctcttcatccaccaccagatccagccgatgcctccccacgccgcggccgccgtgaagaagcgcggccagccgtgtccggccgccgcggcggcgcccgcggaggccgctgcggggaactggaaccccaggctgtgggactgggacagccgcgcgctcaccgccaggccgtcggccgatgcactccgcctcgccggtggccagccccagccccagccccagcaggcggccgaggtgcaccgtcagggggccggaggaagcggcgcgctgaagctccagctcggcccgcgggaaggctccacggccccgacggacgccagcccgacggctcccgcggcgtcgctgtcgccgtccccgcctgcttcggggcaggacctggtggtcaggccgagcaagcgggtgcggtcaggatcgccaggcagcgcgggcggtggcggtggcggggctgccaacggaggcgcgggctacccgatgtgccaggtggatgagtgccgagcggatctgaccggcgccaaggactaccacaggaggcacaaggtctgcgagacccacagcaagaccatcagggccgtcgtcgccaaccaggcgcagcgcttctgccagcagtgtagtaggttctagcgtcggtaaagtgcctagcattcctcccataccagataagcagaatctggttgaaattatcagcaaaataaattcattcaacaatatgacctctgcggacaaatctcctccatctgaagtcgttgatttggatgctttgcaagagcaacaagtgcaacggcaggattctgtggggaagacgaccaacggaatcgacaagcaaactgtgccatcaaccatggatttgctaggagtttttccaactggccttgcaacttcaacacctgagaccaatacatctcagtcccaagggagcagtgacagcagtggtaataacaagagcaagagccattcaacagagccagtaactgttgtaaattcacatgataaatcaacccgagatttctctgctgctggtttcatgagaagcaacagcacacacgaaagccaacctcatatatacaagcagacagaacaagaaaccagaccatacttgtcactgcagctgtttggcagcactgaggaggattttccacctaagatggactcagtgaataagtacttatcttctgagagtagcaatcctctggatgagagatctccttcatcctctccgcctataacccgcaagtttttccccatacactcggttgatgaagaggttcggcaccctcatattacagattatggggaagatgctacgatgggtgaagttagcacaaatcaggcatggttggcaccaccacttgatctcttcaaggattcagagcgtcccatcgagaacggatcgccaccaaatcctggttaccagtcctgctatgcctcaacatcttgttcagatcattcaccttcaacctcaaactcagatggacaggatcggactggtaggattatttttaagctgtttggcaaggaacctagcacaatacctgggaaccttcgtgatgatatagtaaattggctcaaacacagccctactgaaatggagggttacattcgccccggttgccttgtactatccatgtacctattaatgccgggtattgcatgggatgagcttgaagaaaatctcctccagagagtaaactcattagttcaaagttctgatttggatttctggagaaaaggaaggtttttagttcgaaccaactcccagttggtatcatataaagcaggaatgacccgtttatcgaaatcgtggagaacatggaatacccctgaattgacccttgtgtcaccaattgctgttgttggtgggcagaagacctccctcattcttaaaggccgcaatctatctattcctggcacacagatccactgtacaagcatagggaagtacatatccaaagaagttctgtgctcagcatatccaggtaccatatatgatgattcaggtgttgagacatttgacttgccaggacaaccagatcttattcttgggcgctgctttgttgaggtagaaaacaggttcaggggtaacagcttccctgttattgttgctagttcaagcgtttgccaggagttgcgaaatctagaagttgagttcgaggattcgcaggttcttgatgtttcttcggatggtcagattcatgattctcggcagccaaagacatcggttcaagttctgcacttccttaatgaactcggctggctctttcagagggcttctgcctgtacatcgtccaccagatctgatgtgtctgatttggatttgattcggttttcaaccgcacggttcagataccttttactgttctgtagtgagcgcgactggtgctctcttactaaaacacttctggacattcttgccaagagaagcctggccagcgaggaactatcaaaggagactatggagatgctggctgagattcacctcctgaacagagcagtaaaaagaaagagtaggaacatggtgcacctacttgtgaagttcgttgtaatttgccccgacaattccaaggtttaccccttccttccgaacttgcctggccctggtggtttaactccgctgcatcttgctgcgtccatcgagaatgcagaggatatagttgacgccttgacagacgaccctcaacagactggtgtaacctgttggcagacagttctagacgacgacggccaatctcccgaaacatatgccaagttgaggaaccataattcctataatgagctcgtagcgcaaaagctggtggacatgaagaacaaccaggtcacagtaagggttaacggcgatgggattcgtgcggatcggttaggaaatgatgttggtgaccgcaaaagatctggggttcaggcgctgcaaataagatcctgctcccagtgtgccattctggagtctggtgtgctaatgcagcccgtgcggtcaagggggttccttgctcggccctatatccattcgatgcttgctatagcggcagtatgcgtctgcgtctgtgtattcatgcgagcgttgctgcggatcaattctggtaaatccttcaagtgggagaggctggattatggtacgatataaactgcccgcccgccggggaagacctgagcctcgtggtaattattgagttagcaagcagttggtggccttggacggtatggagattgttctatgcagggttcggtggcataaggtagtatcgtcgttggacagttccttttacctcatgtgaaatggaagtgttaacatgtgaggagccggagatgtcagatgttaaatactggtaccgaaggtggatgagcttgagcagagctggcacatctgatggagatgttttagacgtaatcacagcccggggggataagaggatgctctagcatgaccgtatcttgtatctactttagatatatatatagtagtagaatggggtaaatgaaaaggaggcttgcgtatgggtctgtatcgaccattttgacttgtagctacaaagaaatgaagcggatctgaagtgtacctggatctttttgttttgttttgttttgttttgtttttgctggactggacgtccagcataggttcccgttctgaagaa

SEQ ID NO: 41504 - DNA, 676 bp, Zea Mays
aaaaagatgagaaaaggtgcctctctgccatgggcacaacagctggagccgacggctgcgccatgtgcgggccgcgtacaatgcaggcagcaggtgaagagcagagattgacctggtggagtcctggacggacgaggacgatctctcgtctcgtcgcttgctggccagagtcgcatgcagctccgatccaggtcggattcacttcaggttcagatgaggcatggtttggaagtcttccaagaagcaatcattaccatgttgatatgaatagagataatcaactttgggcggccaacatgtgcgatcagctagttcaacaaatgcgggacgattggaaccaaagttgatgtttttcttgttgcatgtaactgcattcagaccttatttatggttttaagtggttgttttcagaccatgtttacgttttaaagtggttgaatttagaccatgcatttagaccctattttatggttttaagtggttgttttcatatcctattttatagttttaagtggctgtattcagaccatgtttatgtttttaagtggttgtattgagaccctatttaatggtttgaagtggttgtatttagaccctattttatggttttaaggggatatattcagacaatgcttatgtatttaagtggttttaagtggttgtattcagaccctat

SEQ ID NO: 41505 - DNA, 879 bp, Zea Mays
agaaaaggtgcctctctgccatgggcacaacagctggagccgacggctgcgccatgtgcgggccgcgtacaatgcaggcagcaggtgaagagcagagattgacctggtggagtcctggacggacgaggacgatctctcgtctcgtcgcttgctggccagagtcgcatgcagctccgatccaggtcggattcacttcaggttcaggatggaaggaccaactcatgactcctttgtactctaaaatgcattgtcatgtccctcgagcttaaaaataaggtcatttatttctagccgatgcgggttgtgcagcatgacctagcatattacctccatagagggatgttcggtaccatcttaagaatatgctttgcacaacttcataatagaggatgtcactaatatttatgtttatgaagatgaggcatggtttggaagtcttccaagaagcaatcattaccatgttgatatgaatagagataatcaactttgggcggccaacatgtgcgatcagctagttcaacaaatgcgggacgattggaaccaaagttgatgtttttcttgttgcatgtaactgcattcagaccttatttatggttttaagtggttgttttcagaccatgtttacgttttaaagtggttgaatttagaccatgcatttagaccctattttatggttttaagtggttgttttcatatcctattttatagttttaagtggctgtattcagaccatgtttatgtttttaagtggttgtattgagaccctatttaatggtttgaagtggttgtatttagaccctattttatggttttaaggggatatattcagacaatgcttatgtatttaagtggttttaagtggttgtattcagaccctat

SEQ ID NO: 41506 - DNA, 649 bp, Zea Mays
aaaaggtgcctctctgccatgggcacaacagctggagccgacggctgcgccatatgcaggcagcaggtgaagagcagagattgacctggtggagtcctggacggacgaggacgatctctcgtctcgtcgcttgctggccagagtcgcatgcagctccgatccaggtcggattcacttcaggttcagatgaggcatggtttggaagtcttccaagaagcaatcattaccatgttgatatgaatagagataatcaactttgggcggccaacatgtgcgatcagctagttcaacaaatgcgggacgattggaaccaaagttgatgtttttcttgttgcatgtaactgcattcagaccttatttatggttttaagtggttgttttcagaccatgtttacgttttaaagtggttgaatttagaccatgcatttagaccctattttatggttttaagtggttgttttcatatcctattttatagttttaagtggctgtattcagaccatgtttatgtttttaagtggttgtattgagaccctatttaatggtttgaagtggttgtatttagaccctattttatggttttaaggggatatattcagacaatgcttatgtatttaagtggttttaagtggttgtattcagaccctat

SEQ ID NO: 41507 - DNA, 2093 bp, Zea Mays
cccagacccgcggtcctccccttaacgcacctcatcgagtaggggtcctatcatcgagtcatcgttcagagacagaggctggtcgatcgtcggtgactgatggcgatggcggcggcgcaattggaggcggaggaggagctgcggctggaactggaggcggtggcggcggtgtacggagacgacgtccgcgtgctccgcgacctcccaccgcacctcttcgtccacgtgcggccccgcaccgccgacgacacctcgcagcaggattactctgatcaattgctgcattgtgttaccatgattgacctgatgctgctttcttgacagacaagagggaagctgaacttggacgactgggatcctaagcagaagagccactatccttgtaggctgtttttcgaaacttgtttcctacgagttgttgtttcatctcttacaatgataatcaactaatcgtaatggaagcctttgtccaaatgccagcagtaacttcttggtgtttcttttgttgaaaatcccttcatgtccattttccatgagctttctagtcactgtaattgtagcatcacctcttttccatcatatgaggttgaacgcatagataaccatttactgtttgttttcataaatttggttttctctgtttcagttcgtggagctctttcttggcattaaagcatcttcacagtatccgaaggaaccaccacatatttatgctgtggaaagtaagggccttgatgagaaccgacagatatatcttatcaccagcatccagaacaaggcaaacgaactttcaaactgtccaatgcttgtgacgttatgtgaggaagctggagagatcctctcgaacatgaatcatccagcaggggattgtccattgtgtctatatcctttaatgggagaggataaggttggctcggagttgccatttatgaagttgatgtcatgctaccattgcttccacagtgactgcattatgagatggtgggaatggctccaacatggtgacacaaacccaaaggagcccaatactggagacaagcattataatgtgaatcagccaagaggattttgtcctgtttgccgcaaagtgttcgatgagaaggatattgagcatgttcgtgatttgttgggtgacaatacttccaggctggcatcactaacagttgaccttggtgaagatgaaaaggaattgctccattccgaggctgagcaaaacaggagaaaaagaatcgagtcacttgttaatctgcagcaagaactaaacggcctgattgaaccaaagaaagaccttgccatacaaccaggaatgtacgtttccgttcctcccagcacgccagacacagctgaagaagagaatgctgatcccagccaaggcacggctacttcgacctcagaaactgagcaacgtggccaggcaagcaacgccagcagcaacaagccgaagaatccaggccatcgaaggagaaacagagctaatgcatcaagacgacagcctcacggccagggccagccagctaggcagcagtggcagaggaaagaagcaggcacttcacaccaataaaacaacatcgaagcaacgaggaggatgtgacctgtgagttgtttttgtcggctatgtacatcaatgtcgtgccttgctttcgtctcataataattgcgagccatggtatgacaatgttttggcgctgctatggaagttccatgcaagtgatactctggaaagaaccctgcaccggattctatgggagtagtataaagcacatgcatgcttggctagtacatacaatatctgattttttgtgtgtgtgtcattgccaggtactatgttcaaactgattgtccatagtcagaaaagcaactgattacactgtttgttactctttgagttgcatcatgtgtttgaaatacatacattacagcttaggtcatgtgggacattacaatataaagcactgcatgcagaatttgcaggggtcggctatgttggtaacccaataacaatgcatacctgtaaggtgctattgttttgtccgctactaaatcatagcactccaaattacctcaaagttgcataaatgatcattgctttggtg

SEQ ID NO: 41508 - DNA, 1758 bp, Zea Mays
cccagacccgcggtcctccccttaacgcacctcatcgagtaggggtcctatcatcgagtcatcgttcagagacagaggctggtcgatcgtcggtgactgatggcgatggcggcggcgcaattggaggcggaggaggagctgcggctggaactggaggcggtggcggcggtgtacggagacgacgtccgcgtgctccgcgacctcccaccgcacctcttcgtccacgtgcggccccgcaccgccgacgacacctcgcagcaggaagctgaacttggacgactgggatcctaagcagaagagccactatccttttcgtggagctctttcttggcattaaagcatcttcacagtatccgaaggaaccaccacatatttatgctgtggaaagtaagggccttgatgagaaccgacagatatatcttatcaccagcatccagaacaaggcaaacgaactttcaaactgtccaatgcttgtgacgttatgtgaggaagctggagagatcctctcgaacatgaatcatccagcaggggattgtccattgtgtctatatcctttaatgggagaggataaggttggctcggagttgccatttatgaagttgatgtcatgctaccattgcttccacagtgactgcattatgagatggtgggaatggctccaacatggtgacacaaacccaaaggagcccaatactggagacaagcattataatgtgaatcagccaagaggattttgtcctgtttgccgcaaagtgttcgatgagaaggatattgagcatgttcgtgatttgttgggtgacaatacttccaggctggcatcactaacagttgaccttggtgaagatgaaaaggaattgctccattccgaggctgagcaaaacaggagaaaaagaatcgagtcacttgttaatctgcagcaagaactaaacggcctgattgaaccaaagaaagaccttgccatacaaccaggaatgtacgtttccgttcctcccagcacgccagacacagctgaagaagagaatgctgatcccagccaaggcacggctacttcgacctcagaaactgagcaacgtggccaggcaagcaacgccagcagcaacaagccgaagaatccaggccatcgaaggagaaacagagctaatgcatcaagacgacagcctcacggccagggccagccagctaggcagcagtggcagaggaaagaagcaggcacttcacaccaataaaacaacatcgaagcaacgaggaggatgtgacctgtgagttgtttttgtcggctatgtacatcaatgtcgtgccttgctttcgtctcataataattgcgagccatggtatgacaatgttttggcgctgctatggaagttccatgcaagtgatactctggaaagaaccctgcaccggattctatgggagtagtataaagcacatgcatgcttggctagtacatacaatatctgattttttgtgtgtgtgtcattgccaggtactatgttcaaactgattgtccatagtcagaaaagcaactgattacactgtttgttactctttgagttgcatcatgtgtttgaaatacatacattacagcttaggtcatgtgggacattacaatataaagcactgcatgcagaatttgcaggggtcggctatgttggtaacccaataacaatgcatacctgtaaggtgctattgttttgtccgctactaaatcatagcactccaaattacctcaaagttgcataaatgatcattgctttggtg

SEQ ID NO: 41509 - DNA, 2522 bp, Zea Mays
gtcctccccttaacgcacctcatcgagtaggggtcctatcatcgagtcatcgttcagagacagaggctggtcgatcgtcggtgactgatggcgatggcggcggcgcaattggaggcggaggaggagctgcggctggaactggaggcggtggcggcggtgtacggagacgacgtccgcgtgctccgcgacctcccaccgcacctcttcgtccacgtgcggccccgcaccgccgacgacacctcgcagcaggtgtgtctcatctcgccgcaccccacccctcgtgcttccatccctgccattgagtgacaagagtcgggggtagacgactcgattgatcaatcggccgattggacggtccgctgctctgcccggtagtattattcggtagcaactggtgggggagttgccgcctttttctgagctgaaccctagctgttgagtagaggtggatgttagcttcaagttgaactttaggtattctggttgcagggtttaggtattttgtggttagctgttccggacttccagatcaattgagttaggtatatatggtgtcttcatactgatgctattgttttagttaacaggattactctgatcaattgctgcattgtgttaccatgattgacctgatgctgctttcttgacagacaagagggtatatgctttgttgctaagttgttcccacttgtgcgagcagtcaagtgcactttctggttaattgtgcaatgctacaattacaacattgaacctttatgtaggaagctgaacttggacgactgggatcctaagcagaagagccactatccttgtaggctgtttttcgaaacttgtttcctacgagttgttgtttcatctcttacaatgataatcaactaatcgtaatggaagcctttgtccaaatgccagcagtaacttcttggtgtttcttttgttgaaaatcccttcatgtccattttccatgagctttctagtcactgtaattgtagcatcacctcttttccatcatatgaggttgaacgcatagataaccatttactgtttgttttcataaatttggttttctctgtttcagttcgtggagctctttcttggcattaaagcatcttcacagtatccgaaggaaccaccacatatttatgctgtggaaagtaagggccttgatgagaaccgacagatatatcttatcaccagcatccagaacaaggcaaacgaactttcaaactgtccaatgcttgtgacgttatgtgaggaagctggagagatcctctcgaacatgaatcatccagcaggggattgtccattgtgtctatatcctttaatgggagaggataaggttggctcggagttgccatttatgaagttgatgtcatgctaccattgcttccacagtgactgcattatgagatggtgggaatggctccaacatggtgacacaaacccaaaggagcccaatactggagacaagcattataatgtgaatcagccaagaggattttgtcctgtttgccgcaaagtgttcgatgagaaggatattgagcatgttcgtgatttgttgggtgacaatacttccaggctggcatcactaacagttgaccttggtgaagatgaaaaggaattgctccattccgaggctgagcaaaacaggagaaaaagaatcgagtcacttgttaatctgcagcaagaactaaacggcctgattgaaccaaagaaagaccttgccatacaaccaggaatgtacgtttccgttcctcccagcacgccagacacagctgaagaagagaatgctgatcccagccaaggcacggctacttcgacctcagaaactgagcaacgtggccaggcaagcaacgccagcagcaacaagccgaagaatccaggccatcgaaggagaaacagagctaatgcatcaagacgacagcctcacggccagggccagccagctaggcagcagtggcagaggaaagaagcaggcacttcacaccaataaaacaacatcgaagcaacgaggaggatgtgacctgtgagttgtttttgtcggctatgtacatcaatgtcgtgccttgctttcgtctcataataattgcgagccatggtatgacaatgttttggcgctgctatggaagttccatgcaagtgatactctggaaagaaccctgcaccggattctatgggagtagtataaagcacatgcatgcttggctagtacatacaatatctgattttttgtgtgtgtgtcattgccaggtactatgttcaaactgattgtccatagtcagaaaagcaactgattacactgtttgttactctttgagttgcatcatgtgtttgaaatacatacattacagcttaggtcatgtgggacattacaatataaagcactgcatgcagaatttgcaggggtcggctatgttggtaacccaataacaatgcatacctgtaaggtgctattgttttgtccgctactaaatcatagcactccaaattacctcaaagttgcataaatgatcattgctttggtg

SEQ ID NO: 41510 - DNA, 2539 bp, Zea Mays
gtcctccccttaacgcacctcatcgagtaggggtcctatcatcgagtcatcgttcagagacagaggctggtcgatcgtcggtgactgatggcgatggcggcggcgcaattggaggcggaggaggagctgcggctggaactggaggcggtggcggcggtgtacggagacgacgtccgcgtgctccgcgacctcccaccgcacctcttcgtccacgtgcggccccgcaccgccgacgacacctcgcagcaggtgtgtctcatctcgccgcaccccacccctcgtgcttccatccctgccattgagtgacaagagtcgggggtagacgactcgattgatcaatcggccgattggacggtccgctgctctgcccggtagtattattcggtagcaactggtgggggagttgccgcctttttctgagctgaaccctagctgttgagtagaggtggatgttagcttcaagttgaactttaggtattctggttgcagggtttaggtattttgtggttagctgttccggacttccagatcaattgagttaggtatatatggtgtcttcatactgatgctattgttttagttaacaggattactctgatcaattgctgcattgtgttaccatgattgacctgatgctgctttcttgacagacaagagggtatatgctttgttgctaagttgttcccacttgtgcgagcagtcaagtgcactttctggttaattgtgcaatgctacaattacaacattgaacctttatgtaggaagctgaacttggacgactgggatcctaagcagaagagccactatccttgtaggctgtttttcgaaacttgtttcctacgagttgttgtttcatctcttacaatgataatcaactaatcgtaatggaagcctttgtccaaatgccagcagtaacttcttggtgtttcttttgttgaaaatcccttcatgtccattttccatgagctttctagtcactgtaattgtagcatcacctcttttccatcatatgaggttgaacgcatagataaccatttactgtttgttttcataaatttggttttctctgtttcagttcgtggagctctttcttggcattaaagcatcttcacagccaaattggatttgcagtatccgaaggaaccaccacatatttatgctgtggaaagtaagggccttgatgagaaccgacagatatatcttatcaccagcatccagaacaaggcaaacgaactttcaaactgtccaatgcttgtgacgttatgtgaggaagctggagagatcctctcgaacatgaatcatccagcaggggattgtccattgtgtctatatcctttaatgggagaggataaggttggctcggagttgccatttatgaagttgatgtcatgctaccattgcttccacagtgactgcattatgagatggtgggaatggctccaacatggtgacacaaacccaaaggagcccaatactggagacaagcattataatgtgaatcagccaagaggattttgtcctgtttgccgcaaagtgttcgatgagaaggatattgagcatgttcgtgatttgttgggtgacaatacttccaggctggcatcactaacagttgaccttggtgaagatgaaaaggaattgctccattccgaggctgagcaaaacaggagaaaaagaatcgagtcacttgttaatctgcagcaagaactaaacggcctgattgaaccaaagaaagaccttgccatacaaccaggaatgtacgtttccgttcctcccagcacgccagacacagctgaagaagagaatgctgatcccagccaaggcacggctacttcgacctcagaaactgagcaacgtggccaggcaagcaacgccagcagcaacaagccgaagaatccaggccatcgaaggagaaacagagctaatgcatcaagacgacagcctcacggccagggccagccagctaggcagcagtggcagaggaaagaagcaggcacttcacaccaataaaacaacatcgaagcaacgaggaggatgtgacctgtgagttgtttttgtcggctatgtacatcaatgtcgtgccttgctttcgtctcataataattgcgagccatggtatgacaatgttttggcgctgctatggaagttccatgcaagtgatactctggaaagaaccctgcaccggattctatgggagtagtataaagcacatgcatgcttggctagtacatacaatatctgattttttgtgtgtgtgtcattgccaggtactatgttcaaactgattgtccatagtcagaaaagcaactgattacactgtttgttactctttgagttgcatcatgtgtttgaaatacatacattacagcttaggtcatgtgggacattacaatataaagcactgcatgcagaatttgcaggggtcggctatgttggtaacccaataacaatgcatacctgtaaggtgctattgttttgtccgctactaaatcatagcactccaaattacctcaaagttgcataaatgatcattgctttggtg

SEQ ID NO: 41511 - DNA, 2010 bp, Zea Mays
gtcctccccttaacgcacctcatcgagtaggggtcctatcatcgagtcatcgttcagagacagaggctggtcgatcgtcggtgactgatggcgatggcggcggcgcaattggaggcggaggaggagctgcggctggaactggaggcggtggcggcggtgtacggagacgacgtccgcgtgctccgcgacctcccaccgcacctcttcgtccacgtgcggccccgcaccgccgacgacacctcgcagcaggaagctgaacttggacgactgggatcctaagcagaagagccactatccttgtaggctgtttttcgaaacttgtttcctacgagttgttgtttcatctcttacaatgataatcaactaatcgtaatggaagcctttgtccaaatgccagcagtaacttcttggtgtttcttttgttgaaaatcccttcatgtccattttccatgagctttctagtcactgtaattgtagcatcacctcttttccatcatatgaggttgaacgcatagataaccatttactgtttgttttcataaatttggttttctctgtttcagttcgtggagctctttcttggcattaaagcatcttcacagtatccgaaggaaccaccacatatttatgctgtggaaagtaagggccttgatgagaaccgacagatatatcttatcaccagcatccagaacaaggcaaacgaactttcaaactgtccaatgcttgtgacgttatgtgaggaagctggagagatcctctcgaacatgaatcatccagcaggggattgtccattgtgtctatatcctttaatgggagaggataaggttggctcggagttgccatttatgaagttgatgtcatgctaccattgcttccacagtgactgcattatgagatggtgggaatggctccaacatggtgacacaaacccaaaggagcccaatactggagacaagcattataatgtgaatcagccaagaggattttgtcctgtttgccgcaaagtgttcgatgagaaggatattgagcatgttcgtgatttgttgggtgacaatacttccaggctggcatcactaacagttgaccttggtgaagatgaaaaggaattgctccattccgaggctgagcaaaacaggagaaaaagaatcgagtcacttgttaatctgcagcaagaactaaacggcctgattgaaccaaagaaagaccttgccatacaaccaggaatgtacgtttccgttcctcccagcacgccagacacagctgaagaagagaatgctgatcccagccaaggcacggctacttcgacctcagaaactgagcaacgtggccaggcaagcaacgccagcagcaacaagccgaagaatccaggccatcgaaggagaaacagagctaatgcatcaagacgacagcctcacggccagggccagccagctaggcagcagtggcagaggaaagaagcaggcacttcacaccaataaaacaacatcgaagcaacgaggaggatgtgacctgtgagttgtttttgtcggctatgtacatcaatgtcgtgccttgctttcgtctcataataattgcgagccatggtatgacaatgttttggcgctgctatggaagttccatgcaagtgatactctggaaagaaccctgcaccggattctatgggagtagtataaagcacatgcatgcttggctagtacatacaatatctgattttttgtgtgtgtgtcattgccaggtactatgttcaaactgattgtccatagtcagaaaagcaactgattacactgtttgttactctttgagttgcatcatgtgtttgaaatacatacattacagcttaggtcatgtgggacattacaatataaagcactgcatgcagaatttgcaggggtcggctatgttggtaacccaataacaatgcatacctgtaaggtgctattgttttgtccgctactaaatcatagcactccaaattacctcaaagttgcataaatgatcattgctttggtg

SEQ ID NO: 41512 - DNA, 2032 bp, Zea Mays
gtcctccccttaacgcacctcatcgagtaggggtcctatcatcgagtcatcgttcagagacagaggctggtcgatcgtcggtgactgatggcgatggcggcggcgcaattggaggcggaggaggagctgcggctggaactggaggcggtggcggcggtgtacggagacgacgtccgcgtgctccgcgacctcccaccgcacctcttcgtccacgtgcggccccgcaccgccgacgacacctcgcagcaggaagctgaacttggacgactgggatcctaagcagaagagccactatccttgtaggctgtttttcgaaacttgtttcctacgagttgttgtttcatctcttacaatgataatcaactaatcgtaatggaagcctttgtccaaatgccagcagtaacttcttggtgtttcttttgttgaaaatcccttcatgtccattttccatgagctttctagtcactgtaattgtagcatcacctcttttccatcatatgaggttgaacgcatagataaccatttactgtttgttttcataaatttggttttctctgtttcagttcgtggagctctttcttggcattaaagcatcttcacagtatccgaaggaaccaccacatatttatgctgtggaaagtaagggccttgatgagaaccgacagatatatcttatcaccagcatccagaacaaggcaaacgaactttcaaactgtccaatgcttgtgacgttatgtgaggaagctggagagatcctctcgaacatgaatcatccagcaggggattgtccattgtgtctatatcctttaatgggagaggataaggttggctcggagttgccatttatgaagttgatgtcatgctaccattgcttccacagtgactgcattatgagatggtgggaatggctccaacatggtgacacaaacccaaaggagcccaatactggagggtctcgatttgtccagctcagacaagcattataatgtgaatcagccaagaggattttgtcctgtttgccgcaaagtgttcgatgagaaggatattgagcatgttcgtgatttgttgggtgacaatacttccaggctggcatcactaacagttgaccttggtgaagatgaaaaggaattgctccattccgaggctgagcaaaacaggagaaaaagaatcgagtcacttgttaatctgcagcaagaactaaacggcctgattgaaccaaagaaagaccttgccatacaaccaggaatgtacgtttccgttcctcccagcacgccagacacagctgaagaagagaatgctgatcccagccaaggcacggctacttcgacctcagaaactgagcaacgtggccaggcaagcaacgccagcagcaacaagccgaagaatccaggccatcgaaggagaaacagagctaatgcatcaagacgacagcctcacggccagggccagccagctaggcagcagtggcagaggaaagaagcaggcacttcacaccaataaaacaacatcgaagcaacgaggaggatgtgacctgtgagttgtttttgtcggctatgtacatcaatgtcgtgccttgctttcgtctcataataattgcgagccatggtatgacaatgttttggcgctgctatggaagttccatgcaagtgatactctggaaagaaccctgcaccggattctatgggagtagtataaagcacatgcatgcttggctagtacatacaatatctgattttttgtgtgtgtgtcattgccaggtactatgttcaaactgattgtccatagtcagaaaagcaactgattacactgtttgttactctttgagttgcatcatgtgtttgaaatacatacattacagcttaggtcatgtgggacattacaatataaagcactgcatgcagaatttgcaggggtcggctatgttggtaacccaataacaatgcatacctgtaaggtgctattgttttgtccgctactaaatcatagcactccaaattacctcaaagttgcataaatgatcattgctttggtg

SEQ ID NO: 41513 - DNA, 1551 bp, Zea Mays
aaaaaagagaaaaagaagaaagaaaaagactacacactccagctatctaaccaagctggcaatgcaaatcttttgttgccatggattattatttaggaaaatgtacacgaagtcacaaacttgtagttactggttaagtatccgaaggaaccaccacatatttatgctgtggaaagtaagggccttgatgagaaccgacagatatatcttatcaccagcatccagaacaaggcaaacgaactttcaaactgtccaatgcttgtgacgttatgtgaggaagctggagagatcctctcgaacatgaatcatccagcaggggattgtccattgtgtctatatcctttaatgggagaggataaggttggctcggagttgccatttatgaagttgatgtcatgctaccattgcttccacagtgactgcattatgagatggtgggaatggctccaacatggtgacacaaacccaaaggagcccaatactggagctcagacaagcattataatgtgaatcagccaagaggattttgtcctgtttgccgcaaagtgttcgatgagaaggatattgagcatgttcgtgatttgttgggtgacaatacttccaggctggcatcactaacagttgaccttggtgaagatgaaaaggaattgctccattccgaggctgagcaaaacaggagaaaaagaatcgagtcacttgttaatctgcagcaagaactaaacggcctgattgaaccaaagaaagaccttgccatacaaccaggaatgtacgtttccgttcctcccagcacgccagacacagctgaagaagagaatgctgatcccagccaaggcacggctacttcgacctcagaaactgagcaacgtggccaggcaagcaacgccagcagcaacaagccgaagaatccaggccatcgaaggagaaacagagctaatgcatcaagacgacagcctcacggccagggccagccagctaggcagcagtggcagaggaaagaagcaggcacttcacaccaataaaacaacatcgaagcaacgaggaggatgtgacctgtgagttgtttttgtcggctatgtacatcaatgtcgtgccttgctttcgtctcataataattgcgagccatggtatgacaatgttttggcgctgctatggaagttccatgcaagtgatactctggaaagaaccctgcaccggattctatgggagtagtataaagcacatgcatgcttggctagtacatacaatatctgattttttgtgtgtgtgtcattgccaggtactatgttcaaactgattgtccatagtcagaaaagcaactgattacactgtttgttactctttgagttgcatcatgtgtttgaaatacatacattacagcttaggtcatgtgggacattacaatataaagcactgcatgcagaatttgcaggggtcggctatgttggtaacccaataacaatgcatacctgtaaggtgctattgttttgtccgctactaaatcatagcactccaaattacctcaaagttgcataaatgatcattgctttggtg

SEQ ID NO: 41514 - DNA, 1546 bp, Zea Mays
aaaaagactacacactccagctatctaaccaagctggcaatgcaaatcttttgttgccatggattattatttaggaaaatgtacacgaagtcacaaacttgtagttactggttaagtatccgaaggaaccaccacatatttatgctgtggaaagtaagggccttgatgagaaccgacagatatatcttatcaccagcatccagaacaaggcaaacgaactttcaaactgtccaatgcttgtgacgttatgtgaggaagctggagagatcctctcgaacatgaatcatccagcaggggattgtccattgtgtctatatcctttaatgggagaggataaggttggctcggagttgccatttatgaagttgatgtcatgctaccattgcttccacagtgactgcattatgagatggtgggaatggctccaacatggtgacacaaacccaaaggagcccaatactggagggtctcgatttgtccagctcagacaagcattataatgtgaatcagccaagaggattttgtcctgtttgccgcaaagtgttcgatgagaaggatattgagcatgttcgtgatttgttgggtgacaatacttccaggctggcatcactaacagttgaccttggtgaagatgaaaaggaattgctccattccgaggctgagcaaaacaggagaaaaagaatcgagtcacttgttaatctgcagcaagaactaaacggcctgattgaaccaaagaaagaccttgccatacaaccaggaatgtacgtttccgttcctcccagcacgccagacacagctgaagaagagaatgctgatcccagccaaggcacggctacttcgacctcagaaactgagcaacgtggccaggcaagcaacgccagcagcaacaagccgaagaatccaggccatcgaaggagaaacagagctaatgcatcaagacgacagcctcacggccagggccagccagctaggcagcagtggcagaggaaagaagcaggcacttcacaccaataaaacaacatcgaagcaacgaggaggatgtgacctgtgagttgtttttgtcggctatgtacatcaatgtcgtgccttgctttcgtctcataataattgcgagccatggtatgacaatgttttggcgctgctatggaagttccatgcaagtgatactctggaaagaaccctgcaccggattctatgggagtagtataaagcacatgcatgcttggctagtacatacaatatctgattttttgtgtgtgtgtcattgccaggtactatgttcaaactgattgtccatagtcagaaaagcaactgattacactgtttgttactctttgagttgcatcatgtgtttgaaatacatacattacagcttaggtcatgtgggacattacaatataaagcactgcatgcagaatttgcaggggtcggctatgttggtaacccaataacaatgcatacctgtaaggtgctattgttttgtccgctactaaatcatagcactccaaattacctcaaagttgcataaatgatcattgctttggtg

SEQ ID NO: 41515 - DNA, 1514 bp, Zea Mays
cacactccagctatctaaccaagctggcaatgcaaatcttttgttgccatggattattatttaggaaaatgtacacgaagtcacaaacttgtagttactggttaagtatccgaaggaaccaccacatatttatgctgtggaaagtaagggccttgatgagaaccgacagatatatcttatcaccagcatccagaacaaggcaaacgaactttcaaactgtccaatgcttgtgacgttatgtgaggaagctggagagatcctctcgaacatgaatcatccagcaggggattgtccattgtgtctatatcctttaatgggagaggataaggttggctcggagttgccatttatgaagttgatgtcatgctaccattgcttccacagtgactgcattatgagatggtgggaatggctccaacatggtgacacaaacccaaaggagcccaatactggagacaagcattataatgtgaatcagccaagaggattttgtcctgtttgccgcaaagtgttcgatgagaaggatattgagcatgttcgtgatttgttgggtgacaatacttccaggctggcatcactaacagttgaccttggtgaagatgaaaaggaattgctccattccgaggctgagcaaaacaggagaaaaagaatcgagtcacttgttaatctgcagcaagaactaaacggcctgattgaaccaaagaaagaccttgccatacaaccaggaatgtacgtttccgttcctcccagcacgccagacacagctgaagaagagaatgctgatcccagccaaggcacggctacttcgacctcagaaactgagcaacgtggccaggcaagcaacgccagcagcaacaagccgaagaatccaggccatcgaaggagaaacagagctaatgcatcaagacgacagcctcacggccagggccagccagctaggcagcagtggcagaggaaagaagcaggcacttcacaccaataaaacaacatcgaagcaacgaggaggatgtgacctgtgagttgtttttgtcggctatgtacatcaatgtcgtgccttgctttcgtctcataataattgcgagccatggtatgacaatgttttggcgctgctatggaagttccatgcaagtgatactctggaaagaaccctgcaccggattctatgggagtagtataaagcacatgcatgcttggctagtacatacaatatctgattttttgtgtgtgtgtcattgccaggtactatgttcaaactgattgtccatagtcagaaaagcaactgattacactgtttgttactctttgagttgcatcatgtgtttgaaatacatacattacagcttaggtcatgtgggacattacaatataaagcactgcatgcagaatttgcaggggtcggctatgttggtaacccaataacaatgcatacctgtaaggtgctattgttttgtccgctactaaatcatagcactccaaattacctcaaagttgcataaatgatcattgctttggtg

SEQ ID NO: 41516 - DNA, 1428 bp, Zea Mays
ggaaaatgtacacgaagtcacaaacttgtagttactggttaagtatccgaaggaaccaccacatatttatgctgtggaaagtaagggccttgatgagaaccgacagatatatcttatcaccagcatccagaacaaggcaaacgaactttcaaactgtccaatgcttgtgacgttatgtgaggaagctggagagatcctctcgaacatgaatcatccagcaggggattgtccattgtgtctatatcctttaatgggagaggataaggttggctcggagttgccatttatgaagttgatgtcatgctaccattgcttccacagtgactgcattatgagatggtgggaatggctccaacatggtgacacaaacccaaaggagcccaatactggagccaagaggattttgtcctgtttgccgcaaagtgttcgatgagaaggatattgagcatgttcgtgatttgttgggtgacaatacttccaggctggcatcactaacagttgaccttggtgaagatgaaaaggaattgctccattccgaggctgagcaaaacaggagaaaaagaatcgagtcacttgttaatctgcagcaagaactaaacggcctgattgaaccaaagaaagaccttgccatacaaccaggaatgtacgtttccgttcctcccagcacgccagacacagctgaagaagagaatgctgatcccagccaaggcacggctacttcgacctcagaaactgagcaacgtggccaggcaagcaacgccagcagcaacaagccgaagaatccaggccatcgaaggagaaacagagctaatgcatcaagacgacagcctcacggccagggccagccagctaggcagcagtggcagaggaaagaagcaggcacttcacaccaataaaacaacatcgaagcaacgaggaggatgtgacctgtgagttgtttttgtcggctatgtacatcaatgtcgtgccttgctttcgtctcataataattgcgagccatggtatgacaatgttttggcgctgctatggaagttccatgcaagtgatactctggaaagaaccctgcaccggattctatgggagtagtataaagcacatgcatgcttggctagtacatacaatatctgattttttgtgtgtgtgtcattgccaggtactatgttcaaactgattgtccatagtcagaaaagcaactgattacactgtttgttactctttgagttgcatcatgtgtttgaaatacatacattacagcttaggtcatgtgggacattacaatataaagcactgcatgcagaatttgcaggggtcggctatgttggtaacccaataacaatgcatacctgtaaggtgctattgttttgtccgctactaaatcatagcactccaaattacctcaaagttgcataaatgatcattgctttggtg

SEQ ID NO: 41517 - DNA, 1739 bp, Zea Mays
gtgatctatcgcttccccagaccccagaccccttttcccaacggccacactttcatcagttcccctttccacggcgccgccggaatccccacaaagcccccaaaaccctacggccacctcgccacccccaacgaaaacccagaccacgagatggcccccggtggagagggcaagccaagcacgggcggcggcggcggcggcgtcaagggtgggaggaagcgcaagttccttccccacgggaagccggtgcggaagggggcctacccgctgcgccccggcgtgcagggcttcttcatcacctgcgacggcggccgcgagcaccaggccacccgcgaggcgctctccctcctcgactccttctatgaagacctggtggatgggaaaggatcggatgagaagcctaaaaacattccagacaagccactgaacaaaaagataaagtttgaggactctgattcctcagatgatgaggatgaagacaactctggtgaggaagccgacaatgggaatgtgaatgatgtggagaaaggtgaaaccgctccatctgagaagcaacaggaggtgcttgatacctctaataccgcaagcaaggacaatactgctctatctgagaagaaagaggaggtgcttgatacctctgataccgtgagtaaggacaatgaggaacaagcagtcactgctgatgaaccaagagaaaagaagcaacgagtggaagatcctccagtttttgagcaggccgtgcaaaaagagactgctgatgaaccaaaggagtccactgataaaccaaaggagtccagtgaaaaaaatattgacgatttaattgatgaggacctgaaagaaataggggacaggaaaaagaggctctttgcaagcctcgagacaggctgcaatggatgcatattcattcaaatgcataaaagagcaggagaccctggtccagttgagattgtacaaaacatgatgtcatctgctgcattgactcgtaaacatatgtcaagatttattctgcgagttttgcctgttgaggtggcatgctatgcatctgaagaggaaataacaaaggcaattagtccccttattgaaaagtacttcccaaaagaatgctcctcaggtcataagtttgcagtgttatatgaagcaaggtcaaacacaggaattgatagaatgaaaatcataaacgcagcagcgaaatctgtaccacaacctcataaagttgacctgaagaacccagacaagactattgttgtccagattgcaaagaccatatgcatgattggagttgtggaaaggtacaaagagctctcgaagttcaacctaaggcagctgacctcaccggagtcggagaagtaagcctatgagtgacaaaatcttccaggcaaaacgtggaccaacttaaatcagcagcagcgtcaggtggttaggcgctagcgaattaaattaaggccggccgaacctcactgtcttgaaagattcagatgttctaatgtttaatgctttaccaccagtggttagtggttgctggttcatgcttcccaggggcttaccaaagacgtagaatctatcgttgcagctccattgctctgagcatttctatagcttgaataaatctgcgtgctaggtttctatgcatgagacctgaaatttaaagagatgttggggtccgtgattttctttgattccaactttgcaagggtctgctgttcatttatctgtttattacagaaaatgtcaattctccc

SEQ ID NO: 41518 - DNA, 1118 bp, Zea Mays
atcgcttccccagaccccagaccccttttcccaacggccacactttcatcagttcccctttccacggcgccgccggaatccccacaaagcccccaaaaccctacggccacctcgccacccccaacgaaaacccagaccacgagatggcccccggtggagagggcaagccaagcacgggcggcggcggcggcggcgtcaagggtgggaggaagcgcaagttccttccccacgggaagccggtgcggaagggggcctacccgctgcgccccggcgtgcagggcttcttcatcacctgcgacggcggccgcgagcaccaggccacccgcgaggcgctctccctcctcgactccttctatgaagacctggtggatgggaaaggatcggatgagaagcctaaaaacattccagacaagccactgaacaaaaagataaagtttgaggactctgattcctcagatgatgaggatgaagacaactctggtgaggaagccgacaatgggaatgtgaatgatgtggagaaaggtgaaaccgctccatctgagaagcaacaggaggtgcttgatacctctaataccgcaagcaaggacaatactgctctatctgagaagaaagaggaggtgcttgatacctctgataccgtgagtaaggacaatgaggaacaagcagtcactgctgatgaaccaagagaaaagaagcaacgagtggaagatcctccagtttttgagcaggccgtgcaaaaagagactgctgatgaaccaaaggagtccactgataaaccaaaggagtccagtgaaaaaaatattgacgatttaattgatgaggacctgaaagaaataggggacaggaaaaagaggctctttgcaagcctcgagacaggctgcaatggatgcatattcattcaaatgcataaaagagcaggagaccctggtccagttgagattgtacaaaacatgatgtcatctgctgcattgactcgtaaacatatgtcaagatttattctgcgagttttgcctgttgaggtggcatgctatgcatctgaagaggaaataacaaaggcaattagtccccttattgaaaaggaggaatgttctggtgacacagccgatagactactgact

SEQ ID NO: 41519 - DNA, 1731 bp, Zea Mays
atcgcttccccagaccccagaccccttttcccaacggccacactttcatcagttcccctttccacggcgccgccggaatccccacaaagcccccaaaaccctacggccacctcgccacccccaacgaaaacccagaccacgagatggcccccggtggagagggcaagccaagcacgggcggcggcggcggcggcgtcaagggtgggaggaagcgcaagttccttccccacgggaagccggtgcggaagggggcctacccgctgcgccccggcgtgcagggcttcttcatcacctgcgacggcggccgcgagcaccaggccacccgcgaggcgctctccctcctcgactcctctatgaagacctggtggatgggaaaggatcggatgagaagcctaaaaacattccagacaagccactgaacaaaaagataaagtttgaggactctgattcctcagatgatgaggatgaagacaactctggtgaggaagccgacaatgggaatgtgaatgatgtggagaaaggtgaaaccgctccatctgagaagcaacaggaggtgcttgatacctctaataccgcaagcaaggacaatactgctctatctgagaagaaagaggaggtgcttgatacctctgataccgtgagtaaggacaatgaggaacaagcagtcactgctgatgaaccaagagaaaagaagcaacgagtggaagatcctccagtttttgagcaggccgtgcaaaaagagactgctgatgaaccaaaggagtccactgataaaccaaaggagtccagtgaaaaaaatattgacgatttaattgatgaggacctgaaagaaataggggacaggaaaaagaggctctttgcaagcctcgagacaggctgcaatggatgcatattcattcaaatgcataaaagagcaggagaccctggtccagttgagattgtacaaaacatgatgtcatctgctgcattgactcgtaaacatatgtcaagatttattctgcgagttttgcctgttgaggtggcatgctatgcatctgaagaggaaataacaaaggcaattagtccccttattgaaaagtacttcccaaaagaatgctcctcaggtcataagtttgcagtgttatatgaagcaaggtcaaacacaggaattgatagaatgaaaatcataaacgcagcagcgaaatctgtaccacaacctcataaagttgacctgaagaacccagacaagactattgttgtccagattgcaaagaccatatgcatgattggagttgtggaaaggtacaaagagctctcgaagttcaacctaaggcagctgacctcaccggagtcggagaagtaagcctatgagtgacaaaatcttccaggcaaaacgtggaccaacttaaatcagcagcagcgtcaggtggttaggcgctagcgaattaaattaaggccggccgaacctcactgtcttgaaagattcagatgttctaatgtttaatgctttaccaccagtggttagtggttgctggttcatgcttcccaggggcttaccaaagacgtagaatctatcgttgcagctccattgctctgagcatttctatagcttgaataaatctgcgtgctaggtttctatgcatgagacctgaaatttaaagagatgttggggtccgtgattttctttgattccaactttgcaagggtctgctgttcatttatctgtttattacagaaaatgtcaattctccc

SEQ ID NO: 41520 - DNA, 2412 bp, Zea Mays
gggcattgttggaatcagcctgttggccacgcgggccccagccccgactccccgagcaccatcagcaattcagcagtctaccagtcctccctccgcggccgtctgctacttctgtgatctctcctcccccgtctttcgtctccggttgcatccccgacgtcctcgcctgcggtgggagggcggggcggaggagctggaggttcctggtagcggctgccgccggccatggagaagaggaagcggatcctggagctgcgggatcggctggaccggacgctggcgatgcccgacctcgcggaggaggcctcgctcagggcgctggtgaagaagcagatcctggcgtcgtccctgcccggctccgatcaaggtgacatcgatctcattgctgaaacgcgggcaaaagaagtctctgagtttcttgaaatgctagatacttcgagggacggacgatcttccaaggtccatgggctgccacagaaggagtggaaggtgaagcaagatacagaccaattaagagtgatgtaccgtgagggtccagaggggacaccatttcataccttacttgctgaaggctttgcagatggacctattgacgtttgtacatgtgtgtcatgggaatcaactttatacaaaaaatggtttccacaatacaacctgccaacttttagaattgatcagtcaggctgcttgaaaaaagtgcggattggtgaagagatttgtatggtcagaaagggtgaaggttccatggccggtttcagagagagaggctattctacactattttgaactggaatatcttaaagaagatgtcgtaattgtgataatgaaaactttatcagacttggatgccatagatgttcgaacccatggatttagtagggatggaattcctgaagctggtgacacagttcggatagatgtgtttggaggctttgtattgcaacggattacaaaagaaagaagctttttcagggcaatagctaatatggatatcaagctagattttgttccaccatggttgatcaacttcatgtcaaggcaactaataggcagcgggcataagctgtatcaaaaggcagtcagcaccgtggccagtcatgatgatgactacaggaaagctttgagaggaccgctctacgtcaggatccgtgagtaccaggattctgatgacaaggcgaaggtggcagcaacagaggaaaatgctaccgaggcgccccctgataatgccactacacaaaatcgtttgtcactaacaaataccgtatcgaatagcgagattgtggaggagtccgaacagaacacatccgtcactgtggatagtcttccaactagccaacaaccctatgtgccagttgagcaagcatggcaggtcggaaacaggccatacaccagtcctgaggtggagcgtgcgctgtgcatattagacacttctattgcacttctcagaggcgatgataaggctggaaatgtcaccacgctacaaaatctgctcagttacgatgcatctttggaagcgagtactgctgctggttccgtaacttgtcaaacaaacgttcttaacgcagacagtcttccgaatggccatcctgttgccgcagcgccacaagactccagagagaaagctagcgatagtgccgcagaggaagaagacgccggcgacgaaaactctctgaaaaatccgacagcttccactgtgacgaagagtgtgtcgatgacattgcgaagtgcaataagggtgcacggtgaagagagcctggacactgatggcttcttccatcagaacggtttcagcaacagcaaggagtcaaggcgagcgaggaagtctaagaagagatggccctgctgcttaatccctaccactatgggatgatgtgggcccatcgtaggacctcgttcgttcaagttaagttgctgattttttgagtgtactattaacaaacagtaaactacagaaatttagcgcttcgtcagttacacgatgtgggttcagacggtatgttatagcgcgtagataatgtcttggtaaatgtaaagtagaatcgttgtaaacaacacgtaattcttctcacgagagctctgatttgggggtatatgggtaaagtatatgggtaaagtacatatactattattttcacgcatggtggttatgctcagcagagcatgtaaacgtataaaccactgttttatattatagactacactattataaactcgagcttgaaatagtgagtgtgatagagagttggatgggtagtttgccggagacagcctagcctaagattggatccttccggttggagaaggaattacattggggcattcagtgaactctaggagatgtgcatcataattcttctcacgagtttgtggcgtttgtttgttatggacagtagtctgcatggcgaaaaagtc

SEQ ID NO: 41521 - DNA, 2454 bp, Zea Mays
gaatcagcctgttggccacgcgggccccagccccgactccccgagcaccatcagcaattcagcagtctaccagtcctccctccgcggccgtctgctacttctgtgatctctcctcccccgtctttcgtctccggttgcatccccgacgtcctcgcctgcgttcctcatcttcagagtcgtgtcgtggggcgtgctaggtgggagggcggggcggaggagctggaggttcctggtagcggctgccgccggccatggagaagaggaagcggatcctggagctgcgggatcggctggaccggacgctggcgatgcccgacctcgcggaggaggcctcgctcagggcgctggtgaagaagcagatcctggcgtcgtccctgcccggctccgatcaaggtgacatcgatctcattgctgaaacgcgggcaaaagaagtctctgagtttcttgaaatgctagatacttcgagggacggacgatcttccaaggtccatgggctgccacagaaggagtggaaggtgaagcaagatacagaccaattaagagtgatgtaccgtgagggtccagaggggacaccatttcataccttacttgctgaaggctttgcagatggacctattgacgtttgtacatgtgtgtcatgggaatcaactttatacaaaaaatggtttccacaatacaacctgccaacttttagaattgatcagtcaggctgcttgaaaaaagtgcggattggtgaagagatttgtatggtcagaaagggtgaaggttccatggccggtttcagagagagaggctattctacactattttgaactggaatatcttaaagaagatgtcgtaattgtgataatgaaaactttatcagacttggatgccatagatgttcgaacccatggatttagtagggatggaattcctgaagctggtgacacagttcggatagatgtgtttggaggctttgtattgcaacggattacaaaagaaagaagctttttcagttaaatcctctgtcagggcaatagctaatatggatatcaagctagattttgttccaccatggttgatcaacttcatgtcaaggcaactaataggcagcgggcataagctgtatcaaaaggcagtcagcaccgtggccagtcatgatgatgactacaggaaagctttgagaggaccgctctacgtcaggatccgtgagtaccaggattctgatgacaaggcgaaggtggcagcaacagaggaaaatgctaccgaggcgccccctgataatgccactacacaaaatcgtttgtcactaacaaataccgtatcgaatagcgagattgtggaggagtccgaacagaacacatccgtcactgtggatagtcttccaactagccaacaaccctatgtgccagttgagcaagcatggcaggtcggaaacaggccatacaccagtcctgaggtggagcgtgcgctgtgcatattagacacttctattgcacttctcagaggcgatgataaggctggaaatgtcaccacgctacaaaatctgctcagttacgatgcatctttggaagcgagtactgctgctggttccgtaacttgtcaaacaaacgttcttaacgcagacagtcttccgaatggccatcctgttgccgcagcgccacaagactccagagagaaagctagcgatagtgccgcagaggaagaagacgccggcgacgaaaactctctgaaaaatccgacagcttccactgtgacgaagagtgtgtcgatgacattgcgaagtgcaataagggtgcacggtgaagagagcctggacactgatggcttcttccatcagaacggtttcagcaacagcaaggagtcaaggcgagcgaggaagtctaagaagagatggccctgctgcttaatccctaccactatgggatgatgtgggcccatcgtaggacctcgttcgttcaagttaagttgctgattttttgagtgtactattaacaaacagtaaactacagaaatttagcgcttcgtcagttacacgatgtgggttcagacggtatgttatagcgcgtagataatgtcttggtaaatgtaaagtagaatcgttgtaaacaacacgtaattcttctcacgagagctctgatttgggggtatatgggtaaagtatatgggtaaagtacatatactattattttcacgcatggtggttatgctcagcagagcatgtaaacgtataaaccactgttttatattatagactacactattataaactcgagcttgaaatagtgagtgtgatagagagttggatgggtagtttgccggagacagcctagcctaagattggatccttccggttggagaaggaattacattggggcattcagtgaactctaggagatgtgcatcataattcttctcacgagtttgtggcgtttgtttgttatggacagtagtctgcatggcgaaaaagtc

SEQ ID NO: 41522 - DNA, 2272 bp, Zea Mays
cccagccccgactccccgagcaccatcagcaattcagcagtctaccagtcctccctccgcggccgtctgctacttctgtgatctctcctcccccgtctttcgtctccggttgcatccccgacgtcctcgcctgcggtgggagggcggggcggaggagctggaggttcctggtagcggctgccgccggccatggagaagaggaagcggatcctggagctgcgggatcggctggaccggacgctggcgatgcccgacctcgcggaggaggcctcgctcagggcgctggtgaagaagcagatcctggcgtcgtccctgcccggctccgatcaaggtgacatcgatctcattgctgaaacgcgggcaaaagaagtctctgagtttcttgaaatgctagatacttcgagggacggacgatcttccaaggtccatgggctgccacagaaggagtggaaggtgaagcaagatacagaccaattaagagtgatgtaccgtgagggtccagaggggacaccatttcataccttacttgctgaaggctttgcagatggacctattgacgtttgtacatgtgtgtcatgggaatcaactttatacaaaaaatggtttccacaatacaacctgccaacttttagaattgatcagtcaggctgcttgaaaaaagtgcggattggtgaagagatttgtatggtcagttatcagacttggatgccatagatgttcgaacccatggatttagtagggatggaattcctgaagctggtgacacagttcggatagatgtgtttggaggctttgtattgcaacggattacaaaagaaagaagctttttcagggcaatagctaatatggatatcaagctagattttgttccaccatggttgatcaacttcatgtcaaggcaactaataggcagcgggcataagctgtatcaaaaggcagtcagcaccgtggccagtcatgatgatgactacaggaaagctttgagaggaccgctctacgtcaggatccgtgagtaccaggattctgatgacaaggcgaaggtggcagcaacagaggaaaatgctaccgaggcgccccctgataatgccactacacaaaatcgtttgtcactaacaaataccgtatcgaatagcgagattgtggaggagtccgaacagaacacatccgtcactgtggatagtcttccaactagccaacaaccctatgtgccagttgagcaagcatggcaggtcggaaacaggccatacaccagtcctgaggtggagcgtgcgctgtgcatattagacacttctattgcacttctcagaggcgatgataaggctggaaatgtcaccacgctacaaaatctgctcagttacgatgcatctttggaagcgagtactgctgctggttccgtaacttgtcaaacaaacgttcttaacgcagacagtcttccgaatggccatcctgttgccgcagcgccacaagactccagagagaaagctagcgatagtgccgcagaggaagaagacgccggcgacgaaaactctctgaaaaatccgacagcttccactgtgacgaagagtgtgtcgatgacattgcgaagtgcaataagggtgcacggtgaagagagcctggacactgatggcttcttccatcagaacggtttcagcaacagcaaggagtcaaggcgagcgaggaagtctaagaagagatggccctgctgcttaatccctaccactatgggatgatgtgggcccatcgtaggacctcgttcgttcaagttaagttgctgattttttgagtgtactattaacaaacagtaaactacagaaatttagcgcttcgtcagttacacgatgtgggttcagacggtatgttatagcgcgtagataatgtcttggtaaatgtaaagtagaatcgttgtaaacaacacgtaattcttctcacgagagctctgatttgggggtatatgggtaaagtatatgggtaaagtacatatactattattttcacgcatggtggttatgctcagcagagcatgtaaacgtataaaccactgttttatattatagactacactattataaactcgagcttgaaatagtgagtgtgatagagagttggatgggtagtttgccggagacagcctagcctaagattggatccttccggttggagaaggaattacattggggcattcagtgaactctaggagatgtgcatcataattcttctcacgagtttgtggcgtttgtttgttatggacagtagtctgcatggcgaaaaagtc

SEQ ID NO: 41523 - DNA, 2122 bp, Zea Mays
gcggccgtctgctacttctgtgatctctcctcccccgtctttcgtctccggttgcatccccgacgtcctcgcctgcggtgacatcgatctcattgctgaaacgcgggcaaaagaagtctctgagtttcttgaaatgctagatacttcgagggacggacgatcttccaaggtccatgggctgccacagaaggagtggaaggtgaagcaagatacagaccaattaagagtgatgtaccgtgagggtccagaggggacaccatttcataccttacttgctgaaggctttgcagatggacctattgacgtttgtacatgtgtgtcatgggaatcaactttatacaaaaaatggtttccacaatacaacctgccaacttttagaattgatcagtcaggctgcttgaaaaaagtgcggattggtgaagagatttgtatggtcagaaagggtgaaggttccatggccggtttcagagagagaggctattctacactattttgaactggaatatcttaaagaagatgtcgtaattgtgataatgaaaactttatcagacttggatgccatagatgttcgaacccatggatttagtagggatggaattcctgaagctggtgacacagttcggatagatgtgtttggaggctttgtattgcaacggattacaaaagaaagaagctttttcagggcaatagctaatatggatatcaagctagattttgttccaccatggttgatcaacttcatgtcaaggcaactaataggcagcgggcataagctgtatcaaaaggcagtcagcaccgtggccagtcatgatgatgactacaggaaagctttgagaggaccgctctacgtcaggatccgtgagtaccaggattctgatgacaaggcgaaggtggcagcaacagaggaaaatgctaccgaggcgccccctgataatgccactacacaaaatcgtttgtcactaacaaataccgtatcgaatagcgagattgtggaggagtccgaacagaacacatccgtcactgtggatagtcttccaactagccaacaaccctatgtgccagttgagcaagcatggcaggtcggaaacaggccatacaccagtcctgaggtggagcgtgcgctgtgcatattagacacttctattgcacttctcagaggcgatgataaggctggaaatgtcaccacgctacaaaatctgctcagttacgatgcatctttggaagcgagtactgctgctggttccgtaacttgtcaaacaaacgttcttaacgcagacagtcttccgaatggccatcctgttgccgcagcgccacaagactccagagagaaagctagcgatagtgccgcagaggaagaagacgccggcgacgaaaactctctgaaaaatccgacagcttccactgtgacgaagagtgtgtcgatgacattgcgaagtgcaataagggtgcacggtgaagagagcctggacactgatggcttcttccatcagaacggtttcagcaacagcaaggagtcaaggcgagcgaggaagtctaagaagagatggccctgctgcttaatccctaccactatgggatgatgtgggcccatcgtaggacctcgttcgttcaagttaagttgctgattttttgagtgtactattaacaaacagtaaactacagaaatttagcgcttcgtcagttacacgatgtgggttcagacggtatgttatagcgcgtagataatgtcttggtaaatgtaaagtagaatcgttgtaaacaacacgtaattcttctcacgagagctctgatttgggggtatatgggtaaagtatatgggtaaagtacatatactattattttcacgcatggtggttatgctcagcagagcatgtaaacgtataaaccactgttttatattatagactacactattataaactcgagcttgaaatagtgagtgtgatagagagttggatgggtagtttgccggagacagcctagcctaagattggatccttccggttggagaaggaattacattggggcattcagtgaactctaggagatgtgcatcataattcttctcacgagtttgtggcgtttgtttgttatggacagtagtctgcatggcgaaaaagtc

SEQ ID NO: 41524 - DNA, 2570 bp, Zea Mays
gcggccgtctgctacttctgtgatctctcctcccccgtctttcgtctccggttgcatccccgacgtcctcgcctgcggtgggagggcggggcggaggagctggaggttcctggtagcggctgccgccggccatggagaagaggaagcggatcctggagctgcgggatcggctggaccggacgctggcgatgcccgacctcgcggaggaggcctcgctcagggcgctggtgaagaagcagatcctggcgtcgtccctgcccggctccgatcaaggtgacatcgatctcattgctgaaacgcgggcaaaagaagtctctgagtttcttgaaatgctagatacttcgagggacggacgatcttccaaggtccatgggctgccacagaaggagtggaaggtgaagcaagatacagaccaattaagagtgatgtaccgtgagggtccagaggggacaccatttcataccttacttgctgaaggctttgcagatggacctattgacgtttgtacatgtgtgtcatgggaatcaactttatacaaaaaatggtttccacaatacaacctgccaacttttagaattgatcagtcaggctgcttgaaaaaagtgcggattggtgaagagatttgtatggtcaggttggttgcagattacttgttacagttttacttatacttaggaaccaagactagcttagttggtggagggcatagatattttcccatacaacctaagttcattgcggcaaatttggggacctatttcttcatcttaattcttagtgaaaagccaccaagtccctcctaggttggtcaagtattttttagagtttttacttattcttcagtttatggtggttgtagctaatttgtttattcgctatttggaagaaagggtgaaggttccatggccggtttcagagagagaggctattctacactattttgaactggaatatcttaaagaagatgtcgtaattgtgataatgaaaactttatcagacttggatgccatagatgttcgaacccatggatttagtagggatggaattcctgaagctggtgacacagttcggatagatgtgtttggaggctttgtattgcaacggattacaaaagaaagaagctttttcagggcaatagctaatatggatatcaagctagattttgttccaccatggttgatcaacttcatgtcaaggcaactaataggcagcgggcataagctgtatcaaaaggcagtcagcaccgtggccagtcatgatgatgactacaggaaagctttgagaggaccgctctacgtcaggatccgtgagtaccaggattctgatgacaaggcgaaggtggcagcaacagaggaaaatgctaccgaggcgccccctgataatgccactacacaaaatcgtttgtcactaacaaataccgtatcgaatagcgagattgtggaggagtccgaacagaacacatccgtcactgtggatagtcttccaactagccaacaaccctatgtgccagttgagcaagcatggcaggtcggaaacaggccatacaccagtcctgaggtggagcgtgcgctgtgcatattagacacttctattgcacttctcagaggcgatgataaggctggaaatgtcaccacgctacaaaatctgctcagttacgatgcatctttggaagcgagtactgctgctggttccgtaacttgtcaaacaaacgttcttaacgcagacagtcttccgaatggccatcctgttgccgcagcgccacaagactccagagagaaagctagcgatagtgccgcagaggaagaagacgccggcgacgaaaactctctgaaaaatccgacagcttccactgtgacgaagagtgtgtcgatgacattgcgaagtgcaataagggtgcacggtgaagagagcctggacactgatggcttcttccatcagaacggtttcagcaacagcaaggagtcaaggcgagcgaggaagtctaagaagagatggccctgctgcttaatccctaccactatgggatgatgtgggcccatcgtaggacctcgttcgttcaagttaagttgctgattttttgagtgtactattaacaaacagtaaactacagaaatttagcgcttcgtcagttacacgatgtgggttcagacggtatgttatagcgcgtagataatgtcttggtaaatgtaaagtagaatcgttgtaaacaacacgtaattcttctcacgagagctctgatttgggggtatatgggtaaagtatatgggtaaagtacatatactattattttcacgcatggtggttatgctcagcagagcatgtaaacgtataaaccactgttttatattatagactacactattataaactcgagcttgaaatagtgagtgtgatagagagttggatgggtagtttgccggagacagcctagcctaagattggatccttccggttggagaaggaattacattggggcattcagtgaactctaggagatgtgcatcataattcttctcacgagtttgtggcgtttgtttgttatggacagtagtctgcatggcgaaaaagtc

SEQ ID NO: 41525 - DNA, 2399 bp, Zea Mays
gcggccgtctgctacttctgtgatctctcctcccccgtctttcgtctccggttgcatccccgacgtcctcgcctgcggtgacatcgatctcattgctgaaacgcgggcaaaagaagtctctgagtttcttgaaatgctagatacttcgagggacggacgatcttccaaggtccatgggctgccacagaaggagtggaaggtgaagcaagatacagaccaattaagagtgatgtaccgtgagggtccagaggggacaccatttcataccttacttgctgaaggctttgcagatggacctattgacgtttgtacatgtgtgtcatgggaatcaactttatacaaaaaatggtttccacaatacaacctgccaacttttagaattgatcagtcaggctgcttgaaaaaagtgcggattggtgaagagatttgtatggtcagggtgaaggttccatggccggtttcagagagagaggctattctacactattttgaactggaatatcttaaagaagatgtcgtaattgtgataatgaaaactgtgcgtacttcttcttctgcattttaagttcttttctgggaaactctccgtcattgtgataatgaattgttgccatatgccctagtttatcgtgtgcttattggcttgtttgcagttatcagacttggatgccatagatgttcgaacccatggatttagtagggatggaattcctgaagctggtgacacagttcggatagatgtgtttggaggctttgtattgcaacggattacaaaagaaagaagctttttcagggcaatagctaatatggatatcaagctagattttgttccaccatggttgatcaacttcatgtcaaggcaactaataggcagcgggcataagctgtatcaaaaggttagtggctggtaacattttgcacatttcagttcagctgtgttctctacaatagttttttttggaccatagtgtgtggtggaggtggtaaatcagggcatcagataaatactgcatgataattgatgagcatgagattcagcatttctattggaatgtcatgcaggcagtcagcaccgtggccagtcatgatgatgactacaggaaagctttgagaggaccgctctacgtcaggatccgtgagtaccaggattctgatgacaaggcgaaggtggcagcaacagaggaaaatgctaccgaggcgccccctgataatgccactacacaaaatcgtttgtcactaacaaataccgtatcgaatagcgagattgtggaggagtccgaacagaacacatccgtcactgtggatagtcttccaactagccaacaaccctatgtgccagttgagcaagcatggcaggtcggaaacaggccatacaccagtcctgaggtggagcgtgcgctgtgcatattagacacttctattgcacttctcagaggcgatgataaggctggaaatgtcaccacgctacaaaatctgctcagttacgatgcatctttggaagcgagtactgctgctggttccgtaacttgtcaaacaaacgttcttaacgcagacagtcttccgaatggccatcctgttgccgcagcgccacaagactccagagagaaagctagcgatagtgccgcagaggaagaagacgccggcgacgaaaactctctgaaaaatccgacagcttccactgtgacgaagagtgtgtcgatgacattgcgaagtgcaataagggtgcacggtgaagagagcctggacactgatggcttcttccatcagaacggtttcagcaacagcaaggagtcaaggcgagcgaggaagtctaagaagagatggccctgctgcttaatccctaccactatgggatgatgtgggcccatcgtaggacctcgttcgttcaagttaagttgctgattttttgagtgtactattaacaaacagtaaactacagaaatttagcgcttcgtcagttacacgatgtgggttcagacggtatgttatagcgcgtagataatgtcttggtaaatgtaaagtagaatcgttgtaaacaacacgtaattcttctcacgagagctctgatttgggggtatatgggtaaagtatatgggtaaagtacatatactattattttcacgcatggtggttatgctcagcagagcatgtaaacgtataaaccactgttttatattatagactacactattataaactcgagcttgaaatagtgagtgtgatagagagttggatgggtagtttgccggagacagcctagcctaagattggatccttccggttggagaaggaattacattggggcattcagtgaactctaggagatgtgcatcataattcttctcacgagtttgtggcgtttgtttgttatggacagtagtctgcatggcgaaaaagtc

SEQ ID NO: 41526 - DNA, 824 bp, Zea Mays
tgaaggattattcgcttctttttgcgagagaaagctagcgatagtgccgcagaggaagaagacgccggcgacgaaaactctctgaaaaatccgacagcttccactgtgacgaagagtgtgtcgatgacattgcgaagtgcaataagggtgcacggtgaagagagcctggacactgatggcttcttccatcagaacggtttcagcaacagcaaggagtcaaggcgagcgaggaagtctaagaagagatggccctgctgcttaatccctaccactatgggatgatgtgggcccatcgtaggacctcgttcgttcaagttaagttgctgattttttgagtgtactattaacaaacagtaaactacagaaatttagcgcttcgtcagttacacgatgtgggttcagacggtatgttatagcgcgtagataatgtcttggtaaatgtaaagtagaatcgttgtaaacaacacgtaattcttctcacgagagctctgatttgggggtatatgggtaaagtatatgggtaaagtacatatactattattttcacgcatggtggttatgctcagcagagcatgtaaacgtataaaccactgttttatattatagactacactattataaactcgagcttgaaatagtgagtgtgatagagagttggatgggtagtttgccggagacagcctagcctaagattggatccttccggttggagaaggaattacattggggcattcagtgaactctaggagatgtgcatcataattcttctcacgagtttgtggcgtttgtttgttatggacagtagtctgcatggcgaaaaagtc

SEQ ID NO: 41527 - DNA, 1899 bp, Zea Mays
gtgtagcactctcctctgatccggagtcgagtcgattcgagtccactccgctgtccgctcgcaccaactcctccatccaattccaactcggcaactcctccaggcagcccggtgggtgggtcatcctctccccacgtccaccacggcgatggcgctcgcgcccccgcattgctgacccactcccaccgcggactctccctccctccccgtggtttggttttggtaggtgggggaggttggtaggcgccggggcgtgcctgtcggctggcggtttcgggaagcgctgccgcgatccttgcccggatctgggcgccacgatggaggacgccggccgcgagggcggcactgccgcggagaatgggaccgagggggagggctacgtcctcgtcaaggccgcccccgagggggagggggaccccaccgccgccgccgccggaggcgatcgcgaggatctcgctgcctccgccccggcgatggcgatggcggtggcggctgcggacgaggccgcggcaccggccaagaagggtggatccggggccacgaaggcgaggctgcagaacggcagggtccccgccggaacttccgccgccgccgccgccgccgggccgagggtgaagaagcccggggtcctctcacagagcgcctccttcccggcgcggggcgcggtggcggtcgcggccaagaaggccgcggcggcggttgctacgcccaagcaggccaagggcgccgtgcccattggatcagagacggcggcaggccgggcggtggagaagaaggcgagtttggcgcggacacctgttgctcgccggccgatgcttgttaagtctggatcagtggatgcggctgccccaaatgacacagttgttgctgtccaagagtcagatgaaaatacggacaaaccattgaaacaaacacagccagggaaaacagaggatgatgtgcactccaccacatcaagtaccaatactccccgtgcagcagctcgtaagagtgctgctgctgctgctgctggttttagtttcagattggaggagcgtgctgagaagagaaaggagttcttccaaaagcttgaagaaaaaatccatgcgaaggagctggaaaaaacaaatttgcaggagaaatctaaggagagccaagaggctgagatcaaactactgaggaagagcctaacatttaaagccacacctatgccaagcttttacaaggagcagccacccaaagttgagttgaaaaagattcccccaacacgtgccaggtcaccaaggctcggccggcacaaggcagccagttctgctactgctcctgctcctgcagatggttctgtatcatgtgggagcccacggagcactgcaaattcgggcaaggtaaatgaaatcatggagaacatcaaacctcgtgtccctgctagaaaatctattcagaggccagtcacgaaaactccattgcaagtgtctgccaccacaaaggctgaaccaagacccatagctacaaagccgaaaatcgcaaactcgaaacctaaggtttcaagggcaaaggttgcgcaggcgcaaggaaactcagctgaagtccctccttcagaaccttctgcctcggaagagctagtagtcgaacatggcgttggagaagctacagttctgtgaatagtgagggtgtgtgcttcattgaaagttgaatcgctcaaagtgccatggtttatcgtttctggagtaggcatccaaatttttttttcagcttgtcattgagcatgccatgtatattgcttgatattgtgttcatgtttaaaattcccaatcttgtgtatattggatttatatgtctttggacatcctaggattgttgcaatacgtcaatgcaatttgtgcattattttgtagtcgttttacttttagccttttccct

SEQ ID NO: 41528 - DNA, 3327 bp, Zea Mays
gtgtagcactctcctctgatccggagtcgagtcgattcgagtccactccgctgtccgctcgcaccaactcctccatccaattccaactcggcaactcctccaggcagcccggtgggtgggtcatcctctccccacgtccaccacggcgatggcgctcgcgcccccgcattgctgacccactcccaccgcggactctccctccctccccgtggtttggttttggtaggtgggggaggttggtaggcgccggggcgtgcctgtcggctggcggtttcgggaagcgctgccgcgatccttgcccggatctgggcgccacgatggaggacgccggccgcgagggcggcactgccgcggagaatgggaccgagggggagggctacgtcctcgtcaaggccgcccccgagggggagggggaccccaccgccgccgccgccggaggcgatcgcgaggatctcgctgcctccgccccggcgatggcgatggcggtggcggctgcggacgaggccgcggcaccggccaagaagggtggatccggggccacgaaggcgaggctgcagaacggcagggtccccgccggaacttccgccgccgccgccgccgccgggccgagggtgaagaagcccggggtcctctcacagagcgcctccttcccggcgcggggcgcggtggcggtcgcggccaagaaggccgcggcggcggttgctacgcccaagcaggccaagggcgccgtgcccattggatcagagacggcggcaggccgggcggtggagaagaaggcgagtttggcgcggacacctgttgctcgccggccgatgcttgttaagtctggatcagtggatgcggctgccccaaatgacacagttgttgctgtccaagagtcagatgaaaatacggacaaaccattgaaacaaacacagccagggaaaacagaggatgatgtgcactccaccacatcaagtaccaatactccccgtgcagcagctcgtaagagtgctgctgctgctgctgctggttttagtttcagattggaggagcgtgctgagaagagaaaggagttcttccaaaagcttgaagaaaaaatccatgcgaaggagctggaaaaaacaaatttgcaggagaaatctaaggagagccaagaggctgagatcaaactactgaggaagagcctaacatttaaagccacacctatgccaagcttttacaaggagcagccacccaaagttgagttgaaaaagattcccccaacacgtgccaggtcaccaaggctcggccggcacaaggcagccagttctgctactgctcctgctcctgcagatggttctgtatcatgtgggagcccacggagcactgcaaattcgggcaaggctagcagaggacttggtctcacagcacatattattgatcactgcaagctggtccttaaatttcctgaagggaccaacagcacctgggtcagtattcctcccatttttatggtcaatggatgctattcctcatccagaatcatgatttaaatattcatctgagatgatattcttgagcttttttgcagtataatgctcagttcaagatttttgaacctctagaatacaaatatgatgtctgtgaaactatcctattgtgggaacaggttagtacattcttctagactaacatgtttgctcttgttactcgtgttaatactaatatggtcgcagtaccgcaacatgacaactgtattgacaagggaatacttggatgtgaggccggatggatggttggattatgcagctaaaaggatcgcacagctgtaatcttattttttttcttcttcttttcttttaaagtgaaatcaacctctccacattggtactaattcttttgattttaaaatttggcagtggtgctgataaatgttacaaccacactctctgtgatgaacttcttagcattttactgcctgctaaaccccctttccatccacgccagttcgcgacatgtgcagttgttggtaactcaggagatctcttgaaaacagagtttggacaagagattgatgcgcatgacgccgtgtttcgggacaatgaggcacctgtcaataagaaatatgcaaaacatgttggattgaaaagagactttcgactggttgtccggggtgctgctcgaaatatggcaccaatactgaagggctcctccgatgaggcacttatcattaaaagtttgacgcacaaagaaatcaatgcggtgataaaggaacttccaaatcctgtctacctttttcaaggtatagttttaagaagaggtgctaaagggactggcatgaagtccatagaacttgccctttccatgtgtgatattgttgacatgtatggttttacagttgatcctgggtacacggaatggacacggtatttctcagcccctaggaaagggcacaatccactgcaaggccgagcttattatcaacttctagaatgccttggggtcattcgtatccattcccccatgagagcacagagagtggaagattggtcagacataccaagcaaagaagagatcagaagggcacacaccatagcttttcgtctaaagaagcatgaaactggccagctagctgaactggggccatttagcaactgcaaggtatggggaacagtcgacccagactacggaccggtatcaggtacttcagacatgagcgagacgcgcaagaattcaaactacagcaagtgggagttgcttccgtttgagaagctgagaagagaagcgcaagaacaccatatccaaatgggtggcgtgtctctatacaagatggacggaaacaagttggatgatcttgtctgtgtgaggcatcagcgttcatcaagttaagaccgtggccgcctaagcctagttgtttggacgctgaattgatttcatggtggatctgaaaggatgctagacagcaagagccagaagatccgatgaagcagctctgctgtacccacttgtaaaattacatgagccatcgggttcagagcgaggcagccctctacctggaatatggaattcttttattggttgttttgggacttgtagccttctaggaatagctacttaagctgtctaggggttgttatgcgcacaccacatgacatggttttcacttcttttaacacagctgtaactgatgcaaatgggtcttgccatttctcaactatgaggtgcagttttgttaccgatccagcagtctctcgattccaaattcgtgacgtttgttgttaactgacaccttatttgactgtcccagttgagttcatttacaggattaatggatacccttcaatcttacaaaccgattgatgatgc

SEQ ID NO: 41529 - DNA, 1984 bp, Zea Mays
gtgtagcactctcctctgatccggagtcgagtcgattcgagtccactccgctgtccgctcgcaccaactcctccatccaattccaactcggcaactcctccaggcagcccggtgggtgggtcatcctctccccacgtccaccacggcgatggcgctcgcgcccccgcattgctgacccactcccaccgcggactctccctccctccccgtggtttggttttggtaggtgggggaggttggtaggcgccggggcgtgcctgtcggctggcggtttcgggaagcgctgccgcgatccttgcccggatctgggcgccacgatggaggacgccggccgcgagggcggcactgccgcggagaatgggaccgagggggagggctacgtcctcgtcaaggccgcccccgagggggagggggaccccaccgccgccgccgccggaggcgatcgcgaggatctcgctgcctccgccccggcgatggcgatggcggtggcggctgcggacgaggccgcggcaccggccaagaagggtggatccggggccacgaaggcgaggctgcagaacggcagggtccccgccggaacttccgccgccgccgccgccgccgggccgagggtgaagaagcccggggtcctctcacagagcgcctccttcccggcgcggggcgcggtggcggtcgcggccaagaaggccgcggcggcggttgctacgcccaagcaggccaagggcgccgtgcccattggatcagagacggcggcagcgcttgcaggccgggcggtggagaagaaggcgagtttggcgcggacacctgttgctcgccggccgatgcttgttaagtctggatcagtggatgcggctgccccaaatgacacagttgttgctgtccaagagtcagatgaaaatacggacaaaccattgaaacaaacacagccagggaaaacagaggatgatgtgcactccaccacatcaagtaccaatactccccgtgcagcagctcgtaagagtgctgctgctgctgctgctggttttagtttcagattggaggagcgtgctgagaagagaaaggagttcttccaaaagcttgaagaaaaaatccatgcgaaggagctggaaaaaacaaatttgcaggagaaatctaaggagagccaagaggctgagatcaaactactgaggaagagcctaacatttaaagccacacctatgccaagcttttacaaggagcagccacccaaagttgagttgaaaaagattcccccaacacgtgccaggtcaccaaggctcggccggcacaaggcagccagttctgctactgctcctgctcctgcagatggttctgtatcatgtgggagcccacggagcactgcaaattcgggcaaggtaaatgaaatcatggagaacatcaaacctcgtgtccctgctagaaaatctattcagaggccagtcacgaaaactccattgcaagtgtctgccaccacaaaggctgaaccaagacccatagctacaaagccgaaaatcgcaaactcgaaacctaaggtttcaagggcaaaggttgcgcaggcgcaaggaaactcagctgaagtccctccttcagaaccttctgcctcggaagagctagtagtcgaacatggcgttggagaagctacaggtcctgatctggcttcacaattggttgcttcgaatgaagtcccagtccatggttgatcaattgcgcattttgcctatttatttccttcttgcagttctgtgaatagtgagggtgtgtgcttcattgaaagttgaatcgctcaaagtgccatggtttatcgtttctggagtaggcatccaaatttttttttcagcttgtcattgagcatgccatgtatattgcttgatattgtgttcatgtttaaaattcccaatcttgtgtatattggatttatatgtctttggacatcctaggattgttgcaatacgtcaatgcaatttgtgcattattttgtaaaaaaaat

SEQ ID NO: 41530 - DNA, 2005 bp, Zea Mays
gtgagctactcactcagtattccacgcttgacactccgtgacggacgcgcgccctttcccctcttctgcgactcattccggagcgcgctgcctccgatccgcggcaccgcgtcgcgtccgccgatgacgagggcgcacctgccggcggcggcgcagcggcggccgacggtggcgctgcttctgggcctggcgctcgccttctgcctcgccgtcctctccatccagtcctccttcttcgccgccccaggggcgccgggcaggaggctggatctggacgccgacgacgtgcgcgagctcgcggggttccagtcccgcgtccagcagtgcgtggctagcagaggacttggtctcacagcacatattattgatcactgcaagctggtccttaaatttcctgaagggaccaacagcacctggtataatgctcagttcaagatttttgaacctctagaatacaaatatgatgtctgtgaaactatcctattgtgggaacagggaatacttggatgtgaggccggatggatggttggattatgcagctaaaaggatcgcacagcttggtgctgataaatgttacaaccacactctctgtgatgaacttcttagcattttactgcctgctaaaccccctttccatccacgccagttcgcgacatgtgcagttgttggtaactcaggagatctcttgaaaacagagtttggacaagagattgatgcgcatgacgccgtgtttcgggacaatgaggcacctgtcaataagaaatatgcaaaacatgttggattgaaaagagactttcgactggttgtccggggtgctgctcgaaatatggcaccaatactgaagggctcctccgatgaggcacttatcattaaaagtttgacgcacaaagaaatcaatgcggtgataaaggaacttccaaatcctgtctacctttttcaaggtatagttttaagaagaggtgctaaagggactggcatgaagtccatagaacttgccctttccatgtgtgatattgttgacatgtatggttttacagttgatcctgggtacacggaatggacacggtatttctcagcccctaggaaagggcacaatccactgcaaggccgagcttattatcaacttctagaatgccttggggtcattcgtatccattcccccatgagagcacagagagtggaagattggtcagacataccaagcaaagaagagatcagaagggcacacaccatagcttttcgtctaaagaagcatgaaactggccagctagctgaactggggccatttagcaactgcaaggtatggggaacagtcgacccagactacggaccggtatcaggtacttcagacatgagcgagacgcgcaagaattcaaactacagcaagtgggagttgcttccgtttgagaagctgagaagagaagcgcaagaacaccatatccaaatgggtggcgtgtctctatacaagatggacggaaacaagttggatgatcttgtctgtgtgaggcatcagcgttcatcaagttaagaccgtggccgcctaagcctagttgtttggacgctgaattgatttcatggtggatctgaaaggatgctagacagcaagagccagaagatccgatgaagcagctctgctgtacccacttgtaaaattacatgagccatcgggttcagagcgaggcagccctctacctggaatatggaattcttttattggttgttttgggacttgtagccttctaggaatagctacttaagctgtctaggggttgttatgcgcacaccacatgacatggttttcacttcttttaacacagctgtaactgatgcaaatgggtcttgccatttctcaactatgaggtgcagttttgttaccgatccagcagtctctcgattccaaattcgtgacgtttgttgttaactgacaccttatttgactgtcccagttgagttcatttacaggattaatggatacccttcaatcttacaaaccgattgatgatgc

SEQ ID NO: 41531 - DNA, 1531 bp, Zea Mays
gaactgaagctttgcaaacaagcctgttttagaaatatgcaaaacatgttggattgaaaagagactttcgactggttgtccggggtgctgctcgaaatatggcaccaatactgaagggctcctgtaatgctgtaatcctgatttcttccaatatactatttgtcccttttatataatatgctgtaatccggatttatataatatataactacattcgtgttaacaaacaaatgcaaacttattatcgtttttacaagttccatttatggctgaagttaatgttatcgaatagagtttacatgggtggtaaatatttctgttatagcacatgtgggctgcttttgaaacaagatgtgactatcttgctttccctgcagccgatgaggcacttatcattaaaagtttgacgcacaaagaaatcaatgcggtgataaaggaacttccaaatcctgtctacctttttcaaggtatagttttaagaagaggtgctaaagggactggcatgaagtccatagaacttgccctttccatgtgtgatattgttgacatgtatggttttacagttgatcctgggtacacggaatggacacggtatttctcagcccctaggaaagggcacaatccactgcaaggccgagcttattatcaacttctagaatgccttggggtcattcgtatccattcccccatgagagcacagagagtggaagattggtcagacataccaagcaaagaagagatcagaagggcacacaccatagcttttcgtctaaagaagcatgaaactggccagctagctgaactggggccatttagcaactgcaaggtatggggaacagtcgacccagactacggaccggtatcaggtacttcagacatgagcgagacgcgcaagaattcaaactacagcaagtgggagttgcttccgtttgagaagctgagaagagaagcgcaagaacaccatatccaaatgggtggcgtgtctctatacaagatggacggaaacaagttggatgatcttgtctgtgtgaggcatcagcgttcatcaagttaagaccgtggccgcctaagcctagttgtttggacgctgaattgatttcatggtggatctgaaaggatgctagacagcaagagccagaagatccgatgaagcagctctgctgtacccacttgtaaaattacatgagccatcgggttcagagcgaggcagccctctacctggaatatggaattcttttattggttgttttgggacttgtagccttctaggaatagctacttaagctgtctaggggttgttatgcgcacaccacatgacatggttttcacttcttttaacacagctgtaactgatgcaaatgggtcttgccatttctcaactatgaggtgcagttttgttaccgatccagcagtctctcgattccaaattcgtgacgtttgttgttaactgacaccttatttgactgtcccagttgagttcatttacaggattaatggatacccttcaatcttacaaaccgattgatgatgc

SEQ ID NO: 41532 - DNA, 2516 bp, Zea Mays
tcctcagcggctcagccgtccttggctcgccactggcttccgttccccgccttcgtctcctcccgcccgggaatcctccggcctcccgcccacccagattccccccaccaccgccaagccgccagcgcacgagacgacccccgacctcgtcccactaaaacccacacgcacggacacgccccactccactcgctcccaccgcccgcgcacaatccaaacgcaaccgtcccgtcctcggggccgccatgccgccgctcgccgcgcgcctccacgccccgcttctcctcgtccccgccgcctcccctcgccccgccacgcgtctctgcgcagcgagcgggccccgcggcgtcggcggtttcaggagaggcgcgttggcctcggagaagccgccggttgtggccgtcgcggagaaagcgggcggcgagggtggaggaggacagggcgagggtccgtatgacgcgattgtgatcgggtctgggatcgggggcctggtggcggcgacgcagctcgcggccaagggtgcgcgggtgctggtcctcgagaagtacctcatccccgggggaagctctgggtactaccgccgcgacgggttcacgttcgacgtcggctcctctgtcatgttcggcttctccgacaagggtaacttgaatttgatcacacaagcattggaagcagttgggcgtaagatggaagttctacctgacccttctacagttcatttccatctacctggtgatctctctgtccttgtgcatcgaaagtatgaagacttcatcaatgaactgatcagcaaattccctcacgagaaagaagggataattaagttctatggcacatgctggaagatcttcaattcactaaattcgttggagctgaagtctctagaggagcccctttatctttttggtcaatttttccagaagcctttggaatgcttaactctagcttattatttgccacagaatgctggggatattgctcgcaagttcataaaagatcaggagctactctccttcatagatgctgaggtgtgagagattttgttttattgtgagcacagtcaatgccttgcaaacacccatgataaatgcaagcatggcactttgggggaattaattatccagttggtggcgttggtggtatcgcattatccctggcagatggccttgttgaaaagggcagcgaaatccgttacaaggcgaatgtaaccaatgttgttcttgaaaatggaaaggctgttggggtgaggttgtcaaatgggaaggagttctttgctaaaacggtgatatcaaatgccactagatgggacacatttggaaaactcttgaaagaaaaagaacttccagaagaggagaaaaactttcaaaagaattatgtcaaggcaccatcattcctttcaattcatatgggtgtcaaagcatcagttcttcctgctggtactgactgccaccattttgtacttgaggataattggaataatttggaaaaaccctatggaagcatatttttaagtattcctacagttcttgatccatcattagctcccgaaggacaccatatacttcatatatttactactgcaggcatagaagcctgggagggtatttctaggaaggaatatgaagagaaaaaagagatggtggccaacgagattataagaaggcttgaaaagaagttgtttcctggtcttcaagattcaatagtcctcaaagaggtaggctcaccaaagactcaccggagatttcttgctcgaaatgatggtacatatggaccaatgccgcggggtaaacccaagggcttacttgctatgcctttcaatactacttcaatagatggcctttactgtgttggtgacagctgttttcccggacaaggtgtaatagctgtagcattctcagggatcatgtgcgctcaccgagtcgctgcagatattggactagagcaaaaatctccggctctagatgctggtcttcttgggctactcagatggttgagaacacttgcatagaacgatatcagacagttgaaaatggacttcatttttccccccggaaggctgatgtttcaccagagttaggattctgcacgatctgttatgatgatcttgttatctgtaccatctcagcatcgatttcttgaaactcctaacggaaaaaaaaaggaatacgaatgggtgtacaggtttcagattttgaattatatgattacggtgtcagggccatggcatattggtatgcatataaagactacatcatagagtaaccagatggtgtacatcatctgattaccgcaataagcagagcactacatttgggagcaatgtaaatcatgttacctaggattttgaaagttctgttttgagatacccttcaactttctgaatatgcataagcttcattgttcgtaaggcatgatgaaacctagaatgacacatcgtctaagaaaatttaaaactatgatgaaatagtttcacatattgcctagttttatctttgttgtttcttagggcattgttt

SEQ ID NO: 41533 - DNA, 2530 bp, Zea Mays
tcctcagcggctcagccgtccttggctcgccactggcttccgttccccgccttcgtctcctcccgcccgggaatcctccggcctcccgcccacccagattccccccaccaccgccaagccgccagcgcacgagacgacccccgacctcgtcccactaaaacccacacgcacggacacgccccactccactcgctcccaccgcccgcgcacaatccaaacgcaaccgtcccgtcctcggggccgccatgccgccgctcgccgcgcgcctccacgccccgcttctcctcgtccccgccgcctcccctcgccccgccacgcgtctctgcgcagcgagcgggccccgcggcgtcggcggtttcaggagaggcgcgttggcctcggagaagccgccggttgtggccgtcgcggagaaagcgggcggcgagggtggaggaggacagggcgagggtccgtatgacgcgattgtgatcgggtctgggatcgggggcctggtggcggcgacgcagctcgcggccaagggtgcgcgggtgctggtcctcgagaagtacctcatccccgggggaagctctgggtactaccgccgcgacgggttcacgttcgacgtcggctcctctgtcatgttcggcttctccgacaagggtaacttgaatttgatcacacaagcattggaagcagttgggcgtaagatggaagttctacctgacccttctacagttcatttccatctacctggtgatctctctgtccttgtgcatcgaaagtatgaagacttcatcaatgaactgatcagcaaattccctcacgagaaagaagggataattaagttctatggcacatgctggaagatcttcaattcactaaattcgttggagctgaagtctctagaggagcccctttatctttttggtcaatttttccagaagcctttggaatgcttaactctagcttattatttgccacagaatgctggggatattgctcgcaagttcataaaagatcaggagctactctccttcatagatgctgaggtgtgagagattttgttttattgtgagcacagtcaatgccttgcaaacacccatgataaatgcaagcatggtcttgtgcgataggcactttgggggaattaattatccagttggtggcgttggtggtatcgcattatccctggcagatggccttgttgaaaagggcagcgaaatccgttacaaggcgaatgtaaccaatgttgttcttgaaaatggaaaggctgttggggtgaggttgtcaaatgggaaggagttctttgctaaaacggtgatatcaaatgccactagatgggacacatttggaaaactcttgaaagaaaaagaacttccagaagaggagaaaaactttcaaaagaattatgtcaaggcaccatcattcctttcaattcatatgggtgtcaaagcatcagttcttcctgctggtactgactgccaccattttgtacttgaggataattggaataatttggaaaaaccctatggaagcatatttttaagtattcctacagttcttgatccatcattagctcccgaaggacaccatatacttcatatatttactactgcaggcatagaagcctgggagggtatttctaggaaggaatatgaagagaaaaaagagatggtggccaacgagattataagaaggcttgaaaagaagttgtttcctggtcttcaagattcaatagtcctcaaagaggtaggctcaccaaagactcaccggagatttcttgctcgaaatgatggtacatatggaccaatgccgcggggtaaacccaagggcttacttgctatgcctttcaatactacttcaatagatggcctttactgtgttggtgacagctgttttcccggacaaggtgtaatagctgtagcattctcagggatcatgtgcgctcaccgagtcgctgcagatattggactagagcaaaaatctccggctctagatgctggtcttcttgggctactcagatggttgagaacacttgcatagaacgatatcagacagttgaaaatggacttcatttttccccccggaaggctgatgtttcaccagagttaggattctgcacgatctgttatgatgatcttgttatctgtaccatctcagcatcgatttcttgaaactcctaacggaaaaaaaaaggaatacgaatgggtgtacaggtttcagattttgaattatatgattacggtgtcagggccatggcatattggtatgcatataaagactacatcatagagtaaccagatggtgtacatcatctgattaccgcaataagcagagcactacatttgggagcaatgtaaatcatgttacctaggattttgaaagttctgttttgagatacccttcaactttctgaatatgcataagcttcattgttcgtaaggcatgatgaaacctagaatgacacatcgtctaagaaaatttaaaactatgatgaaatagtttcacatattgcctagttttatctttgttgtttcttagggcattgttt

SEQ ID NO: 41534 - DNA, 1873 bp, Zea Mays
cacgtttatctcttcagggaattggcatgagtagggtaacttgaatttgatcacacaagcattggaagcagttgggcgtaagatggaagttctacctgacccttctacagttcatttccatctacctggtgatctctctgtccttgtgcatcgaaagtatgaagacttcatcaatgaactgatcagcaaattccctcacgagaaagaagggataattaagttctatggcacatgctggaagaatgctggggatattgctcgcaagttcataaaagatcaggagctactctccttcatagatgctgagtgttttattgtgagcacagtcaatgccttgcaaacacccatgataaatgcaagcatggtaagttcaagcttgatcttctggatctccattccaaattcatttggacttctgttatctcagtatcaatataacaggtcttgtgcgataggcactttgggggaattaattatccagttggtggcgttggtggtatcgcattatccctggcagatggccttgttgaaaagggcagcgaaatccgttacaaggcgaatgtaaccaatgttgttcttgaaaatggaaaggctgttggggtgaggttgtcaaatgggaaggagttctttgctaaaacggtgatatcaaatgccactagatgggacacatttggaaaactcttgaaagaaaaagaacttccagaagaggagaaaaactttcaaaagaattatgtcaaggcaccatcattcctttcaattcatatgggtgtcaaagcatcagttcttcctgctggtactgactgccaccattttgtacttgaggataattggaataatttggaaaaaccctatggaagcatatttttaagtattcctacagttcttgatccatcattagctcccgaaggacaccatatacttcatatatttactactgcaggcatagaagcctgggagggtatttctaggaaggaatatgaagagaaaaaagagatggtggccaacgagattataagaaggcttgaaaagaagttgtttcctggtcttcaagattcaatagtcctcaaagaggtaggctcaccaaagactcaccggagatttcttgctcgaaatgatggtacatatggaccaatgccgcggggtaaacccaagggcttacttgctatgcctttcaatactacttcaatagatggcctttactgtgttggtgacagctgttttcccggacaaggtgtaatagctgtagcattctcagggatcatgtgcgctcaccgagtcgctgcagatattggactagagcaaaaatctccggctctagatgctggtcttcttgggctactcagatggttgagaacacttgcatagaacgatatcagacagttgaaaatggacttcatttttccccccggaaggctgatgtttcaccagagttaggattctgcacgatctgttatgatgatcttgttatctgtaccatctcagcatcgatttcttgaaactcctaacggaaaaaaaaaggaatacgaatgggtgtacaggtttcagattttgaattatatgattacggtgtcagggccatggcatattggtatgcatataaagactacatcatagagtaaccagatggtgtacatcatctgattaccgcaataagcagagcactacatttgggagcaatgtaaatcatgttacctaggattttgaaagttctgttttgagatacccttcaactttctgaatatgcataagcttcattgttcgtaaggcatgatgaaacctagaatgacacatcgtctaagaaaatttaaaactatgatgaaatagtttcacatattgcctagttttatctttgttgtttcttagggcattgttt

SEQ ID NO: 41535 - DNA, 1686 bp, Zea Mays
aaccccgcacggcccacgaatccaccatccacctccaccctatatccccatccccatcagcaacgcaaaaacctaaaccgctatggtccatccacatccacagtcgccatcgcccccacctctcaccgtcgtcttcgtgcaccactcggcctccactgccggtcgcgcctcccagccacctcgtgccgctctgccaccccgcgcatcctccaccgcccctatggctgccacgggcgagcgctgcccgagcagtcgaccgccctttccgtgccgccccgcctccccgctaggcctccactgcccactgctccggcgcctacagtggaaggcaaggagaaggacatcgggcggcgatgacgattatcttattgctagcaccgatggggtggggacaaagctgaagcttgctttcgaaactggtattcatgatacaatcgacattgacctggtggcaatgagcgtcaatgacattgtaactctaggtgcaaaaccattgttcttcctagattactatgcaacgagcaagcttgatgttgatcttgcagagaaggttatcaaggggattagggatggctgcgaacaatcagattgtgctctcctaggaggggagacagcagaaatgcctggtttctatgcagagggtgaatatgatctaagtggttttgctgtgggtgttgtgaagaaggataaaatcattgatggaaaaacattgttaagggagatgtgcttataggtcttccttccagtggtgttcattctaacgggttctctcttgttagaaggagtactgagaaaagtggactttctttggatgattagctcccaagaaatgatggcataacaactacagttggtgaagctctaatggcaccaaccttcatctatgttaagcaggtgcttgagattattagcaaaggtggtgtgaaaggactagcccacatcactggtggtggctttactagcaatatcccaagagtattcccctctggatgcggggcaaaaaatttactgggtcatgggaaatacctccaatcttcagttggcttcaacaggcaagaacaaatgatcttcaaacttcgcctttgattttcagtagcaactattctgagaaacatcaggcactgcattggcgtactggtcataaaaatgattgcctccagataataagttctgctgcttcaaattcagttctgccagctgtaggaatagggtttgtccgctggtttgctaaggcaagcaacgtacatagactgctcgtcttggatcctttaggaatcataaaagcatatagaggaactatgtataggctacaaagaagcataagaagcatttttatagcagaagccaagtgttctgatgattttgttttttcaattgtgttttctgttattggttcagtatgcacatatattgacatgatttatggcatggcatctgccatctttgttatatttatgacatcgttcttgattgatgtgtgcgacatgaatgatagatctttttaacatcctgagcatcattgtgtcactcattatcgtattttgtatatcatttatgggttcacggatatgaaatgtcaggtttcttatttttgagatctgaaccatgtgttgccttttggttgttacataataaatggtcctgtcgatgtgttttacgttcaaaaacttctatgcgacatgcacg

SEQ ID NO: 41536 - DNA, 1117 bp, Zea Mays
ctatatccccatccccatcagcaacgcaaaaacctaaaccgctatggtccatccacatccacagtcgccatcgcccccacctctcaccgtcgtcttcgtgcaccactcggcctccactgccggtcgcgcctcccagccacctcgtgccgctctgccaccccgcgcatcctccaccgcccctatggctgccacgggcgagcgctgcccgagcagtcgaccgccctttccgtgccgccccgcctccccgctaggcctccactgcccactgctccggcgcctacagtggaaggcaaggagaaggacatcgggcggcgatgacgattatcttattgctagcaccgatggggtggggacaaagctgaagcttgctttcgaaactggtattcatgatacaatcgacattgacctggtggcaatgagcgtcaatgacattgtaactctaggtgcaaaaccattgttcttcctagattactatgcaacgagcaagcttgatgttgatcttgcagagaaggttatcaaggggattagggatggctgcgaacaatcagattgtgctctcctaggaggggagacagcagaaatgcctggtttctatgcagagggtgaatatgatctaagtggttttgctctcccaagaaatgatggcataacaactacagttggtgaagctctaatggcaccaaccttcatctatgttaagcaggtgcttgagattattagcaaaggtggtgtgaaaggactagcccacatcactggtggtggctttactagcaatatcccaagagtattcccctctggatgcggggcaaaaaatttactgggtcatgggaaatacctccaatcttcagttggcttcaacaggcaagaacaaatgatcttcaaacttcgcctttgattttcagtagcaactattctgagaaacatcaggcactgcattggcgtactggtcataaaaatgattgcctccagataataagttctgctgcttcaaattcagttctgccagctgtaggaatagaaatggaattgagggtatccatggagatgcatgtagctgaactcagtcaagtttatatccattgtgtgtgtgcacgcttatttggcatcgtgttcttcc

SEQ ID NO: 41537 - DNA, 1669 bp, Zea Mays
aacgcaaaaacctaaaccgctatggtccatccacatccacagtcgccatcgcccccacctctcaccgtcgtcttcgtgcaccactcggcctccactgccggtcgcgcctcccagccacctcgtgccgctctgccaccccgcgcatcctccaccgcccctatggctgccacgggcgagcgctgcccgagcagtcgaccgccctttccgtgccgccccgcctccccgctaggcctccactgcccactgctccggcgcctacagtggaaggcaaggagaaggacatcgggcggcgatgacgattatcttattgctagcaccgatggggtggggacaaagctgaagcttgctttcgaaactggtattcatgatacaatcgacattgacctggtggcaatgagcgtcaatgacattgtaactctaggtgcaaaaccattgttcttcctagattactatgcaacgagcaagcttgatgttgatcttgcagagaaggttatcaaggggattagggatggctgcgaacaatcagattgtgctctcctaggaggggagagggtgaatatgatctaagtggttttgctgtgggtgttgtgaagaaggataaaatcattgatggaaaaacattgttaagggagatgtgcttataggtcttccttccagtggtgttcattctaacgggttctctcttgttagaaggagtactgagaaaagtggactttctttggatgattagctcccaagaaatgatggcataacaactacagttggtgaagctctaatggcaccaaccttcatctatgttaagcaggtgcttgagattattagcaaaggtggtgtgaaaggactagcccacatcactggtggtggctttactagcaatatcccaagagtattcccctctggatgcggggcaaaaaatttactgggtcatgggaaatacctccaatcttcagttggcttcaacaggcaagaacaaatgatcttcaaacttcgcctttgattttcagtagcaactattctgagaaacatcaggcactgcattggcgtactggtcataaaaatgattgcctccagataataagttctgctgcttcaaattcagttctgccagctgtaggaatagggtttgtccgctggtttgctaaggcaagcaacgtacatagactgctcgtcttggatcctttaggtttgtatagtgtgttgctttatgatcaactgaccattcattacctccgcctgatggcccttattaacaacagaatcataaaagcatatagaggaactatgtataggctacaaagaagcataagaagcatttttatagcagaagccaagtgttctgatgattttgttttttcaattgtgttttctgttattggttcagtatgcacatatattgacatgatttatggcatggcatctgccatctttgttatatttatgacatcgttcttgattgatgtgtgcgacatgaatgatagatctttttaacatcctgagcatcattgtgtcactcattatcgtattttgtatatcatttatgggttcacggatatgaaatgtcaggtttcttatttttgagatctgaaccatgtgttgccttttggttgttacataataaatggtcctgtcgatgtgttttacgttcaaaaacttctatgcgacatgcacg

SEQ ID NO: 41538 - DNA, 1332 bp, Zea Mays
ccccacacacacacacacaacagatctgctacagggacaatctgatggtcggcgcatcgcctagaggccggtggtggcgagtcacgcctcctcagccctcatcctcacgtcgtcgccaccgcagatccgcccaacggcccctgacccgacaatgacgattatcttattgctagcaccgatggggtggggacaaagctgaagcttgctttcgaaactggtattcatgatacaatcgacattgacctggtggcaatgagcgtcaatgacattgtaactctaggtgcaaaaccattgttcttcctagattactatgcaacgagcaagcttgatgttgatcttgcagagaaggttatcaaggggattagggatggctgcgaacaatcagattgtgctctcctaggaggggagacagcagaaatgcctggtttctatgcagagggtgaatatgatctaagtggttttgctctcccaagaaatgatggcataacaactacagttggtgaagctctaatggcaccaaccttcatctatgttaagcaggtgcttgagattattagcaaaggtggtgtgaaaggactagcccacatcactggtggtggctttactagcaatatcccaagagtattcccctctggatgcggggcaaaaaatttactgggtcatgggaaatacctccaatcttcagttggcttcaacaggcaagaacaaatgatcttcaaacttcgcctttgattttcagtagcaactattctgagaaacatcaggcactgcattggcgtactggtcataaaaatgattgcctccagataataagttctgctgcttcaaattcagttctgccagctgtaggaatagggtttgtccgctggtttgctaaggcaagcaacgtacatagactgctcgtcttggatcctttaggaatcataaaagcatatagaggaactatgtataggctacaaagaagcataagaagcatttttatagcagaagccaagtgttctgatgattttgttttttcaattgtgttttctgttattggttcagtatgcacatatattgacatgatttatggcatggcatctgccatctttgttatatttatgacatcgttcttgattgatgtgtgcgacatgaatgatagatctttttaacatcctgagcatcattgtgtcactcattatcgtattttgtatatcatttatgggttcacggatatgaaatgtcaggtttcttatttttgagatctgaaccatgtgttgccttttggttgttacataataaatggtcctgtcgatgtgttttacgttcaaaaacttctatgcgacatgcacg

SEQ ID NO: 41539 - DNA, 994 bp, Zea Mays
atctgctacagggacaatctgatggtcggcgcatcgcctagaggccggtggtggcgagtcacgcctcctcagccctcatcctcacgtcgtcgccaccgcagatccgcccaacggcccctgacccgacaatgacgattatcttattgctagcaccgatggggtggggacaaagctgaagcttgctttcgaaactggtattcatgatacaatcgacattgacctggtggcaatgagcgtcaatgacattgtaactctaggtgcaaaaccattgttcttcctagattactatgcaacgagcaagcttgatgttgatcttgcagagaaggttatcaaggggattagggatggctgcgaacaatcagattgtgctctcctaggaggggagacagcagaaatgcctggtttctatgcagagggtgaatatgatctaagtggttttgctctcccaagaaatgatggcataacaactacagttggtgaagctctaatggcaccaaccttcatctatgttaagcaggtgcttgagattattagcaaaggtggtgtgaaaggactagcccacatcactggtggtggctttactagcaatatcccaagagtattcccctctggatgcggggcaaaaaatttactgggtcatgggaaatacctccaatcttcagttggcttcaacaggcaagaacaaatgatcttcaaacttcgcctttgattttcagtagcaactattctgagaaacatcaggcactgcattggcgtactggtcataaaaatgattgcctccagataataagttctgctgcttcaaattcagttctgccagctgtaggaatagggtttgtccgctggtttgctaaggcaagcaacgtacatagactgctcgtcttggatcctttagaaatggaattgagggtatccatggagatgcatgtagctgaactcagtcaagtttatatccattgtgtgtgtgcacgcttatttggcatcgtgttcttcc

SEQ ID NO: 41540 - DNA, 1435 bp, Zea Mays
cggcgcatcgcctagaggccggtggtggcgagtcacgcctcctcagccctcatcctcacgtcgtcgccaccgcagatccgcccaacggcccctgacccgacaatgacgattatcttattgctagcaccgatggggtggggacaaagctgaagcttgctttcgaaactggtattcatgatacaatcgacattgacctggtggcaatgagcgtcaatgacattgtaactctaggtgcaaaaccattgttcttcctagattactatgcaacgagcaagcttgatgttgatcttgcagagaaggttatcaaggggattagggatggctgcgaacaatcagattgtgctctcctaggaggggagacagcagaaatgcctggtttctatgcagagggtgaatatgatctaagtggttttgctgtgggtgttgtgaagaaggataaaatcattgatggaaaaacattgttaagggagatgtgcttataggtcttccttccagtggtgttcattctaacgggttctctcttgttagaaggagtactgagaaaagtggactttctttggatgattagctcccaagaaatgatggcataacaactacagttggtgaagctctaatggcaccaaccttcatctatgttaagcaggtgcttgagattattagcaaaggtggtgtgaaaggactagcccacatcactggtggtggctttactagcaatatcccaagagtattcccctctggatgcggggcaaaaaatttactgggtcatgggaaatacctccaatcttcagttggcttcaacaggcaagaacaaatgatcttcaaacttcgcctttgattttcagtagcaactattctgagaaacatcaggcactgcattggcgtactggtcataaaaatgattgcctccagataataagttctgctgcttcaaattcagttctgccagctgtaggaatagggtttgtccgctggtttgctaaggcaagcaacgtacatagactgctcgtcttggatcctttaggaatcataaaagcatatagaggaactatgtataggctacaaagaagcataagaagcatttttatagcagaagccaagtgttctgatgattttgttttttcaattgtgttttctgttattggttcagtatgcacatatattgacatgatttatggcatggcatctgccatctttgttatatttatgacatcgttcttgattgatgtgtgcgacatgaatgatagatctttttaacatcctgagcatcattgtgtcactcattatcgtattttgtatatcatttatgggttcacggatatgaaatgtcaggtttcttatttttgagatctgaaccatgtgttgccttttggttgttacataataaatggtcctgtcgatgtgttttacgttcaaaaacttctatgcgacatgcacg

SEQ ID NO: 41541 - DNA, 1760 bp, Zea Mays
cacgcctcctcagccctcatcctcacgtcgtcgccaccgcagatccgcccaacggcccctgacccgacaatgacgattatcttattgctagcaccgatggggtggggacaaagctgaagcttgctttcgaaactggtattcatgatacaatcgacattgacctggtggcaatgagcgtcaatgacattgtaactctaggtgcaaaaccattgttcttcctagattactatgcaacgagcaagcttgatgttgatcttgcagagaaggttatcaaggggattagggatggctgcgaacaatcagattgtgctctcctaggaggggaggtaagatgtttttggaattgaattactaggactcgacaattcaaccatgcagtattacccttgtaagtttagtagttgcatatgaatggatcaaatgtcttaaactgccatactgtccaccattgttgcattgtttatctgccagaatccctttactaagaagcagggattttaatgtttatgtttgaagcgtactacttgattgataatatcagtataacaaaattctgttttttttctttttatgcctttaattccatacagatgcaaatgaatcttcctgaatcattacatgtgcattacttttatgaaaatccaaaaacacttaaactgattattgaacaattgatcattacagacagcagaaatgcctggtttctatgcagagggtgaatatgatctaagtggttttgctgtgggtgttgtgaagaaggataaaatcattgatggaaaaacattgttaagggagatgtgcttataggtcttccttccagtggtgttcattctaacgggttctctcttgttagaaggagtactgagaaaagtggactttctttggatgattagctcccaagaaatgatggcataacaactacagttggtgaagctctaatggcaccaaccttcatctatgttaagcaggtgcttgagattattagcaaaggtggtgtgaaaggactagcccacatcactggtggtggctttactagcaatatcccaagagtattcccctctggatgcggggcaaaaaatttactgggtcatgggaaatacctccaatcttcagttggcttcaacaggcaagaacaaatgatcttcaaacttcgcctttgattttcagtagcaactattctgagaaacatcaggcactgcattggcgtactggtcataaaaatgattgcctccagataataagttctgctgcttcaaattcagttctgccagctgtaggaatagggtttgtccgctggtttgctaaggcaagcaacgtacatagactgctcgtcttggatcctttaggaatcataaaagcatatagaggaactatgtataggctacaaagaagcataagaagcatttttatagcagaagccaagtgttctgatgattttgttttttcaattgtgttttctgttattggttcagtatgcacatatattgacatgatttatggcatggcatctgccatctttgttatatttatgacatcgttcttgattgatgtgtgcgacatgaatgatagatctttttaacatcctgagcatcattgtgtcactcattatcgtattttgtatatcatttatgggttcacggatatgaaatgtcaggtttcttatttttgagatctgaaccatgtgttgccttttggttgttacataataaatggtcctgtcgatgtgttttacgttcaaaaacttctatgcgacatgcacg

SEQ ID NO: 41542 - DNA, 1424 bp, Zea Mays
aacggcccctgacccgacaatgacgattatcttattgctagcaccgatggggtggggacaaagctgaagcttgctttcgaaactggtattcatgatacaatcgacattgacctggtggcaatgagcgtcaatgacattgtaactctaggtgcaaaaccattgttcttcctagattactatgcaacgagcaagcttgatgttgatcttgcagagaaggttatcaaggggattagggatggctgcgaacaatcagattgtgctctcctaggaggggagacagcagaaatgcctggtttctatgcagagggtgaatatgatctaagtggttttgctgtgggtgttgtgaagaaggataaaatcattgatggaaaaacattgttaagggagatgtgcttataggtcttccttccagtggtgttcattctaacgggttctctcttgttagaaggagtactgagaaaagtggactttctttggatgattagctcccaagaaatgatggcataacaactacagttggtgaagctctaatggcaccaaccttcatctatgttaagcaggtgcttgagattattagcaaaggtggtgtgaaaggactagcccacatcactggtggtggctttactagcaatatcccaagagtattcccctctggatgcggggcaaaaaatttactgggtcatgggaaatacctccaatcttcagttggcttcaacaggcaagaacaaatgatcttcaaacttcgcctttgattttcagtagcaactattctgagaaacatcaggcactgcattggcgtactggtcataaaaatgattgcctccagataataagttctgctgcttcaaattcagttctgccagctgtaggaatagggtttgtccgctggtttgctaaggcaagcaacgtacatagactgctcgtcttggatcctttaggtttgtatagtgtgttgctttatgatcaactgaccattcattacctccgcctgatggcccttattaacaacagaatcataaaagcatatagaggaactatgtataggctacaaagaagcataagaagcatttttatagcagaagccaagtgttctgatgattttgttttttcaattgtgttttctgttattggttcagtatgcacatatattgacatgatttatggcatggcatctgccatctttgttatatttatgacatcgttcttgattgatgtgtgcgacatgaatgatagatctttttaacatcctgagcatcattgtgtcactcattatcgtattttgtatatcatttatgggttcacggatatgaaatgtcaggtttcttatttttgagatctgaaccatgtgttgccttttggttgttacataataaatggtcctgtcgatgtgttttacgttcaaaaacttctatgcgacatgcacg

SEQ ID NO: 41543 - DNA, 930 bp, Zea Mays
agatgtgcttataggtcttccttccagtggtgttcattctaacgggttctctcttgttagaagctcccaagaaatgatggcataacaactacagttggtgaagctctaatggcaccaaccttcatctatgttaagcaggtgcttgagattattagcaaaggtggtgtgaaaggactagcccacatcactggtggtggctttactagcaatatcccaagagtattcccctctggatgcggggcaaaaaatttactgggtcatgggaaatacctccaatcttcagttggcttcaacaggcaagaacaaatgatcttcaaacttcgcctttgattttcagtagcaactattctgagaaacatcaggcactgcattggcgtactggtcataaaaatgattgcctccagataataagttctgctgcttcaaattcagttctgccagctgtaggaatagggtttgtccgctggtttgctaaggcaagcaacgtacatagactgctcgtcttggatcctttaggaatcataaaagcatatagaggaactatgtataggctacaaagaagcataagaagcatttttatagcagaagccaagtgttctgatgattttgttttttcaattgtgttttctgttattggttcagtatgcacatatattgacatgatttatggcatggcatctgccatctttgttatatttatgacatcgttcttgattgatgtgtgcgacatgaatgatagatctttttaacatcctgagcatcattgtgtcactcattatcgtattttgtatatcatttatgggttcacggatatgaaatgtcaggtttcttatttttgagatctgaaccatgtgttgccttttggttgttacataataaatggtcctgtcgatgtgttttacgttcaaaaacttctatgcgacatgcacg

SEQ ID NO: 41544 - DNA, 998 bp, Zea Mays
gtgcttataggtcttccttccagtggtgttcattctaacgggttctctcttgttagaagctcccaagaaatgatggcataacaactacagttggtgaagctctaatggcaccaaccttcatctatgttaagcaggtgcttgagattattagcaaaggtggtgtgaaaggactagcccacatcactggtggtggctttactagcaatatcccaagagtattcccctctggatgcggggcaaaaaatttactgggtcatgggaaatacctccaatcttcagttggcttcaacaggcaagaacaaatgatcttcaaacttcgcctttgattttcagtagcaactattctgagaaacatcaggcactgcattggcgtactggtcataaaaatgattgcctccagataataagttctgctgcttcaaattcagttctgccagctgtaggaatagggtttgtccgctggtttgctaaggcaagcaacgtacatagactgctcgtcttggatcctttaggtttgtatagtgtgttgctttatgatcaactgaccattcattacctccgcctgatggcccttattaacaacagaatcataaaagcatatagaggaactatgtataggctacaaagaagcataagaagcatttttatagcagaagccaagtgttctgatgattttgttttttcaattgtgttttctgttattggttcagtatgcacatatattgacatgatttatggcatggcatctgccatctttgttatatttatgacatcgttcttgattgatgtgtgcgacatgaatgatagatctttttaacatcctgagcatcattgtgtcactcattatcgtattttgtatatcatttatgggttcacggatatgaaatgtcaggtttcttatttttgagatctgaaccatgtgttgccttttggttgttacataataaatggtcctgtcgatgtgttttacgttcaaaaacttctatgcgacatgcacg

SEQ ID NO: 41545 - DNA, 933 bp, Zea Mays
gttcattctaacgggttctctcttgttagaagtactgagaaaagtggactttctttggatgattagctcccaagaaatgatggcataacaactacagttggtgaagctctaatggcaccaaccttcatctatgttaagcaggtgcttgagattattagcaaaggtggtgtgaaaggactagcccacatcactggtggtggctttactagcaatatcccaagagtattcccctctggatgcggggcaaaaaatttactgggtcatgggaaatacctccaatcttcagttggcttcaacaggcaagaacaaatgatcttcaaacttcgcctttgattttcagtagcaactattctgagaaacatcaggcactgcattggcgtactggtcataaaaatgattgcctccagataataagttctgctgcttcaaattcagttctgccagctgtaggaatagggtttgtccgctggtttgctaaggcaagcaacgtacatagactgctcgtcttggatcctttaggaatcataaaagcatatagaggaactatgtataggctacaaagaagcataagaagcatttttatagcagaagccaagtgttctgatgattttgttttttcaattgtgttttctgttattggttcagtatgcacatatattgacatgatttatggcatggcatctgccatctttgttatatttatgacatcgttcttgattgatgtgtgcgacatgaatgatagatctttttaacatcctgagcatcattgtgtcactcattatcgtattttgtatatcatttatgggttcacggatatgaaatgtcaggtttcttatttttgagatctgaaccatgtgttgccttttggttgttacataataaatggtcctgtcgatgtgttttacgttcaaaaacttctatgcgacatgcacg

SEQ ID NO: 41546 - DNA, 753 bp, Zea Mays
caaagaaccaaatgttacaatggaaaaaaactagatacatcgttgttgtcgtcaccagctccgacagctgatacaggtgaacttgggacggtcgggtcgatggcttgtgcttgcgtaggcaagacagatcctcggtcgccggcgccggtgggcgacgctggtacagccgatcttgggacggtcgttgtgccagtgctagccccagcctcgtgtcttccttggtccaccatgtccgtcctctgcatcttctccgccaatgtctccatgcccatgtaagacaagaggagccacacgtaggacaggtactgcccgccgctccccatgctcttggcgtgcaggtagcccctgcaccctgccggcagagaagcaaagcatctccacccacacgccctggaccaccctccaaaccttttccatgtcttccccaacctgtaaaccaatgagcacctgggtgacagcccaagcgtcatgagccacacctgatcctgaattccccgtctcccttagcctacggattatactactactactagcaggctcgttcggtggaatgatgccctccagttcctcgtaggcgtctttgaacaggctgcgcctagcaccggcgatcaacatctctgggttgacgaacagtaggtacgccatgtagttggacatggccatgctccggcaggcagcttgacgttgctgagtagaagaaggcgtggcgaggtggaagcaaaacaagtcggtggcgaggtgccataggagaag

SEQ ID NO: 41547 - DNA, 621 bp, Zea Mays
gctctctactgaaccagaagagcccgcaagactactgaagctaaccttcttcaagtcccatggcttcagtaagcatttgccagatccaaaatggaacagcgaaatcgctgcttgcaatatgaagccatctccggaccaggatttgcaaaacacatacacagcaacagtgacctgccaataccagcgaagaggaagacattttgtggattcaacaaaagacaggtagctagttgagttgagacaggtgcagcaccaacctgagagactgctgttaggacgacatgccttgtccacagctcattgtcttcgatgttgtaggctgtgatgccgtcttggccaccaagatgttgtagcacctgcaggctgtagctgctgcgatgcgtggatacccactcctgacggttctggcgattgaagagcacggccaacgcgtatatcgccacagcgtcgctgcctagataggccagccagattgtcaacctgaaccaggcagggatactgcgtttacgcaagccggctgcgaaaaagaggaagatctggatgaagagacagcacaaggacgcgcagctgccactcctcccaccattgcactgccgctgtgaaacccatgctctcagtctc

SEQ ID NO: 41548 - DNA, 3079 bp, Zea Mays
gtttttttttcaaaattaattttttttgctcagaataattaagttttcccatgtgtaagcttttctcgcactcgtactccctcctccgctccggctaggaggctgctccctccgccgctccgccttcgtcgcgcggccatcgtttccggctctgtccccggatatctcttcgccaccgcttcctgcgccgcggcgccgccacaaccgaaggcgacccagtcgccttcaacactatggtgactcctcccactgtcgagcaggaggacgaggagatgctcgtgccccgccaggaggcggtcgacaccgacgcagcgcagcccatggaaggtactgtggtggcacagactgaggtggtgagcacggcggagagccagcctgtggaagatccgcagacatcacggttcacttggacaattgagaacttcaccaggttcagtgagaagaagcactatttagaggtttttgttgttggcggattcaaatggagtgtgctgattttccccaaggggaacaatgtggaccacttctcaatgtacttggatgttgctgactcaaccagccttccgtatggttggagccgctatgctcagtttagtcttgctgttgtaaaccaaatccagccagagtttacgatacgcaaagagacccaacatcaatttaatgctcgtgagagtgattggggtttcacatcttttatgcctttgagtgagctctatgatgcaagtagaggttacctcgtgaatgatactgttgttgtggaggccgaggttgctgtccgcagaattgttgactattggacatatgactcaaaaaaggaaactggttatgtgggcctgaaaaaccaaggagctacctgttatatgaactcccttctacagacactataccatataccctacttcaggaaggctgtatatcatatgccaaccactgaaaatgacataccatcaggaagcattcccttggcgctgcagagccttttctacaagctccagtacagtgacagtagtgtagctacaaaagagctgacaaaatcttttggttgggacacatatgattctttcatgcagcatgatgtacaagagctcaacagagttctgtctgagaaacttgaggacaaaatgaagggaactgtcgtagaaggaacaattgagcaattatttgaaggtcaccacatcaattacattgagtgtataaacgttgagcataaatctaaccgcaaggaatccttttatgatcttcagcttgacgtcaaaggctgtcgtgacatttattcgtcgtttgataaatatgttgaagttgaacgtctagagggtgataacaagtatcacgcagagaatcatggtctacaggatgcaaaaaagggcgttcttttccttgatttcccccctgttttgcaactccagctgaagcgctttgagtatgattatatgagagatagcatggttaagattaatgatcgctatgagttccctctgcaacttgatctggatagagatggtggcaaatacattgctccaaatgcagatcgaagtacacgaaacctttacactcttcacagtgttcttgttcatagtggtggggtacatggtggtcactactatgcattcatacggccaactttatctgagcaatggtataaatttgatgatgaacgtgtaacaaaagaagatgctaagaaggctcttgaagaacaatatgggggtgatgaagagttaccccaaataaaccctggtttcaacaacgctccatttaaattcacgaagtattcaaacgcgtatatgcttgtttatattcgtgaaagtgccaaggagaaaattatgtgtactgttgatgaaaaagacattgctgagcatttaagggtaaggttgaaaaaagaacaagaagagaaagaacacaaaaagaaagaaaaagctgaagctcatctttataccataattaaggtagctcgagatgaggatttgaaggaacaaattggaaagggtatatattttgatttggtggaccatgaaaaggtccataatttccgtatacagaaacaaatgccttttagttgtttcaaggaggaagtagccaaggaatatggcatccctgttcagtttcagcgcttctggttgtgggcaaagaggcaaaaccatacataccgccctaatcgtccattgaccgttcatgaggaaacacaatctgtggggcaactgagagaaatatcaaataaggcacacaatgttgagttgaagctgtttttggaagtagaacttgggctggatttgcggcctctccctcctcctgagaagggcaaggaagatattcttcttttcttcaaattctacaacccagaaaaggaagaactctgtttcatggggaggctctttgtgaaggccttgggaaaaccttcagaaatcctggcaaaactaaacgaaatggctggatttccccctgatcaagaaattgagctttttgaggaaattaagtttgagccaaacgtgatgtgtgaaactatagacaagaaactcacttttcattatagtcagcttgaagatggggacattatttgtttccaaaaatcaccaggagcagaatatgatgcacccgtgcgatatccggatgttccttcatttttggagtatgtccataataggcaggttgtacatttccggtctttggagaaaccaaaggatgatgatttttctttggaattgtcaaagcttcatacctatgatgatgttgttgagagagttgctcgccaacttgaattggacgatccagcgaaaattcggcttacaccccacaattgctactctcagcaacctaaaccacagcccgtcaaatatcgaggagtggtgcatctgtcggacatgctcatccactacaatcagacgtctgacatcttgtattatgaagtgttggatataccactgccagaattgcagttcctaaaaaccctgaaagttgcatttcaccatcctacgaaggatgaggttgttattcatagcatcaggcttccaaaaaatagcaccattgctgatgtaatatatgacttgaaaactaagcacaggaagatgatgctggctgtccaagt

SEQ ID NO: 41549 - DNA, 3722 bp, Zea Mays
gtttttttttcaaaattaattttttttgctcagaataattaagttttcccatgtgtaagcttttctcgcactcgtactccctcctccgctccggctaggaggctgctccctccgccgctccgccttcgtcgcgcggccatcgtttccggctctgtccccggatatctcttcgccaccgcttcctgcgccgcggcgccgccacaaccgaaggcgacccagtcgccttcaacactatggtgactcctcccactgtcgagcaggaggacgaggagatgctcgtgccccgccaggaggcggtcgacaccgacgcagcgcagcccatggaaggtactgtggtggcacagactgaggtggtgagcacggcggagagccagcctgtggaagatccgcagacatcacggttcacttggacaattgagaacttcaccaggttcagtgagaagaagcactatttagaggtttttgttgttggcggattcaaatggagtgtgctgattttccccaaggggaacaatgtggaccacttctcaatgtacttggatgttgctgactcaaccagccttccgtatggttggagccgctatgctcagtttagtcttgctgttgtaaaccaaatccagccagagtttacgatacgcaaagagacccaacatcaatttaatgctcgtgagagtgattggggtttcacatcttttatgcctttgagtgagctctatgatgcaagtagaggttacctcgtgaatgatactgttgttgtggaggccgaggttgctgtccgcagaattgttgactattggacatatgactcaaaaaaggaaactggttatgtgggcctgaaaaaccaaggagctacctgttatatgaactcccttctacagacactataccatataccctacttcaggaaggctgtatatcatatgccaaccactgaaaatgacataccatcaggaagcattcccttggcgctgcagagccttttctacaagctccagtacagtgacagtagtgtagctacaaaagagctgacaaaatcttttggttgggacacatatgattctttcatgcagcatgatgtacaagagctcaacagagttctgtctgagaaacttgaggacaaaatgaagggaactgtcgtagaaggaacaattgagcaattatttgaaggtcaccacatcaattacattgagtgtataaacgttgagcataaatctaaccgcaaggaatccttttatgatcttcagcttgacgtcaaaggctgtcgtgacatttattcgtcgtttgataaatatgttgaagttgaacgtctagagggtgataacaagtatcacgcagagaatcatggtctacaggatgcaaaaaagggcgttcttttccttgatttcccccctgttttgcaactccagctgaagcgctttgagtatgattatatgagagatagcatggttaagattaatgatcgctatgagttccctctgcaacttgatctggatagagatggtggcaaatacattgctccaaatgcagatcgaagtacacgaaacctttacactcttcacagtgttcttgttcatagtggtggggtacatggtggtcactactatgcattcatacggccaactttatctgagcaatggtataaatttgatgatgaacgtgtaacaaaagaagatgctaagaaggctcttgaagaacaatatgggggtgatgaagagttaccccaaataaaccctggtttcaacaacgctccatttaaattcacgaagtattcaaacgcgtatatgcttgtttatattcgtgaaagtgccaaggagaaaattatgtgtactgttgatgaaaaagacattgctgagcatttaagggtaaggttgaaaaaagaacaagaagagaaagaacacaaaaagaaagaaaaagctgaagctcatctttataccataattaaggtagctcgagatgaggatttgaaggaacaaattggaaagggtatatattttgatttggtggaccatgaaaaggtccataatttccgtatacagaaacaaatgccttttagttgtttcaaggaggaagtagccaaggaatatggcatccctgttcagtttcagcgcttctggttgtgggcaaagaggcaaaaccatacataccgccctaatcgtccattgaccgttcatgaggaaacacaatctgtggggcaactgagagaaatatcaaataaggcacacaatgttgagttgaagctgtttttggaagtagaacttgggctggatttgcggcctctccctcctcctgagaagggcaaggaagatattcttcttttcttcaaattctacaacccagaaaaggaagaactctgtttcatggggaggctctttgtgaaggccttgggaaaaccttcagaaatcctggcaaaactaaacgaaatggctggatttccccctgatcaagaaattgagctttttgaggaaattaagtttgagccaaacgtgatgtgtgaaactatagacaagaaactcacttttcattatagtcagcttgaagatggggacattatttgtttccaaaaatcaccaggagcagaatatgatgcacccgtgcgatatccggatgttccttcatttttggagtatgtccataataggcaggttgtacatttccggtctttggagaaaccaaaggatgatgatttttctttggaattgtcaaagcttcatacctatgatgatgttgttgagagagttgctcgccaacttgaattggacgatccagcgaaaattcggcttacaccccacaattgctactctcagcaacctaaaccacagcccgtcaaatatcgaggagtggtgcatctgtcggacatgctcatccactacaatcagacgtctgacatcttgtattatgaagtgttggatataccactgccagaattgcagttcctaaaaaccctgaaagttgcatttcaccatcctacgaaggatgaggttgttattcatagcatcaggcttccaaaaaatagcaccattgctgatgtaatatatgacttgaaaactaaggttgaactgtccagtcctaatgctgaactacgtgtactagaagtcttctaccacaagatctataagatctttccactacatgagaagatagagaatataaacgaccaatattggacactacgtgctgaggagattccagaagaggaaaaaaatataggcccaaatgatcggctaattcatgtttatcacttcaagaaagatattaatcagactcagattcagaactttggagaccctttcgttttggtcgttcatgaaggtgagactttagcagaagtcaagaagcgcatacagagtaaactgcaagtctctgctgatgaattttccaagtggaaatttgcatttatatcaatgaatcggccagactacctccaggattcagatgttgtacctactggctttcagaggagagaggtctacggagcttgggagcaatatcttgggatagagcacgctgatactgcaccaaaaagggtctatacagtgaatcaggtcccatctcatgcacgacgctttgggggagctttcagaaacttgcggtatttgttggggaaaaacctccatgttgatttagtgatgtacggttgagatgtagtatggtaaagtttctggtcaaatgagcgtcttcctgctgaggtgatgcagccaaaccggcgtctcctcaaaacagac

SEQ ID NO: 41550 - DNA, 3630 bp, Zea Mays
ttttttttcaaaattaattttttttgctcagaataattaagttttcccatgtgtaagcttttctcgcactcgtactccctcctccgctccggctaggaggctgctccctccgccgctccgccttcgtcgcgcggccatcgtttccggctctgtccccggatatctcttcgccaccgcttcctgcgccgcggcgccgccacaaccgaaggcgacccagtcgccttcaacactatggtgactcctcccactgtcgagcaggaggacgaggagatgctcgtgccccgccaggaggcggtcgacaccgacgcagcgcagcccatggaagtggtggcacagactgaggtggtgagcacggcggagagccagcctgtggaagatccgcagacatcacggttcacttggacaattgagaacttcaccaggttcagtgagaagaagcactatttagaggtttttgttgttggcggattcaaatggagtgtgctgattttccccaaggggaacaatgtggaccacttctcaatgtacttggatgttgctgactcaaccagccttccgtatggttggagccgctatgctcagtttagtcttgctgttgtaaaccaaatccagccagagtttacgatacgcaaagagacccaacatcaatttaatgctcgtgagagtgattggggtttcacatcttttatgcctttgagtgagctctatgatgcaagtagaggttacctcgtgaatgatactgttgttgtggaggccgaggttgctgtccgcagaattgttgactattggacatatgactcaaaaaaggaaactggttatgtgggcctgaaaaaccaaggagctacctgttatatgaactcccttctacagacactataccatataccctacttcaggaaggctgtatatcatatgccaaccactgaaaatgacataccatcaggaagcattcccttggcgctgcagagccttttctacaagctccagtacagtgacagtagtgtagctacaaaagagctgacaaaatcttttggttgggacacatatgattctttcatgcagcatgatgtacaagagctcaacagagttctgtctgagaaacttgaggacaaaatgaagggaactgtcgtagaaggaacaattgagcaattatttgaaggtcaccacatcaattacattgagtgtataaacgttgagcataaatctaaccgcaaggaatccttttatgatcttcagcttgacgtcaaaggctgtcgtgacatttattcgtcgtttgataaatatgttgaagttgaacgtctagagggtgataacaagtatcacgcagagaatcatggtctacaggatgcaaaaaagggcgttcttttccttgatttcccccctgttttgcaactccagctgaagcgctttgagtatgattatatgagagatagcatggttaagattaatgatcgctatgagttccctctgcaacttgatctggatagagatggtggcaaatacattgctccaaatgcagatcgaagtacacgaaacctttacactcttcacagtgttcttgttcatagtggtggggtacatggtggtcactactatgcattcatacggccaactttatctgagcaatggtataaatttgatgatgaacgtgtaacaaaagaagatgctaagaaggctcttgaagaacaatatgggggtgatgaagagttaccccaaataaaccctggtttcaacaacgctccatttaaattcacgaagtattcaaacgcgtatatgcttgtttatattcgtgaaagtgccaaggagaaaattatgtgtactgttgatgaaaaagacattgctgagcatttaagggtaaggttgaaaaaagaacaagaagagaaagaacacaaaaagaaagaaaaagctgaagctcatctttataccataattaaggtagctcgagatgaggatttgaaggaacaaattggaaagggtatatattttgatttggtggaccatgaaaaggtccataatttccgtatacagaaacaaatgccttttagttgtttcaaggaggaagtagccaaggaatatggcatccctgttcagtttcagcgcttctggttgtgggcaaagaggcaaaaccatacataccgccctaatcgtccattgaccgttcatgaggaaacacaatctgtggggcaactgagagaaatatcaaataaggcacacaatgttgagttgaagctgtttttggaagtagaacttgggctggatttgcggcctctccctcctcctgagaagggcaaggaagatattcttcttttcttcaaattctacaacccagaaaaggaagaactctgtttcatggggaggctctttgtgaaggccttgggaaaaccttcagaaatcctggcaaaactaaacgaaatggctggatttccccctgatcaagaaattgagctttttgaggaaattaagtttgagccaaacgtgatgtgtgaaactatagacaagaaactcacttttcattatagtcagcttgaagatggggacattatttgtttccaaaaatcaccaggagcagaatatgatgcacccgtgcgatatccggatgttccttcatttttggagtatgtccataataggcaggttgtacatttccggtctttggagaaaccaaaggatgatgatttttctttggaattgtcaaagcttcatacctatgatgatgttgttgagagagttgctcgccaacttgaattggacgatccagcgaaaattcggcttacaccccacaattgctactctcagcaacctaaaccacagcccgtcaaatatcgaggagtggtgcatctgtcggacatgctcatccactacaatcagacgtctgacatcttgtattatgaagtgttggatataccactgccagaattgcagttcctaaaaaccctgaaagttgcatttcaccatcctacgaaggatgaggttgttattcatagcatcaggcttccaaaaaatagcaccattgctgatgtaatatatgacttgaaaactaaggttgaactgtccagtcctaatgctgaactacgtgtactagaagtcttctaccacaagatctataagatctttccactacatgagaagatagagaatataaacgaccaatattggacactacgtgctgaggagattcagaactttggagaccctttcgttttggtcgttcatgaaggtgagactttagcagaagtcaagaagcgcatacagagtaaactgcaagtctctgctgatgaattttccaagtggaaatttgcatttatatcaatgaatcggccagactacctccaggattcagatgttgtacctactggctttcagaggagagaggtctacggagcttgggagcaatatcttgggatagagcacgctgatactgcaccaaaaagggtctatacagtgaatcaggtcccatctcatgcacgacgctttgggggagctttcagaaacttgcggtatttgttggggaaaaacctccatgttgatttagtgatgtacggttgagatgtagtatggtaaagtttctggtcaaatgagcgtcttcctgctgaggtgatgcagccaaaccggcgtctcctcaaaacagac

SEQ ID NO: 41551 - DNA, 4176 bp, Zea Mays
aataattaagttttcccatgtgtaagcttttctcgcactcgtactccctcctccgctccggctaggaggctgctccctccgccgctccgccttcgtcgcgcggccatcgtttccggctctgtccccggatatctcttcgccaccgcttcctgcgccgcggcgccgccacaaccgaaggcgacccagtcgccttcaacactatggtgactcctcccactgtcgagcaggaggacgaggagatgctcgtgccccgccaggaggcggtcgacaccgacgcagcgcagcccatggaagtggtggcacagactgaggtggtgagcacggcggagagccagcctgtggaagatccgcagacatcacggttcacttggacaattgagaacttcaccaggttcagtgagaagaagcactatttagaggtttttgttgttggcggattcaaatggagtgtgctgattttccccaaggggaacaatgtggaccacttctcaatgtacttggatgttgctgactcaaccagccttccgtatggttggagccgctatgctcagtttagtcttgctgttgtaaaccaaatccagccagagtttacgatacgcaaagagacccaacatcaatttaatgctcgtgagagtgattggggtttcacatcttttatgcctttgagtgagctctatgatgcaagtagaggttacctcgtgaatgatactgttgttgtggaggccgaggttgctgtccgcagaattgttgactattggacatatgactcaaaaaaggaaactggttatgtgggcctgaaaaaccaaggagctacctgttatatgaactcccttctacagacactataccatataccctacttcaggaaggctgtatatcatatgccaaccactgaaaatgacataccatcaggaagcattcccttggcgctgcagagccttttctacaagctccagtacagtgacagtagtgtagctacaaaagagctgacaaaatcttttggttgggacacatatgattctttcatgcagcatgatgtacaagagctcaacagagttctgtctgagaaacttgaggacaaaatgaagggaactgtcgtagaaggaacaattgagcaattatttgaaggtcaccacatcaattacattgagtgtataaacgttgagcataaatctaaccgcaaggaatccttttatgatcttcagcttgacgtcaaaggctgtcgtgacatttattcgtcgtttgataaatatgttgaagttgaacgtctagagggtgataacaagtatcacgcagagaatcatggtctacaggatgcaaaaaagggcgttcttttccttgatttcccccctgttttgcaactccagctgaagcgctttgagtatgattatatgagagatagcatggttaagattaatgatcgctatgagttccctctgcaacttgatctggatagagatggtggcaaatacattgctccaaatgcagatcgaagtacacgaaacctttacactcttcacagtgttcttgttcatagtggtggggtacatggtggtcactactatgcattcatacggccaactttatctgagcaatggtataaatttgatgatgaacgtgtaacaaaagaagatgctaagaaggctcttgaagaacaatatgggggtgatgaagagttaccccaaataaaccctggtttcaacaacgctccatttaaattcacgaagtattcaaacgcgtatatgcttgtttatattcgtgaaagtgccaaggagaaaattatgtgtactgttgatgaaaaagacattgctgagcatttaagggtaaggttgaaaaaagaacaagaagagaaagaacacaaaaagaaagaaaaagctgaagctcatctttataccataattaaggtagctcgagatgaggatttgaaggaacaaattggaaagggtatatattttgatttggtggaccatgaaaaggtccataatttccgtatacagaaacaaatgccttttagttgtttcaaggaggaagtagccaaggaatatggcatccctgttcagtttcagcgcttctggttgtgggcaaagaggcaaaaccatacataccgccctaatcgtccattgaccgttcatgaggaaacacaatctgtggggcaactgagagaaatatcaaataaggcacacaatgttgagttgaagctgtttttggaagtagaacttgggctggatttgcggcctctccctcctcctgagaagggcaaggaagatattcttcttttcttcaaattctacaacccagaaaaggaagaactctgtttcatggggaggctctttgtgaaggccttgggaaaaccttcagaaatcctggcaaaactaaacgaaatggctggatttccccctgatcaagaaattgagctttttgaggaaattaagtttgagccaaacgtgatgtgtgaaactatagacaagaaactcacttttcattatagtcagcttgaagatggggacattatttgtttccaaaaatcaccaggagcagaatatgatgcacccgtgcgatatccggatgttccttcatttttggagtatgtccataataggcaggttgtacatttccggtctttggagaaaccaaaggatgatgatttttctttggaattgtcaaagcttcatacctatgatgatgttgttgagagagttgctcgccaacttgaattggacgatccagcgaaaattcggcttacaccccacaattgctactctcagcaacctaaaccacagcccgtcaaatatcgaggagtggtgcatctgtcggacatgctcatccactacaatcagacgtctgacatcttgtattatgaagtgttggatataccactgccagaattgcagttcctaaaaaccctgaaagttgcatttcaccatcctacgaaggatgaggttgttattcatagcatcaggcttccaaaaaatagcaccattgctgatgtaatatatgacttgaaaactaaggttgaactgtccagtcctaatgctgaactacgtgtactagaagtcttctaccacaagatctataagatctttccactacatgagaagatagagaatataaacgaccaatattggacactacgtgctgaggagattccagaagaggaaaaaaatataggcccaaatgatcggctaattcatgtttatcacttcaagaaagatattaatcagactcagcagattcagaactttggagaccctttcgttttggtcgttcatgaaggtgagactttagcagaagtcaagaagcgcatacagagtaaactgcaagtctctgctgatgaattttccaagtggaaatttgcatttatatcaatgaatcggccagactacctccaggattcagatgttgtacctactggctttcagaggagagaggtctacggagcttgggagcaatatcttgggatagagcacgctgatactgcaccaaaaagggtctatacagtgaatcagaaccgtcacgcatacgaaaagccggtcaaaatttacaattgagatttctaactaacatggccgcacggtgaaggcctccatacgagaggagcggccagaaaagggaggacagggaatttatactgtcagggggaaaacctcatagttagcgagccattcggtgtggcacggccatgtattccagcgctagaggccagccactgttatttcatctgtagcagccagcagctcctatagcaatgattttctttttgtacaagattttccttctttgccttagggtgatggcgcgagcgcattggtgtccgtttcggttgggcaattgcttcattcttagagcaaagctgggtacataagattttggtaggaagcgtgtatacaggcaggctgtatagttgtggctctctcggcttgatccctcgtatcttgtcttgtgctattgttaatgcagtgacaggggctgactgtaaatcgtggttccaattttcaggtcccatctcatgcacgacgctttgggggagctttcagaaacttgcggtatttgttggggaaaaacctccatgttgatttagtgatgtacggttgagatgtagtatggtaaagtttctggtcaaatgagcgtcttcctgctgaggtgatgcagccaaaccggcgtctcctcaaaacagac

SEQ ID NO: 41552 - DNA, 4167 bp, Zea Mays
taagttttcccatgtgtaagcttttctcgcactcgtactccctcctccgctccggctaggaggctgctccctccgccgctccgccttcgtcgcgcggccatcgtttccggctctgtccccggatatctcttcgccaccgcttcctgcgccgcggcgccgccacaaccgaaggcgacccagtcgccttcaacactatggtgactcctcccactgtcgaggaggacgaggagatgctcgtgccccgccaggaggcggtcgacaccgacgcagcgcagcccatggaagtggtggcacagactgaggtggtgagcacggcggagagccagcctgtggaagatccgcagacatcacggttcacttggacaattgagaacttcaccaggttcagtgagaagaagcactatttagaggtttttgttgttggcggattcaaatggagtgtgctgattttccccaaggggaacaatgtggaccacttctcaatgtacttggatgttgctgactcaaccagccttccgtatggttggagccgctatgctcagtttagtcttgctgttgtaaaccaaatccagccagagtttacgatacgcaaagagacccaacatcaatttaatgctcgtgagagtgattggggtttcacatcttttatgcctttgagtgagctctatgatgcaagtagaggttacctcgtgaatgatactgttgttgtggaggccgaggttgctgtccgcagaattgttgactattggacatatgactcaaaaaaggaaactggttatgtgggcctgaaaaaccaaggagctacctgttatatgaactcccttctacagacactataccatataccctacttcaggaaggctgtatatcatatgccaaccactgaaaatgacataccatcaggaagcattcccttggcgctgcagagccttttctacaagctccagtacagtgacagtagtgtagctacaaaagagctgacaaaatcttttggttgggacacatatgattctttcatgcagcatgatgtacaagagctcaacagagttctgtctgagaaacttgaggacaaaatgaagggaactgtcgtagaaggaacaattgagcaattatttgaaggtcaccacatcaattacattgagtgtataaacgttgagcataaatctaaccgcaaggaatccttttatgatcttcagcttgacgtcaaaggctgtcgtgacatttattcgtcgtttgataaatatgttgaagttgaacgtctagagggtgataacaagtatcacgcagagaatcatggtctacaggatgcaaaaaagggcgttcttttccttgatttcccccctgttttgcaactccagctgaagcgctttgagtatgattatatgagagatagcatggttaagattaatgatcgctatgagttccctctgcaacttgatctggatagagatggtggcaaatacattgctccaaatgcagatcgaagtacacgaaacctttacactcttcacagtgttcttgttcatagtggtggggtacatggtggtcactactatgcattcatacggccaactttatctgagcaatggtataaatttgatgatgaacgtgtaacaaaagaagatgctaagaaggctcttgaagaacaatatgggggtgatgaagagttaccccaaataaaccctggtttcaacaacgctccatttaaattcacgaagtattcaaacgcgtatatgcttgtttatattcgtgaaagtgccaaggagaaaattatgtgtactgttgatgaaaaagacattgctgagcatttaagggtaaggttgaaaaaagaacaagaagagaaagaacacaaaaagaaagaaaaagctgaagctcatctttataccataattaaggtagctcgagatgaggatttgaaggaacaaattggaaagggtatatattttgatttggtggaccatgaaaaggtccataatttccgtatacagaaacaaatgccttttagttgtttcaaggaggaagtagccaaggaatatggcatccctgttcagtttcagcgcttctggttgtgggcaaagaggcaaaaccatacataccgccctaatcgtccattgaccgttcatgaggaaacacaatctgtggggcaactgagagaaatatcaaataaggcacacaatgttgagttgaagctgtttttggaagtagaacttgggctggatttgcggcctctccctcctcctgagaagggcaaggaagatattcttcttttcttcaaattctacaacccagaaaaggaagaactctgtttcatggggaggctctttgtgaaggccttgggaaaaccttcagaaatcctggcaaaactaaacgaaatggctggatttccccctgatcaagaaattgagctttttgaggaaattaagtttgagccaaacgtgatgtgtgaaactatagacaagaaactcacttttcattatagtcagcttgaagatggggacattatttgtttccaaaaatcaccaggagcagaatatgatgcacccgtgcgatatccggatgttccttcatttttggagtatgtccataataggcaggttgtacatttccggtctttggagaaaccaaaggatgatgatttttctttggaattgtcaaagcttcatacctatgatgatgttgttgagagagttgctcgccaacttgaattggacgatccagcgaaaattcggcttacaccccacaattgctactctcagcaacctaaaccacagcccgtcaaatatcgaggagtggtgcatctgtcggacatgctcatccactacaatcagacgtctgacatcttgtattatgaagtgttggatataccactgccagaattgcagttcctaaaaaccctgaaagttgcatttcaccatcctacgaaggatgaggttgttattcatagcatcaggcttccaaaaaatagcaccattgctgatgtaatatatgacttgaaaactaaggttgaactgtccagtcctaatgctgaactacgtgtactagaagtcttctaccacaagatctataagatctttccactacatgagaagatagagaatataaacgaccaatattggacactacgtgctgaggagattccagaagaggaaaaaaatataggcccaaatgatcggctaattcatgtttatcacttcaagaaagatattaatcagactcagcagattcagaactttggagaccctttcgttttggtcgttcatgaaggtgagactttagcagaagtcaagaagcgcatacagagtaaactgcaagtctctgctgatgaattttccaagtggaaatttgcatttatatcaatgaatcggccagactacctccaggattcagatgttgtacctactggctttcagaggagagaggtctacggagcttgggagcaatatcttgggatagagcacgctgatactgcaccaaaaagggtctatacagtgaatcagaaccgtcacgcatacgaaaagccggtcaaaatttacaattgagatttctaactaacatggccgcacggtgaaggcctccatacgagaggagcggccagaaaagggaggacagggaatttatactgtcagggggaaaacctcatagttagcgagccattcggtgtggcacggccatgtattccagcgctagaggccagccactgttatttcatctgtagcagccagcagctcctatagcaatgattttctttttgtacaagattttccttctttgccttagggtgatggcgcgagcgcattggtgtccgtttcggttgggcaattgcttcattcttagagcaaagctgggtacataagattttggtaggaagcgtgtatacaggcaggctgtatagttgtggctctctcggcttgatccctcgtatcttgtcttgtgctattgttaatgcagtgacaggggctgactgtaaatcgtggttccaattttcaggtcccatctcatgcacgacgctttgggggagctttcagaaacttgcggtatttgttggggaaaaacctccatgttgatttagtgatgtacggttgagatgtagtatggtaaagtttctggtcaaatgagcgtcttcctgctgaggtgatgcagccaaaccggcgtctcctcaaaacagac

SEQ ID NO: 41553 - DNA, 4134 bp, Zea Mays
ccctcctccgctccggctaggaggctgctccctccgccgctccgccttcgtcgcgcggccatcgtttccggctctgtccccggatatctcttcgccaccgcttcctgcgccgcggcgccgccacaaccgaaggcgacccagtcgccttcaacactatggtgactcctcccactgtcgaggaggacgaggagatgctcgtgccccgccaggaggcggtcgacaccgacgcagcgcagcccatggaaggtactgtggtggcacagactgaggtggtgagcacggcggagagccagcctgtggaagatccgcagacatcacggttcacttggacaattgagaacttcaccaggttcagtgagaagaagcactatttagaggtttttgttgttggcggattcaaatggagtgtgctgattttccccaaggggaacaatgtggaccacttctcaatgtacttggatgttgctgactcaaccagccttccgtatggttggagccgctatgctcagtttagtcttgctgttgtaaaccaaatccagccagagtttacgatacgcaaagagacccaacatcaatttaatgctcgtgagagtgattggggtttcacatcttttatgcctttgagtgagctctatgatgcaagtagaggttacctcgtgaatgatactgttgttgtggaggccgaggttgctgtccgcagaattgttgactattggacatatgactcaaaaaaggaaactggttatgtgggcctgaaaaaccaaggagctacctgttatatgaactcccttctacagacactataccatataccctacttcaggaaggctgtatatcatatgccaaccactgaaaatgacataccatcaggaagcattcccttggcgctgcagagccttttctacaagctccagtacagtgacagtagtgtagctacaaaagagctgacaaaatcttttggttgggacacatatgattctttcatgcagcatgatgtacaagagctcaacagagttctgtctgagaaacttgaggacaaaatgaagggaactgtcgtagaaggaacaattgagcaattatttgaaggtcaccacatcaattacattgagtgtataaacgttgagcataaatctaaccgcaaggaatccttttatgatcttcagcttgacgtcaaaggctgtcgtgacatttattcgtcgtttgataaatatgttgaagttgaacgtctagagggtgataacaagtatcacgcagagaatcatggtctacaggatgcaaaaaagggcgttcttttccttgatttcccccctgttttgcaactccagctgaagcgctttgagtatgattatatgagagatagcatggttaagattaatgatcgctatgagttccctctgcaacttgatctggatagagatggtggcaaatacattgctccaaatgcagatcgaagtacacgaaacctttacactcttcacagtgttcttgttcatagtggtggggtacatggtggtcactactatgcattcatacggccaactttatctgagcaatggtataaatttgatgatgaacgtgtaacaaaagaagatgctaagaaggctcttgaagaacaatatgggggtgatgaagagttaccccaaataaaccctggtttcaacaacgctccatttaaattcacgaagtattcaaacgcgtatatgcttgtttatattcgtgaaagtgccaaggagaaaattatgtgtactgttgatgaaaaagacattgctgagcatttaagggtaaggttgaaaaaagaacaagaagagaaagaacacaaaaagaaagaaaaagctgaagctcatctttataccataattaaggtagctcgagatgaggatttgaaggaacaaattggaaagggtatatattttgatttggtggaccatgaaaaggtccataatttccgtatacagaaacaaatgccttttagttgtttcaaggaggaagtagccaaggaatatggcatccctgttcagtttcagcgcttctggttgtgggcaaagaggcaaaaccatacataccgccctaatcgtccattgaccgttcatgaggaaacacaatctgtggggcaactgagagaaatatcaaataaggcacacaatgttgagttgaagctgtttttggaagtagaacttgggctggatttgcggcctctccctcctcctgagaagggcaaggaagatattcttcttttcttcaaattctacaacccagaaaaggaagaactctgtttcatggggaggctctttgtgaaggccttgggaaaaccttcagaaatcctggcaaaactaaacgaaatggctggatttccccctgatcaagaaattgagctttttgaggaaattaagtttgagccaaacgtgatgtgtgaaactatagacaagaaactcacttttcattatagtcagcttgaagatggggacattatttgtttccaaaaatcaccaggagcagaatatgatgcacccgtgcgatatccggatgttccttcatttttggagtatgtccataataggcaggttgtacatttccggtctttggagaaaccaaaggatgatgatttttctttggaattgtcaaagcttcatacctatgatgatgttgttgagagagttgctcgccaacttgaattggacgatccagcgaaaattcggcttacaccccacaattgctactctcagcaacctaaaccacagcccgtcaaatatcgaggagtggtgcatctgtcggacatgctcatccactacaatcagacgtctgacatcttgtattatgaagtgttggatataccactgccagaattgcagttcctaaaaaccctgaaagttgcatttcaccatcctacgaaggatgaggttgttattcatagcatcaggcttccaaaaaatagcaccattgctgatgtaatatatgacttgaaaactaaggttgaactgtccagtcctaatgctgaactacgtgtactagaagtcttctaccacaagatctataagatctttccactacatgagaagatagagaatataaacgaccaatattggacactacgtgctgaggagattccagaagaggaaaaaaatataggcccaaatgatcggctaattcatgtttatcacttcaagaaagatattaatcagactcagcagattcagaactttggagaccctttcgttttggtcgttcatgaaggtgagactttagcagaagtcaagaagcgcatacagagtaaactgcaagtctctgctgatgaattttccaagtggaaatttgcatttatatcaatgaatcggccagactacctccaggattcagatgttgtacctactggctttcagaggagagaggtctacggagcttgggagcaatatcttgggatagagcacgctgatactgcaccaaaaagggtctatacagtgaatcagaaccgtcacgcatacgaaaagccggtcaaaatttacaattgagatttctaactaacatggccgcacggtgaaggcctccatacgagaggagcggccagaaaagggaggacagggaatttatactgtcagggggaaaacctcatagttagcgagccattcggtgtggcacggccatgtattccagcgctagaggccagccactgttatttcatctgtagcagccagcagctcctatagcaatgattttctttttgtacaagattttccttctttgccttagggtgatggcgcgagcgcattggtgtccgtttcggttgggcaattgcttcattcttagagcaaagctgggtacataagattttggtaggaagcgtgtatacaggcaggctgtatagttgtggctctctcggcttgatccctcgtatcttgtcttgtgctattgttaatgcagtgacaggggctgactgtaaatcgtggttccaattttcaggtcccatctcatgcacgacgctttgggggagctttcagaaacttgcggtatttgttggggaaaaacctccatgttgatttagtgatgtacggttgagatgtagtatggtaaagtttctggtcaaatgagcgtcttcctgctgaggtgatgcagccaaaccggcgtctcctcaaaacagac

SEQ ID NO: 41554 - DNA, 3252 bp, Zea Mays
ccctcctccgctccggctaggaggctgctccctccgccgctccgccttcgtcgcgcggccatcgtttccggctctgtccccggatatctcttcgccaccgcttcctgcgccgcggcgccgccacaaccgaaggcgacccagtcgccttcaacactatggtgactcctcccactgtcgagcaggaggacgaggagatgctcgtgccccgccaggaggcggtcgacaccgacgcagcgcagcccatggaaggtactgtggtggcacagactgaggtggtgagcacggcggagagccagcctgtggaagatccgcagacatcacggttcacttggacaattgagaacttcaccaggttcagtgagaagaagcactatttagaggtttttgttgttggcggattcaaatggagtgtgctgattttcccccctgttttgcaactccagctgaagcgctttgagtatgattatatgagagatagcatggttaagattaatgatcgctatgagttccctctgcaacttgatctggatagagatggtggcaaatacattgctccaaatgcagatcgaagtacacgaaacctttacactcttcacagtgttcttgttcatagtggtggggtacatggtggtcactactatgcattcatacggccaactttatctgagcaatggtataaatttgatgatgaacgtgtaacaaaagaagatgctaagaaggctcttgaagaacaatatgggggtgatgaagagttaccccaaataaaccctggtttcaacaacgctccatttaaattcacgaagtattcaaacgcgtatatgcttgtttatattcgtgaaagtgccaaggagaaaattatgtgtactgttgatgaaaaagacattgctgagcatttaagggtaaggttgaaaaaagaacaagaagagaaagaacacaaaaagaaagaaaaagctgaagctcatctttataccataattaaggtagctcgagatgaggatttgaaggaacaaattggaaagggtatatattttgatttggtggaccatgaaaaggtccataatttccgtatacagaaacaaatgccttttagttgtttcaaggaggaagtagccaaggaatatggcatccctgttcagtttcagcgcttctggttgtgggcaaagaggcaaaaccatacataccgccctaatcgtccattgaccgttcatgaggaaacacaatctgtggggcaactgagagaaatatcaaataaggcacacaatgttgagttgaagctgtttttggaagtagaacttgggctggatttgcggcctctccctcctcctgagaagggcaaggaagatattcttcttttcttcaaattctacaacccagaaaaggaagaactctgtttcatggggaggctctttgtgaaggccttgggaaaaccttcagaaatcctggcaaaactaaacgaaatggctggatttccccctgatcaagaaattgagctttttgaggaaattaagtttgagccaaacgtgatgtgtgaaactatagacaagaaactcacttttcattatagtcagcttgaagatggggacattatttgtttccaaaaatcaccaggagcagaatatgatgcacccgtgcgatatccggatgttccttcatttttggagtatgtccataataggcaggttgtacatttccggtctttggagaaaccaaaggatgatgatttttctttggaattgtcaaagcttcatacctatgatgatgttgttgagagagttgctcgccaacttgaattggacgatccagcgaaaattcggcttacaccccacaattgctactctcagcaacctaaaccacagcccgtcaaatatcgaggagtggtgcatctgtcggacatgctcatccactacaatcagacgtctgacatcttgtattatgaagtgttggatataccactgccagaattgcagttcctaaaaaccctgaaagttgcatttcaccatcctacgaaggatgaggttgttattcatagcatcaggcttccaaaaaatagcaccattgctgatgtaatatatgacttgaaaactaaggttgaactgtccagtcctaatgctgaactacgtgtactagaagtcttctaccacaagatctataagatctttccactacatgagaagatagagaatataaacgaccaatattggacactacgtgctgaggagattccagaagaggaaaaaaatataggcccaaatgatcggctaattcatgtttatcacttcaagaaagatattaatcagactcagcagattcagaactttggagaccctttcgttttggtcgttcatgaaggtgagactttagcagaagtcaagaagcgcatacagagtaaactgcaagtctctgctgatgaattttccaagtggaaatttgcatttatatcaatgaatcggccagactacctccaggattcagatgttgtacctactggctttcagaggagagaggtctacggagcttgggagcaatatcttgggatagagcacgctgatactgcaccaaaaagggtctatacagtgaatcagaaccgtcacgcatacgaaaagccggtcaaaatttacaattgagatttctaactaacatggccgcacggtgaaggcctccatacgagaggagcggccagaaaagggaggacagggaatttatactgtcagggggaaaacctcatagttagcgagccattcggtgtggcacggccatgtattccagcgctagaggccagccactgttatttcatctgtagcagccagcagctcctatagcaatgattttctttttgtacaagattttccttctttgccttagggtgatggcgcgagcgcattggtgtccgtttcggttgggcaattgcttcattcttagagcaaagctgggtacataagattttggtaggaagcgtgtatacaggcaggctgtatagttgtggctctctcggcttgatccctcgtatcttgtcttgtgctattgttaatgcagtgacaggggctgactgtaaatcgtggttccaattttcaggtcccatctcatgcacgacgctttgggggagctttcagaaacttgcggtatttgttggggaaaaacctccatgttgatttagtgatgtacggttgagatgtagtatggtaaagtttctggtcaaatgagcgtcttcctgctgaggtgatgcagccaaaccggcgtctcctcaaaacagac

SEQ ID NO: 41555 - DNA, 3638 bp, Zea Mays
ccctcctccgctccggctaggaggctgctccctccgccgctccgccttcgtcgcgcggccatcgtttccggctctgtccccggatatctcttcgccaccgcttcctgcgccgcggcgccgccacaaccgaaggcgacccagtcgccttcaacactatggtgactcctcccactgtcgagcaggaggacgaggagatgctcgtgccccgccaggaggcggtcgacaccgacgcagcgcagcccatggaagtggtggcacagactgaggtggtgagcacggcggagagccagcctgtggaagatccgcagacatcacggttcacttggacaattgagaacttcaccaggttcagtgagaagaagcactatttagaggtttttgttgttggcggattcaaatggagtgtgctgattttccccaaggggaacaatgtggaccacttctcaatgtacttggatgttgctgactcaaccagccttccgtatggttggagccgctatgctcagtttagtcttgctgttgtaaaccaaatccagccagagtttacgatacgcaaagagacccaacatcaatttaatgctcgtgagagtgattggggtttcacatcttttatgcctttgagtgagctctatgatgcaagtagaggttacctcgtgaatgatactgttgttgtggaggccgaggttgctgtccgcagaattgttgactattggacatatgactcaaaaaaggaaactggttatgtgggcctgaaaaaccaaggagctacctgttatatgaactcccttctacagacactataccatataccctacttcaggaaggctgtatatcatatgccaaccactgaaaatgacataccatcaggaagcattcccttggcgctgcagagccttttctacaagctccagtacagtgacagtagtgtagctacaaaagagctgacaaaatcttttggttgggacacatatgattctttcatgcagcatgatgtacaagagctcaacagagttctgtctgagaaacttgaggacaaaatgaagggaactgtcgtagaaggaacaattgagcaattatttgaaggtcaccacatcaattacattgagtgtataaacgttgagcataaatctaaccgcaaggaatccttttatgatcttcagcttgacgtcaaaggctgtcgtgacatttattcgtcgtttgataaatatgttgaagttgaacgtctagagggtgataacaagtatcacgcagagaatcatggtctacaggatgcaaaaaagggcgttcttttccttgatttcccccctgttttgcaactccagctgaagcgctttgagtatgattatatgagagatagcatggttaagattaatgatcgctatgagttccctctgcaacttgatctggatagagatggtggcaaatacattgctccaaatgcagatcgaagtacacgaaacctttacactcttcacagtgttcttgttcatagtggtggggtacatggtggtcactactatgcattcatacggccaactttatctgagcaatggtataaatttgatgatgaacgtgtaacaaaagaagatgctaagaaggctcttgaagaacaatatgggggtgatgaagagttaccccaaataaaccctggtttcaacaacgctccatttaaattcacgaagtattcaaacgcgtatatgcttgtttatattcgtgaaagtgccaaggagaaaattatgtgtactgttgatgaaaaagacattgctgagcatttaagggtaaggttgaaaaaagaacaagaagagaaagaacacaaaaagaaagaaaaagctgaagctcatctttataccataattaaggtagctcgagatgaggatttgaaggaacaaattggaaagggtatatattttgatttggtggaccatgaaaaggtccataatttccgtatacagaaacaaatgccttttagttgtttcaaggaggaagtagccaaggaatatggcatccctgttcagtttcagcgcttctggttgtgggcaaagaggcaaaaccatacataccgccctaatcgtccattgaccgttcatgaggaaacacaatctgtggggcaactgagagaaatatcaaataaggcacacaatgttgagttgaagctgtttttggaagtagaacttgggctggatttgcggcctctccctcctcctgagaagggcaaggaagatattcttcttttcttcaaattctacaacccagaaaaggaagaactctgtttcatggggaggctctttgtgaaggccttgggaaaaccttcagaaatcctggcaaaactaaacgaaatggctggatttccccctgatcaagaaattgagctttttgaggaaattaagtttgagccaaacgtgatgtgtgaaactatagacaagaaactcacttttcattatagtcagcttgaagatggggacattatttgtttccaaaaatcaccaggagcagaatatgatgcacccgtgcgatatccggatgttccttcatttttggagtatgtccataataggcaggttgtacatttccggtctttggagaaaccaaaggatgatgatttttctttggaattgtcaaagcttcatacctatgatgatgttgttgagagagttgctcgccaacttgaattggacgatccagcgaaaattcggcttacaccccacaattgctactctcagcaacctaaaccacagcccgtcaaatatcgaggagtggtgcatctgtcggacatgctcatccactacaatcagacgtctgacatcttgtattatgaagtgttggatataccactgccagaattgcagttcctaaaaaccctgaaagttgcatttcaccatcctacgaaggatgaggttgttattcatagcatcaggcttccaaaaaatagcaccattgctgatgtaatatatgacttgaaaactaaggttgaactgtccagtcctaatgctgaactacgtgtactagaagtcttctaccacaagatctataagatctttccactacatgagaagatagagaatataaacgaccaatattggacactacgtgctgaggagattccagaagaggaaaaaaatataggcccaaatgatcggctaattcatgtttatcacttcaagaaagatattaatcagactcagattcagaactttggagaccctttcgttttggtcgttcatgaaggtgagactttagcagaagtcaagaagcgcatacagagtaaactgcaagtctctgctgatgaattttccaagtggaaatttgcatttatatcaatgaatcggccagactacctccaggattcagatgttgtacctactggctttcagaggagagaggtctacggagcttgggagcaatatcttgggatagagcacgctgatactgcaccaaaaagggtctatacagtgaatcaggtcccatctcatgcacgacgctttgggggagctttcagaaacttgcggtatttgttggggaaaaacctccatgttgatttagtgatgtacggttgagatgtagtatggtaaagtttctggtcaaatgagcgtcttcctgctgaggtgatgcagccaaaccggcgtctcctcaaaacagac

SEQ ID NO: 41556 - DNA, 4053 bp, Zea Mays
ccctcctccgctccggctaggaggctgctccctccgccgctccgccttcgtcgcgcggccatcgtttccggctctgtccccggatatctcttcgccaccgcttcctgcgccgcggcgccgccacaaccgaaggcgacccagtcgccttcaacactatggtgactcctcccactgtcgagcaggaggacgaggagatgctcgtgccccgccaggaggcggtcgacaccgacgcagcgcagcccatggaagtggtggcacagactgaggtggtgagcacggcggagagccagcctgtggaagatccgcagacatcacggttcacttggacaattgagaacttcaccaggttcagtgagaagaagcactatttagaggtttttgttgttggcggattcaaatggagtgtgctgattttccccaaggggaacaatgtggaccacttctcaatgtacttggatgttgctgactcaaccagccttccgtatggttggagccgctatgctcagtttagtcttgctgttgtaaaccaaatccagccagagtttacgatacgcaaagagacccaacatcaatttaatgctcgtgagagtgattggggtttcacatcttttatgcctttgagtgagctctatgatgcaagtagaggttacctcgtgaatgatactgttgttgtggaggccgaggttgctgtccgcagaattgttgactattggacatatgactcaaaaaaggaaactggttatgtgggcctgaaaaaccaaggagctacctgttatatgaactcccttctacagacactataccatataccctacttcaggaaggctgtatatcatatgccaaccactgaaaatgacataccatcaggaagcattcccttggcgctgcagagccttttctacaagctccagtacagtgacagtagtgtagctacaaaagagctgacaaaatcttttggttgggacacatatgattctttcatgcagcatgatgtacaagagctcaacagagttctgtctgagaaacttgaggacaaaatgaagggaactgtcgtagaaggaacaattgagcaattatttgaaggtcaccacatcaattacattgagtgtataaacgttgagcataaatctaaccgcaaggaatccttttatgatcttcagcttgacgtcaaaggctgtcgtgacatttattcgtcgtttgataaatatgttgaagttgaacgtctagagggtgataacaagtatcacgcagagaatcatggtctacaggatgcaaaaaagggcgttcttttccttgatttcccccctgttttgcaactccagctgaagcgctttgagtatgattatatgagagatagcatggttaagattaatgatcgctatgagttccctctgcaacttgatctggatagagatggtggcaaatacattgctccaaatgcagatcgaagtacacgaaacctttacactcttcacagtgttcttgttcatagtggtggggtacatggtggtcactactatgcattcatacggccaactttatctgagcaatggtataaatttgatgatgaacgtgtaacaaaagaagatgctaagaaggctcttgaagaacaatatgggggtgatgaagagttaccccaaataaaccctggtttcaacaacgctccatttaaattcacgaagtattcaaacgcgtatatgcttgtttatattcgtgaaagtgccaaggagaaaattatgtgtactgttgatgaaaaagacattgctgagcatttaagggtaaggttgaaaaaagaacaagaagagaaagaacacaaaaagaaagaaaaagctgaagctcatctttataccataattaaggtagctcgagatgaggatttgaaggaacaaattggaaagggtatatattttgatttggtggaccatgaaaaggtccataatttccgtatacagaaacaaatgccttttagttgtttcaaggaggaagtagccaaggaatatggcatccctgttcagtttcagcgcttctggttgtgggcaaagaggcaaaaccatacataccgccctaatcgtccattgaccgttcatgaggaaacacaatctgatttgcggcctctccctcctcctgagaagggcaaggaagatattcttcttttcttcaaattctacaacccagaaaaggaagaactctgtttcatggggaggctctttgtgaaggccttgggaaaaccttcagaaatcctggcaaaactaaacgaaatggctggatttccccctgatcaagaaattgagctttttgaggaaattaagtttgagccaaacgtgatgtgtgaaactatagacaagaaactcacttttcattatagtcagcttgaagatggggacattatttgtttccaaaaatcaccaggagcagaatatgatgcacccgtgcgatatccggatgttccttcatttttggagtatgtccataataggcaggttgtacatttccggtctttggagaaaccaaaggatgatgatttttctttggaattgtcaaagcttcatacctatgatgatgttgttgagagagttgctcgccaacttgaattggacgatccagcgaaaattcggcttacaccccacaattgctactctcagcaacctaaaccacagcccgtcaaatatcgaggagtggtgcatctgtcggacatgctcatccactacaatcagacgtctgacatcttgtattatgaagtgttggatataccactgccagaattgcagttcctaaaaaccctgaaagttgcatttcaccatcctacgaaggatgaggttgttattcatagcatcaggcttccaaaaaatagcaccattgctgatgtaatatatgacttgaaaactaaggttgaactgtccagtcctaatgctgaactacgtgtactagaagtcttctaccacaagatctataagatctttccactacatgagaagatagagaatataaacgaccaatattggacactacgtgctgaggagattccagaagaggaaaaaaatataggcccaaatgatcggctaattcatgtttatcacttcaagaaagatattaatcagactcagcagattcagaactttggagaccctttcgttttggtcgttcatgaaggtgagactttagcagaagtcaagaagcgcatacagagtaaactgcaagtctctgctgatgaattttccaagtggaaatttgcatttatatcaatgaatcggccagactacctccaggattcagatgttgtacctactggctttcagaggagagaggtctacggagcttgggagcaatatcttgggatagagcacgctgatactgcaccaaaaagggtctatacagtgaatcagaaccgtcacgcatacgaaaagccggtcaaaatttacaattgagatttctaactaacatggccgcacggtgaaggcctccatacgagaggagcggccagaaaagggaggacagggaatttatactgtcagggggaaaacctcatagttagcgagccattcggtgtggcacggccatgtattccagcgctagaggccagccactgttatttcatctgtagcagccagcagctcctatagcaatgattttctttttgtacaagattttccttctttgccttagggtgatggcgcgagcgcattggtgtccgtttcggttgggcaattgcttcattcttagagcaaagctgggtacataagattttggtaggaagcgtgtatacaggcaggctgtatagttgtggctctctcggcttgatccctcgtatcttgtcttgtgctattgttaatgcagtgacaggggctgactgtaaatcgtggttccaattttcaggtcccatctcatgcacgacgctttgggggagctttcagaaacttgcggtatttgttggggaaaaacctccatgttgatttagtgatgtacggttgagatgtagtatggtaaagtttctggtcaaatgagcgtcttcctgctgaggtgatgcagccaaaccggcgtctcctcaaaacagac

SEQ ID NO: 41557 - DNA, 3171 bp, Zea Mays
ccctcctccgctccggctaggaggctgctccctccgccgctccgccttcgtcgcgcggccatcgtttccggctctgtccccggatatctcttcgccaccgcttcctgcgccgcggcgccgccacaaccgaaggcgacccagtcgccttcaacactatggtgactcctcccactgtcgagcaggaggacgaggagatgctcgtgccccgccaggaggcggtcgacaccgacgcagcgcagcccatggaagtggtggcacagactgaggtggtgagcacggcggagagccagcctgtggaagatccgcagacatcacggttcacttggacaattgagaacttcaccaggttcagtgagaagaagcactatttagaggtttttgttgttggcggattcaaatggagtgtgctgattttcccccctgttttgcaactccagctgaagcgctttgagtatgattatatgagagatagcatggttaagattaatgatcgctatgagttccctctgcaacttgatctggatagagatggtggcaaatacattgctccaaatgcagatcgaagtacacgaaacctttacactcttcacaggtataaatttgatgatgaacgtgtaacaaaagaagatgctaagaaggctcttgaagaacaatatgggggtgatgaagagttaccccaaataaaccctggtttcaacaacgctccatttaaattcacgaagtattcaaacgcgtatatgcttgtttatattcgtgaaagtgccaaggagaaaattatgtgtactgttgatgaaaaagacattgctgagcatttaagggtaaggttgaaaaaagaacaagaagagaaagaacacaaaaagaaagaaaaagctgaagctcatctttataccataattaaggtagctcgagatgaggatttgaaggaacaaattggaaagggtatatattttgatttggtggaccatgaaaaggtccataatttccgtatacagaaacaaatgccttttagttgtttcaaggaggaagtagccaaggaatatggcatccctgttcagtttcagcgcttctggttgtgggcaaagaggcaaaaccatacataccgccctaatcgtccattgaccgttcatgaggaaacacaatctgtggggcaactgagagaaatatcaaataaggcacacaatgttgagttgaagctgtttttggaagtagaacttgggctggatttgcggcctctccctcctcctgagaagggcaaggaagatattcttcttttcttcaaattctacaacccagaaaaggaagaactctgtttcatggggaggctctttgtgaaggccttgggaaaaccttcagaaatcctggcaaaactaaacgaaatggctggatttccccctgatcaagaaattgagctttttgaggaaattaagtttgagccaaacgtgatgtgtgaaactatagacaagaaactcacttttcattatagtcagcttgaagatggggacattatttgtttccaaaaatcaccaggagcagaatatgatgcacccgtgcgatatccggatgttccttcatttttggagtatgtccataataggcaggttgtacatttccggtctttggagaaaccaaaggatgatgatttttctttggaattgtcaaagcttcatacctatgatgatgttgttgagagagttgctcgccaacttgaattggacgatccagcgaaaattcggcttacaccccacaattgctactctcagcaacctaaaccacagcccgtcaaatatcgaggagtggtgcatctgtcggacatgctcatccactacaatcagacgtctgacatcttgtattatgaagtgttggatataccactgccagaattgcagttcctaaaaaccctgaaagttgcatttcaccatcctacgaaggatgaggttgttattcatagcatcaggcttccaaaaaatagcaccattgctgatgtaatatatgacttgaaaactaaggttgaactgtccagtcctaatgctgaactacgtgtactagaagtcttctaccacaagatctataagatctttccactacatgagaagatagagaatataaacgaccaatattggacactacgtgctgaggagattccagaagaggaaaaaaatataggcccaaatgatcggctaattcatgtttatcacttcaagaaagatattaatcagactcagcagattcagaactttggagaccctttcgttttggtcgttcatgaaggtgagactttagcagaagtcaagaagcgcatacagagtaaactgcaagtctctgctgatgaattttccaagtggaaatttgcatttatatcaatgaatcggccagactacctccaggattcagatgttgtacctactggctttcagaggagagaggtctacggagcttgggagcaatatcttgggatagagcacgctgatactgcaccaaaaagggtctatacagtgaatcagaaccgtcacgcatacgaaaagccggtcaaaatttacaattgagatttctaactaacatggccgcacggtgaaggcctccatacgagaggagcggccagaaaagggaggacagggaatttatactgtcagggggaaaacctcatagttagcgagccattcggtgtggcacggccatgtattccagcgctagaggccagccactgttatttcatctgtagcagccagcagctcctatagcaatgattttctttttgtacaagattttccttctttgccttagggtgatggcgcgagcgcattggtgtccgtttcggttgggcaattgcttcattcttagagcaaagctgggtacataagattttggtaggaagcgtgtatacaggcaggctgtatagttgtggctctctcggcttgatccctcgtatcttgtcttgtgctattgttaatgcagtgacaggggctgactgtaaatcgtggttccaattttcaggtcccatctcatgcacgacgctttgggggagctttcagaaacttgcggtatttgttggggaaaaacctccatgttgatttagtgatgtacggttgagatgtagtatggtaaagtttctggtcaaatgagcgtcttcctgctgaggtgatgcagccaaaccggcgtctcctcaaaacagac

SEQ ID NO: 41558 - DNA, 3633 bp, Zea Mays
atccaaacatttttgtgattttgtctggaaatgcttctgattttaaagattttcttgcatcagagacccaacatcaatttaatgctcgtgagagtgattggggtttcacatcttttatgcctttgagtgagctctatgatgcaagtagaggttacctcgtgaatgatactgttgttgtggaggccgaggttgctgtccgcagaattgttgactattggacatatgactcaaaaaaggaaactggttatgtgggcctgaaaaaccaaggagctacctgttatatgaactcccttctacagacactataccatataccctacttcaggaaggctgtatatcatatgccaaccactgaaaatgacataccatcaggaagcattcccttggcgctgcagagccttttctacaagctccagtacagtgacagtagtgtagctacaaaagagctgacaaaatcttttggttgggacacatatgattctttcatgcagcatgatgtacaagagctcaacagagttctgtctgagaaacttgaggacaaaatgaagggaactgtcgtagaaggaacaattgagcaattatttgaaggtcaccacatcaattacattgagtgtataaacgttgagcataaatctaaccgcaaggaatccttttatgatcttcagcttgacgtcaaaggctgtcgtgacatttattcgtcgtttgataaatatgttgaagttgaacgtctagagggtgataacaagtatcacgcagagaatcatggtctacaggatgcaaaaaagggcgttcttttccttgatttcccccctgttttgcaactccagctgaagcgctttgagtatgattatatgagagatagcatggttaagattaatgatcgctatgagttccctctgcaacttgatctggatagagatggtggcaaatacattgctccaaatgcagatcgaagtacacgaaacctttacactcttcacagtgttcttgttcatagtggtggggtacatggtggtcactactatgcattcatacggccaactttatctgagcaatggtataaatttgatgatgaacgtgtaacaaaagaagatgctaagaaggctcttgaagaacaatatgggggtgatgaagagttaccccaaataaaccctggtttcaacaacgctccatttaaattcacgaagtattcaaacgcgtatatgcttgtttatattcgtgaaagtgccaaggagaaaattatgtgtactgttgatgaaaaagacattgctgagcatttaagggtaaggttgaaaaaagaacaagaagagaaagaacacaaaaagaaagaaaaagctgaagctcatctttataccataattaaggtagctcgagatgaggatttgaaggaacaaattggaaagggtatatattttgatttggtggaccatgaaaaggtccataatttccgtatacagaaacaaatgccttttagttgtttcaaggaggaagtagccaaggaatatggcatccctgttcagtttcagcgcttctggttgtgggcaaagaggcaaaaccatacataccgccctaatcgtccattgaccgttcatgaggaaacacaatctgtggggcaactgagagaaatatcaaataaggcacacaatgttgagttgaagctgtttttggaagtagaacttgggctggatttgcggcctctccctcctcctgagaagggcaaggaagatattcttcttttcttcaaattctacaacccagaaaaggaagaactctgtttcatggggaggctctttgtgaaggccttgggaaaaccttcagaaatcctggcaaaactaaacgaaatggctggatttccccctgatcaagaaattgagctttttgaggaaattaagtttgagccaaacgtgatgtgtgaaactatagacaagaaactcacttttcattatagtcagcttgaagatggggacattatttgtttccaaaaatcaccaggagcagaatatgatgcacccgtgcgatatccggatgttccttcatttttggagtatgtccataataggcaggttgtacatttccggtctttggagaaaccaaaggatgatgatttttctttggaattgtcaaagcttcatacctatgatgatgttgttgagagagttgctcgccaacttgaattggacgatccagcgaaaattcggcttacaccccacaattgctactctcagcaacctaaaccacagcccgtcaaatatcgaggagtggtgcatctgtcggacatgctcatccactacaatcagacgtctgacatcttgtattatgaagtgttggatataccactgccagaattgcagttcctaaaaaccctgaaagttgcatttcaccatcctacgaaggatgaggttgttattcatagcatcaggcttccaaaaaatagcaccattgctgatgtaatatatgacttgaaaactaaggttgaactgtccagtcctaatgctgaactacgtgtactagaagtcttctaccacaagatctataagatctttccactacatgagaagatagagaatataaacgaccaatattggacactacgtgctgaggagattccagaagaggaaaaaaatataggcccaaatgatcggctaattcatgtttatcacttcaagaaagatattaatcagactcagattcagaactttggagaccctttcgttttggtcgttcatgaaggtgagactttagcagaagtcaagaagcgcatacagagtaaactgcaagtctctgctgatgaattttccaagtggaaatttgcatttatatcaatgaatcggccagactacctccaggattcagatgttgtacctactggctttcagaggagagaggtctacggagcttgggagcaatatcttgggatagagcacgctgatactgcaccaaaaagggtctatacagtgaatcagaaccgtcacgcatacgaaaagccggtcaaaatttacaattgagatttctaactaacatggccgcacggtgaaggcctccatacgagaggagcggccagaaaagggaggacagggaatttatactgtcagggggaaaacctcatagttagcgagccattcggtgtggcacggccatgtattccagcgctagaggccagccactgttatttcatctgtagcagccagcagctcctatagcaatgattttctttttgtacaagattttccttctttgccttagggtgatggcgcgagcgcattggtgtccgtttcggttgggcaattgcttcattcttagagcaaagctgggtacataagattttggtaggaagcgtgtatacaggcaggctgtatagttgtggctctctcggcttgatccctcgtatcttgtcttgtgctattgttaatgcagtgacaggggctgactgtaaatcgtggttccaattttcaggtcccatctcatgcacgacgctttgggggagctttcagaaacttgcggtatttgttggggaaaaacctccatgttgatttagtgatgtacggttgagatgtagtatggtaaagtttctggtcaaatgagcgtcttcctgctgaggtgatgcagccaaaccggcgtctcctcaaaacagac

SEQ ID NO: 41559 - DNA, 3083 bp, Zea Mays
aactgtcgtagaaggaacaattgagcaattatttgaaggtcaccacatcaattacattgagtgtataaacgttgagcataaatctaaccgcaaggaatccttttatgatcttcagcttgacgtcaaaggctgtcgtgacatttattcgtcgtttgataaatatgttgaagttgaacgtctagagggtgataacaagtatcacgcagagaatcatggtctacaggatgcaaaaaagggcgttcttttccttgatttcccccctgttttgcaactccagctgaagcgctttgagtatgattatatgagagatagcatggttaagattaatgatcgctatgagttccctctgcaacttgatctggatagagatggtggcaaatacattgctccaaatgcagatcgaagtacacgaaacctttacactcttcacagtgttcttgttcatagtggtggggtacatggtggtcactactatgcattcatacggccaactttatctgagcaatggtataaatttgatgatgaacgtgtaacaaaagaagatgctaagaaggctcttgaagaacaatatgggggtgatgaagagttaccccaaataaaccctggtttcaacaacgctccatttaaattcacgaagtattcaaacgcgtatatgcttgtttatattcgtgaaagtgccaaggagaaaattatgtgtactgttgatgaaaaagacattgctgagcatttaagggtaaggttgaaaaaagaacaagaagagaaagaacacaaaaagaaagaaaaagctgaagctcatctttataccataattaaggtagctcgagatgaggatttgaaggaacaaattggaaagggtatatattttgatttggtggaccatgaaaaggtccataatttccgtatacagaaacaaatgccttttagttgtttcaaggaggaagtagccaaggaatatggcatccctgttcagtttcagcgcttctggttgtgggcaaagaggcaaaaccatacataccgccctaatcgtccattgaccgttcatgaggaaacacaatctgtggggcaactgagagaaatatcaaataaggcacacaatgttgagttgaagctgtttttggaagtagaacttgggctggatttgcggcctctccctcctcctgagaagggcaaggaagatattcttcttttcttcaaattctacaacccagaaaaggaagaactctgtttcatggggaggctctttgtgaaggccttgggaaaaccttcagaaatcctggcaaaactaaacgaaatggctggatttccccctgatcaagaaattgagctttttgaggaaattaagtttgagccaaacgtgatgtgtgaaactatagacaagaaactcacttttcattatagtcagcttgaagatggggacattatttgtttccaaaaatcaccaggagcagaatatgatgcacccgtgcgatatccggatgttccttcatttttggagtatgtccataataggcaggttgtacatttccggtctttggagaaaccaaaggatgatgatttttctttggaattgtcaaagcttcatacctatgatgatgttgttgagagagttgctcgccaacttgaattggacgatccagcgaaaattcggcttacaccccacaattgctactctcagcaacctaaaccacagcccgtcaaatatcgaggagtggtgcatctgtcggacatgctcatccactacaatcagacgtctgacatcttgtattatgaagtgttggatataccactgccagaattgcagttcctaaaaaccctgaaagttgcatttcaccatcctacgaaggatgaggttgttattcatagcatcaggcttccaaaaaatagcaccattgctgatgtaatatatgacttgaaaactaaggttgaactgtccagtcctaatgctgaactacgtgtactagaagtcttctaccacaagatctataagatctttccactacatgagaagatagagaatataaacgaccaatattggacactacgtgctgaggagattccagaagaggaaaaaaatataggcccaaatgatcggctaattcatgtttatcacttcaagaaagatattaatcagactcagattcagaactttggagaccctttcgttttggtcgttcatgaaggtgagactttagcagaagtcaagaagcgcatacagagtaaactgcaagtctctgctgatgaattttccaagtggaaatttgcatttatatcaatgaatcggccagactacctccaggattcagatgttgtacctactggctttcagaggagagaggtctacggagcttgggagcaatatcttgggatagagcacgctgatactgcaccaaaaagggtctatacagtgaatcagaaccgtcacgcatacgaaaagccggtcaaaatttacaattgagatttctaactaacatggccgcacggtgaaggcctccatacgagaggagcggccagaaaagggaggacagggaatttatactgtcagggggaaaacctcatagttagcgagccattcggtgtggcacggccatgtattccagcgctagaggccagccactgttatttcatctgtagcagccagcagctcctatagcaatgattttctttttgtacaagattttccttctttgccttagggtgatggcgcgagcgcattggtgtccgtttcggttgggcaattgcttcattcttagagcaaagctgggtacataagattttggtaggaagcgtgtatacaggcaggctgtatagttgtggctctctcggcttgatccctcgtatcttgtcttgtgctattgttaatgcagtgacaggggctgactgtaaatcgtggttccaattttcaggtcccatctcatgcacgacgctttgggggagctttcagaaacttgcggtatttgttggggaaaaacctccatgttgatttagtgatgtacggttgagatgtagtatggtaaagtttctggtcaaatgagcgtcttcctgctgaggtgatgcagccaaaccggcgtctcctcaaaacagac

SEQ ID NO: 41560 - DNA, 3085 bp, Zea Mays
actgtcgtagaaggaacaattgagcaattatttgaaggtcaccacatcaattacattgagtgtataaacgttgagcataaatctaaccgcaaggaatccttttatgatcttcagcttgacgtcaaaggctgtcgtgacatttattcgtcgtttgataaatatgttgaagttgaacgtctagagggtgataacaagtatcacgcagagaatcatggtctacaggatgcaaaaaagggcgttcttttccttgatttcccccctgttttgcaactccagctgaagcgctttgagtatgattatatgagagatagcatggttaagattaatgatcgctatgagttccctctgcaacttgatctggatagagatggtggcaaatacattgctccaaatgcagatcgaagtacacgaaacctttacactcttcacagtgttcttgttcatagtggtggggtacatggtggtcactactatgcattcatacggccaactttatctgagcaatggtataaatttgatgatgaacgtgtaacaaaagaagatgctaagaaggctcttgaagaacaatatgggggtgatgaagagttaccccaaataaaccctggtttcaacaacgctccatttaaattcacgaagtattcaaacgcgtatatgcttgtttatattcgtgaaagtgccaaggagaaaattatgtgtactgttgatgaaaaagacattgctgagcatttaagggtaaggttgaaaaaagaacaagaagagaaagaacacaaaaagaaagaaaaagctgaagctcatctttataccataattaaggtagctcgagatgaggatttgaaggaacaaattggaaagggtatatattttgatttggtggaccatgaaaaggtccataatttccgtatacagaaacaaatgccttttagttgtttcaaggaggaagtagccaaggaatatggcatccctgttcagtttcagcgcttctggttgtgggcaaagaggcaaaaccatacataccgccctaatcgtccattgaccgttcatgaggaaacacaatctgtggggcaactgagagaaatatcaaataaggcacacaatgttgagttgaagctgtttttggaagtagaacttgggctggatttgcggcctctccctcctcctgagaagggcaaggaagatattcttcttttcttcaaattctacaacccagaaaaggaagaactctgtttcatggggaggctctttgtgaaggccttgggaaaaccttcagaaatcctggcaaaactaaacgaaatggctggatttccccctgatcaagaaattgagctttttgaggaaattaagtttgagccaaacgtgatgtgtgaaactatagacaagaaactcacttttcattatagtcagcttgaagatggggacattatttgtttccaaaaatcaccaggagcagaatatgatgcacccgtgcgatatccggatgttccttcatttttggagtatgtccataataggcaggttgtacatttccggtctttggagaaaccaaaggatgatgatttttctttggaattgtcaaagcttcatacctatgatgatgttgttgagagagttgctcgccaacttgaattggacgatccagcgaaaattcggcttacaccccacaattgctactctcagcaacctaaaccacagcccgtcaaatatcgaggagtggtgcatctgtcggacatgctcatccactacaatcagacgtctgacatcttgtattatgaagtgttggatataccactgccagaattgcagttcctaaaaaccctgaaagttgcatttcaccatcctacgaaggatgaggttgttattcatagcatcaggcttccaaaaaatagcaccattgctgatgtaatatatgacttgaaaactaaggttgaactgtccagtcctaatgctgaactacgtgtactagaagtcttctaccacaagatctataagatctttccactacatgagaagatagagaatataaacgaccaatattggacactacgtgctgaggagattccagaagaggaaaaaaatataggcccaaatgatcggctaattcatgtttatcacttcaagaaagatattaatcagactcagcagattcagaactttggagaccctttcgttttggtcgttcatgaaggtgagactttagcagaagtcaagaagcgcatacagagtaaactgcaagtctctgctgatgaattttccaagtggaaatttgcatttatatcaatgaatcggccagactacctccaggattcagatgttgtacctactggctttcagaggagagaggtctacggagcttgggagcaatatcttgggatagagcacgctgatactgcaccaaaaagggtctatacagtgaatcagaaccgtcacgcatacgaaaagccggtcaaaatttacaattgagatttctaactaacatggccgcacggtgaaggcctccatacgagaggagcggccagaaaagggaggacagggaatttatactgtcagggggaaaacctcatagttagcgagccattcggtgtggcacggccatgtattccagcgctagaggccagccactgttatttcatctgtagcagccagcagctcctatagcaatgattttctttttgtacaagattttccttctttgccttagggtgatggcgcgagcgcattggtgtccgtttcggttgggcaattgcttcattcttagagcaaagctgggtacataagattttggtaggaagcgtgtatacaggcaggctgtatagttgtggctctctcggcttgatccctcgtatcttgtcttgtgctattgttaatgcagtgacaggggctgactgtaaatcgtggttccaattttcaggtcccatctcatgcacgacgctttgggggagctttcagaaacttgcggtatttgttggggaaaaacctccatgttgatttagtgatgtacggttgagatgtagtatggtaaagtttctggtcaaatgagcgtcttcctgctgaggtgatgcagccaaaccggcgtctcctcaaaacagac

SEQ ID NO: 41561 - DNA, 2100 bp, Zea Mays
ttctggttgtgggcaaagaggcaaaaccatacataccgccctaatcgtccattgaccgttcatgaggaaacacaatctgtggggcaactgagagaaatatcaaataaggcacacaatgttgagttgaagctgtttttggaagtagaacttgggatttgcggcctctccctcctcctgagaagggcaaggaagatattcttcttttcttcaaattctacaacccagaaaaggaagaactctgtttcatggggaggctctttgtgaaggccttgggaaaaccttcagaaatcctggcaaaactaaacgaaatggctggatttccccctgatcaagaaattgagctttttgaggaaattaagtttgagccaaacgtgatgtgtgaaactatagacaagaaactcacttttcattatagtcagcttgaagatggggacattatttgtttccaaaaatcaccaggagcagaatatgatgcacccgtgcgatatccggatgttccttcatttttggagtatgtccataataggcaggttgtacatttccggtctttggagaaaccaaaggatgatgatttttctttggaattgtcaaagcttcatacctatgatgatgttgttgagagagttgctcgccaacttgaattggacgatccagcgaaaattcggcttacaccccacaattgctactctcagcaacctaaaccacagcccgtcaaatatcgaggagtggtgcatctgtcggacatgctcatccactacaatcagacgtctgacatcttgtattatgaagtgttggatataccactgccagaattgcagttcctaaaaaccctgaaagttgcatttcaccatcctacgaaggatgaggttgttattcatagcatcaggcttccaaaaaatagcaccattgctgatgtaatatatgacttgaaaactaaggttgaactgtccagtcctaatgctgaactacgtgtactagaagtcttctaccacaagatctataagatctttccactacatgagaagatagagaatataaacgaccaatattggacactacgtgctgaggagattccagaagaggaaaaaaatataggcccaaatgatcggctaattcatgtttatcacttcaagaaagatattaatcagactcagattcagaactttggagaccctttcgttttggtcgttcatgaaggtgagactttagcagaagtcaagaagcgcatacagagtaaactgcaagtctctgctgatgaattttccaagtggaaatttgcatttatatcaatgaatcggccagactacctccaggattcagatgttgtacctactggctttcagaggagagaggtctacggagcttgggagcaatatcttgggatagagcacgctgatactgcaccaaaaagggtctatacagtgaatcagaaccgtcacgcatacgaaaagccggtcaaaatttacaattgagatttctaactaacatggccgcacggtgaaggcctccatacgagaggagcggccagaaaagggaggacagggaatttatactgtcagggggaaaacctcatagttagcgagccattcggtgtggcacggccatgtattccagcgctagaggccagccactgttatttcatctgtagcagccagcagctcctatagcaatgattttctttttgtacaagattttccttctttgccttagggtgatggcgcgagcgcattggtgtccgtttcggttgggcaattgcttcattcttagagcaaagctgggtacataagattttggtaggaagcgtgtatacaggcaggctgtatagttgtggctctctcggcttgatccctcgtatcttgtcttgtgctattgttaatgcagtgacaggggctgactgtaaatcgtggttccaattttcaggtcccatctcatgcacgacgctttgggggagctttcagaaacttgcggtatttgttggggaaaaacctccatgttgatttagtgatgtacggttgagatgtagtatggtaaagtttctggtcaaatgagcgtcttcctgctgaggtgatgcagccaaaccggcgtctcctcaaaacagac

SEQ ID NO: 41562 - DNA, 1363 bp, Zea Mays
cactggccgccagctccagtccgacttccctctctctattttgttcttttttttcgtcgcttggcaaacagcttcgtctggcttccttgcctcggctaacggctaaaaaaaccagcgagcacgatttctcctctctctctctgctggccgactaaggagggcgtcgtgggcctcaccgccggcgagtgcgtccctgcgggtgggcacactgccgtcggttgtccagcacagctacaagttgaggagctctgcagtaaaggaagtgtgtagtcaccatggtccatttcaagaataggtatatggtggtggagatctttatagatgcaggtagaggtgaacaggaccctataatcctcacccaatttaatataacaaaagttataaaagacagcattcagctcaactttggtgagtgtggcctagctggatctcttggatcattgcaagttaagtatgtcaatcctgtaacgaagctctgcattgtccgcgtgtctcgcgaagaccaccagaaagtttgggctgctatgacgatggtgcggtgcattgggaagatccccgtttcgttcaacttgctcgacatgagtggaagcatcagggcttgcaagaaagctgcattggagtgcgatgaagcgaaatttgagcaatacaagctggttgcaggtgattgtatcacggcagagatcacccagtctgtagagaagtgctttgagaagatcagaggactagagagctaagcagaagaattgacatcatgtccacccacactcggatcctaaaacctgctgaccctgcaccacatccgtgatcacgtcacaccacaagttgtgtgtccagcgcccaccacagcaacggcctcttgctgccagcagcctccgtgcctccagcagctctcctctccaaggaaaagtctgaagtccgcaaccaaacaagtgttctgcagctgctctttgccgttggttgaagtctgcaaccaaacaagtgttatgcagctgctctttgccgttggttggagttcttggctccacactttcagaaagaattcatgtatacataaaatttattatatagagagtttgcttcgtatattagtaattttttaccaaacatgtgccacggtgtatatatagcaaactataccgggtggcaaacaaaccaacccacacgtatccacaaacttaataatggccacaacacgcctgacgacccaggagaccatgacggttttgaaaccacggacgaactcgataagtttcagtactttcctcacaggaccccgatacctgtagtagagatgttacctgatatgacgggttttacctgatatgaagtgatatgacgggttttacctgatatgaaggtaggt

SEQ ID NO: 41563 - DNA, 2851 bp, Zea Mays
gttaagccgccgttttcttcctcctcccctcctcttgcctccgtacaccaactccatcttcaaggcatccacctatgcccatccatgcttctccttccttgggttgatggtcagtggtggtcgcaacagtgtggtaaccattggagttgatggatctggtggttcgatggttcgatttgtgtgtttgatggatcaaattgtagttgctttaaatcaattcatgggtgttaccgcaacattgaatgcttggatgcgagattgtgggctccctgtggctggcatctatggcaacaccacattatcggtagggggaaaatgcccccaaaggcaagtaacaatgttgtacaccatgacgacttgcaagtatgatccaaaagtgtgttgatcaaaagtagaacaacaagatttatgctgagtgcaccatagaggttcataaacccatattacattgaattgatttgtgaaccatttttgtaaatgagaaagagtaatactttgcatatatttgtatatccaaataggttagaattattaattgcgtgtatgatatgttttagcaataggatgaattggaaaataggtttgagttggtctatattgaataacatcccaagtgctagagacaacctatacaaaagaggacaataagatctggtcatataatggatgaagtacgtgactatctacgtgaaggtaacatcgatgtttaaggaccctatctgtattgcatgtgttcatttgagaagaatctgttcagtttactcatttctgccaagttgctaatgaattttagtctagatgggtaattgataaatttccatgttattcaaaaagtttaagttcgttatgttttgtccttacaatgtttcacaaatataaaatagctatattgtgttgctcaacaaggggcacggttgttttaggaaggctatggccaaatcacgtggctctacaactttctggagaaactttaatgacttacgaagttgttagaatcaatctgatctcatggtgttgactctataatattcacaaatttgagttcaagaaggtacagtgggtgatcaaaggaagacaatagaagtttttgagaagggttttttcatattatttaagggtctgttagaactggatctcacattatctgcttctagtatctaaatccctgaggtatgtgtttctacctttctctagttgatttcccttgactataaagcacttcactagaaatggagtatacaaacaaaagaattaatgcattaatttatctttaatctatgcaatctttagcaaatcttttgccatgcttatgtatcaagcaaaataaagttagtttgtttagctagaatctgtacaatattcttggttctctattttttccccattactctgacttatttttgccattatttttctatcaaaaactgtagaaagttagtaagtcgtagtaagtttatatttttgatgtagtgtggttttttccctgacgttttgttatcgaaaaaatcagcctaacttcatattagtgatattctaatctggtctaaagtcttgaatgcattagccttctggacttagtccctgtttagacggattaaaataagttattggctgctaaaaaagctctaactgattcaaacagtacaatttataatccagcttatagcttatagctcatttcaaactattcaaccactaggcttataaatatacttattatatggctgcctgcagctatttccacttgtaaaaaaaagattagctggtttaagctgggcattaaagcattttcccctatatttaatcgctagagatttgtatgactaatataaagattttgctgtgctcatatcatgcacagcaacacctcatataactcctgcatgcacttattcaatgactaagaatatttttttataatcgctagagatttttataacagcaaatagattcattgttagtggacatagaccatgcattgcactgaaacatgtgatcgaaacggtccgaaaatttctagctgttgcctttgtagtttgaatgaatgacgccggtgtttggtgtgaatgagtccaatatatatgttggaactcattcgtgcatggaattcaaaatatatgtacataagtccatgttcgtgtggggaaatcgcagggccaagctgccgaactctcaaatgtaaggggaaaaaagaaattttaattccacgtataagtgttagtttggaaacaccattttctcgagtgatttacattttcctaagaaaaaaattagttcatttttctttcatcccgtttggatcattagaattgaatttcattctaataataataatttaagcatatatcaattaagctaattcagttttatgcaataatatatgtatactattactagtaagatgtcagagatatttatgtgctacatttttaatatagaggaatgagtcgaagagcgtcgttacagagtagaaacaaattctactaatacatacaatcatttcctatactgcacccctatgaatttaagatagacttatatacaaactttggaaaacgatggaatttcaaattttaagctaaataggttactttattaaccaaatgaaaggcgccctgtttgggaaaataagaattcaaaatgaagttcataaactagccctaatagaatcgaaatacacattccatgtccttttggacggacgccagcaattaatctacgccaagatagaatcgaaatacacattccatgcaaaaaaacaccttcccgctttgttcccagttggcaattctggttttctactggtggacatgcacgcacttcatcaattcctgcttggatttcatcgttt

SEQ ID NO: 41564 - DNA, 919 bp, Zea Mays
ctaataaaccctgcacctccatcgcaccctctccgccgccaagaccatcctcgcatccggctcaccaacgagaaggtgccctacttcaacgcgcccatctatctgcagaacaagacccagatcggcaaggttgaagagatcttcggccccatcaacgaatcctatttctctgtgaagatgatggaggggatcattgcaacatcgtacaatgaaggcgacaagttctatatcgacccaatgaaattgctgccgctctcacgcttcctgccacaaccaaagggaaatctcaaggagcacctagaggtggtgggcgtgggggaggaaggggttttgggcgaggccgtggtggtggttctttccgcggtggaagaggaccaccaagggggggtggtcgaggtccaaggggtggaagccgtggcggttttatagggcgaggaaggttctaggtgcagtttgagtttgatgatgttttccccttgaagcatcatagctgcacaattggaaacttccatgttattgtaaccagatatgtttaaggtagcagagcactttatctgtggaacttggattctcaactgaaacaaacggtttgtacctgttccgttcccaatggccattatgtgcttccttgttctgaattcaacttgtactgatcatgggcatgcagttacagtccttggtttatgagggcgcgggggagtacattttgccatccttgtgttggttctgtgttggctgtctcgattttaaattcactaatgatttctgaaatgaagtctcggagcaagggttgaatcatggttgccttttcgaaatacaaaggtgaatcattcattagagccttttcggaatacttaggttgaatcatgggagcctttttagaatacataggcctttttttggaatagatgaactagag

SEQ ID NO: 41565 - DNA, 1544 bp, Zea Mays
ctaataaaccctgcacctccatcgcaccctctccgccgccaagaccatcctcgcatccgggttgccagctctccttgagcccagaagcacaccgcgcgccatgcgaccaccgagagggcgaggcggtggtggccggttcggcggaggaggaggccggggccgcggcgggggccgattcagcggtggtggccgaggtggcggcgggggccgcttcggcggcgggttccgcgacgagggcccgcccgcggaggtcgtcgaggtttcgacgttcctgcacgcgtgcgagggggaggcggtgacgaagctcaccaacgagaaggtgccctacttcaacgcgcccatctatctgcagaacaagacccagatcggcaaggttgaagagatcttcggccccatcaacgaatccgtgagcacctcctcgcctccctaatctaaaaaaaactactcttttttacgtcctcgtgggtactcgaggttgtggtgcatttctaatgtggtaagagcaataatattggcgtagcttgttgaaggtgttttgcttagagacggtgaggatttggtgcgcgattttgcatatttgtagtcttgtagtgaggtccttgttgtaatagcagtgcaccaagattttgggatatgttgccacatttgtactgtaaaacgacgacacggagcatgatattctgatgtgtcatttagtaaggcaactcttgttgagggaactttggaatttctgctttagctatgctactaatgttatcgtgaatatgatctttttttgtatgtgtagtatttctctgtgaagatgatggaggggatcattgcaacatcgtacaatgaaggcgacaagttctatatcgacccaatgaaattgctgccgctctcacgcttcctgccacaaccaaagggaaatctcaaggagcacctagaggtggtgggcgtgggggaggaaggggttttgggcgaggccgtggtggtggttctttccgcggtggaagaggaccaccaagggggggtggtcgaggtccaaggggtggaagccgtggcggttttatagggcgaggaaggttctaggtgcagtttgagtttgatgatgttttccccttgaagcatcatagctgcacaattggaaacttccatgttattgtaaccagatatgtttaaggtagcagagcactttatctgtggaacttggattctcaactgaaacaaacggtttgtacctgttccgttcccaatggccattatgtgcttccttgttctgaattcaacttgtactgatcatgggcatgcagttacagtccttggtttatgagggcgcgggggagtacattttgccatccttgtgttggttctgtgttggctgtctcgattttaaattcactaatgatttctgaaatgaagtctcggagcaagggttgaatcatggttgccttttcgaaatacaaaggtgaatcattcattagagccttttcggaatacttaggttgaatcatgggagcctttttagaatacataggcctttttttggaatagatgaactagag

SEQ ID NO: 41566 - DNA, 3597 bp, Zea Mays
cttttctttccattcattaggagtgagagtaatctagccttagcctagccctagtatttgtctccctcgacctatttcttcattgttgttcgactctgcgtcaactagagacgtcttgggcagcctgccgaccctcagacaatccctaaaactctcctccccgacatggtccctcccaggcgcggaccgttcggaagcacacaaggaaggagtcgctcctgcgttgaggccgtggaccgttcgacacagagccgcggaccgtcctcgctcccgtagatagcatcgccagacggttcatctccagtgattgacattcaaatcgacgccaacaccatcgtagaagatctgcaccacactgacaggagtctcgagatgttatagagattgctagttgagcaaatcgataaaagtatcaaagtttggaaccccgtctgctcctctacctggctccacgcctccacggctccacctgccccgttccgtgctaaaaaaaggcgtggcaaaagttgaatttaggggcgtccaattatttccatacggacagagacttgtgatgggactgatgagtgacacgaaaaaatggtgagagtatatatatgatatcatagcaacaatcacagaaactcgtgccatctgatccagccaatatacaagacatttctctaaccagctaacctaccggataacaataaaaactaaaagcctggaacacggatattattgagcaaaataatgcccactagctcataaggctagctcaaatatatatatacatcaaatatttgaatggtaacaacgtgtattgaatataattaattgtaaaactaataatacagatagagactaaaaaacgagacaaatttattaaacctaattaaacctatatacaatacacataattgatatttaaacgtttgatgactaataaactacacttcctcgctccacccgtcccctcccgtgcagaaaaagggtggcaaaacgttgaaatagggtcctgcagttatttcaattgtacgtgattcatgtatggaaattacgaatgcggctagagctcaggcatatttcgatcgtgattcatatatgaccggtagtaaaatatataatgttctactacactggctcatatatagataataataaattttgttaaggtaacctcgccgacgctcgacgatcgacccctatataatagtcttccatatggcatgcgcatcctaaataaagcacacaacttgtgcaagtgcaagctagctaggtagtaaaagctagcctcgccaacaacactgactgtgggcagctagctgatcatgtggaggctgaagatcggcggcgagggcggcgggccatggctgcggtcggcgagcggcttcaccggcaggcaggtatgggagttcgaccccgacgccggtacgcaggacgagatcgccgaggttgagaggctgaggcgggagttcacggagcgccgccgcttcgacaagagggccgtggcgcaggatctcctcttgcgcatgcaggtatttgcactacatgtcactggatcactcaatacggttttatcagcagagcatcgacacgagatctgtcgctatatttacaaccatcagaatgaagatggtggctggggcatgcaagaggttgggccaagcaccatgtttagctcatgcctgaactatgtcaccttgagacttctcggggaggcgtgtgcgcagcatgacgctttggccaagggacaagcatggattctgtctcatggaagtgcggcggcaatacctcagtggggaaagatttggctctcggtgatcggtttatatgactggaacggcaataattcgatcgttcctgagttgtggcttgttccatattctctcccattccatccagggcgattctggtgtttctgtcggttgatatatatgccaatggcttatttatatggcaagaagtttgtggggccaattacaccaaccatattatcaataagaaatgaaatctataagataccatatgatgaggtcgattggaacaaagctcgagatacttgcgctaaggaagaccttctctacccaaggacgttcgtgcaaaacgtcatttggacttgtgtgaataaaatcgtggaaccattgctaaatctttggccggctaagatgttaagagatacagcactgaagaacatcatgaatcatatccattatgaagacgaaagtactaggtacctttgtgtatgcccagtaaacaaggcactaaatatgatttgttgttgggttgagaatccaaattcagatgcattcaagcggcaccttccaaggatctatgattatatatggcttgctgaagatggcatgaagttaaaggtgtatgacggcacgcaagcatgggatacagcttttattgtcaaagcatattgctcgactgacctggttcatgagttttctccaacactcaggaaggctcatgagttcataaaaagtttgcagatccctgaaaaccaacccgaccatgaaaattattaccgccatagatcaaagggttcatgggctcattcaacattagacaatggatggtctgtatctgattctacagcagaagcaattcaggcattgttgttgttatcaaagttctcttccaatcttgtgggggatcccataaaagaagaaagattatttgatgcagtggattgcttgctttcttttatggttctcaacccttccgagacttttctaaacattgttgttgatcacccgtcggtcgaatgcacgtcatctgcgattcaagctcttgttatgttcagagaaatgtatccaaggtatcgcgatcaagagataaaaaaatgtattaaaggagcatctaaatttattgagagcaaacaacaaaaggatggcacatggtttggcacttggggtgtatgttacacttatgggacattatttgcagtgcaaggattagttgttgctggaagaacttatgaaaacagttcttctattaggaaagcatgtaggtttctattgtcaaagcagctaatcacgggtggatggggtgagacatatccgtctaatggaactgcgatttaccaggtctatgcagaggccagtagtcctcatgtagtgaatacagcttgggcaatgttggctttaatttatgctggacaggttcagcgagatccaacaccattgtatggtgctgcaaaagaactgatcaatatgcaacaagagtcaggcgagtttccccaacaagaacacattgggagcttcaattgttccttttacttcaactatggaaactaccgtaacttgttcccaatatgggctcttggagagtttcggagacgaattgttgcagaaaagaagaggaaccaacaaacatgattgttttaggcatcaacaaattcggggtgaaagcttgtaaggggctcaagtttaacatgtggtgaaagacatgtcaatatactaaagctgatgtccatctggctaaaccatatgtacatatttttactatggaaacaacgatccatatgtatatatggaataaagggccacatatatgaccgtttcgccatctatattatatttttgaagtgaaaaatacaagactttgaag

SEQ ID NO: 41567 - DNA, 3087 bp, Zea Mays
aaaagttgaatttaggggcgtccaattatttccatacggacagagacttgtgatgggactgatgagtgacacgaaaaaatggtgagagtatatatatgatatcatagcaacaatcacagaaactcgtgccatctgatccagccaatatacaagacatttctctaaccagctaacctaccggataacaataaaaactaaaagcctggaacacggatattattgagcaaaataatgcccactagctcataaggctagctcaaatatatatatacatcaaatatttgaatggtaacaacgtgtattgaatataattaattgtaaaactaataatacagatagagactaaaaaacgagacaaatttattaaacctaattaaacctatatacaatacacataattgatatttaaacgtttgatgactaataaactacacttcctcgctccacccgtcccctcccgtgcagaaaaagggtggcaaaacgttgaaatagggtcctgcagttatttcaattgtacgtgattcatgtatggaaattacgaatgcggctagagctcaggcatatttcgatcgtgattcatatatgaccggtagtaaaatatataatgttctactacactggctcatatatagataataataaattttgttaaggtaacctcgccgacgctcgacgatcgacccctatataatagtcttccatatggcatgcgcatcctaaataaagcacacaacttgtgcaagtgcaagctagctaggtagtaaaagctagcctcgccaacaacactgactgtgggcagctagctgatcatgtggaggctgaagatcggcggcgagggcggcgggccatggctgcggtcggcgagcggcttcaccggcaggcaggtatgggagttcgaccccgacgccggtacgcaggacgagatcgccgaggttgagaggctgaggcgggagttcacggagcgccgccgcttcgacaagagggccgtggcgcaggatctcctcttgcgcatgcaggtatttgcactacatgtcactggatcactcaatacggttttatcagcagagcatcgacacgagatctgtcgctatatttacaaccatcagaatgaagatggtggctggggcatgcaagaggttgggccaagcaccatgtttagctcatgcctgaactatgtcaccttgagacttctcggggaggcgtgtgcgcagcatgacgctttggccaagggacaagcatggattctgtctcatggaagtgcggcggcaatacctcagtggggaaagatttggctctcggtgatcggtttatatgactggaacggcaataattcgatcgttcctgagttgtggcttgttccatattctctcccattccatccagggcgattctggtgtttctgtcggttgatatatatgccaatggcttatttatatggcaagaagtttgtggggccaattacaccaaccatattatcaataagaaatgaaatctataagataccatatgatgaggtcgattggaacaaagctcgagatacttgcgctaaggaagaccttctctacccaaggacgttcgtgcaaaacgtcatttggacttgtgtgaataaaatcgtggaaccattgctaaatctttggccggctaagatgttaagagatacagcactgaagaacatcatgaatcatatccattatgaagacgaaagtactaggtacctttgtgtatgcccagtaaacaaggcactaaatatgatttgttgttgggttgagaatccaaattcagatgcattcaagcggcaccttccaaggatctatgattatatatggcttgctgaagatggcatgaagttaaaggtgtatgacggcacgcaagcatgggatacagcttttattgtcaaagcatattgctcgactgacctggttcatgagttttctccaacactcaggaaggctcatgagttcataaaaagtttgcagatccctgaaaaccaacccgaccatgaaaattattaccgccatagatcaaagggttcatgggctcattcaacattagacaatggatggtctgtatctgattctacagcagaagcaattcaggcattgttgttgttatcaaagttctcttccaatcttgtgggggatcccataaaagaagaaagattatttgatgcagtggattgcttgctttcttttatggttctcaacccttccgagacttttctaaacattgttgttgatcacccgtcggtcgaatgcacgtcatctgcgattcaagctcttgttatgttcagagaaatgtatccaaggtatcgcgatcaagagataaaaaaatgtattaaaggagcatctaaatttattgagagcaaacaacaaaaggatggcacatggtttggcacttggggtgtatgttacacttatgggacattatttgcagtgcaaggattagttgttgctggaagaacttatgaaaacagttcttctattaggaaagcatgtaggtttctattgtcaaagcagctaatcacgggtggatggggtgagacatatccgtctaatggaactgcggtctatgcagaggccagtagtcctcatgtagtgaatacagcttgggcaatgttggctttaatttatgctggacaggttcagcgagatccaacaccattgtatggtgctgcaaaagaactgatcaatatgcaacaagagtcaggcgagtttccccaacaagaacacattgggagcttcaattgttccttttacttcaactatggaaactaccgtaacttgttcccaatatgggctcttggagagtttcggagacgaattgttgcagaaaagaagaggaaccaacaaacatgattgttttaggcatcaacaaattcggggtgaaagcttgtaaggggctcaagtttaacatgtggtgaaagacatgtcaatatactaaagctgatgtccatctggctaaaccatatgtacatatttttactatggaaacaacgatccatatgtatatatggaataaagggccacatatatgaccgtttcgccatctatattatatttttgaagtgaaaaatacaagactttgaag

SEQ ID NO: 41568 - DNA, 2600 bp, Zea Mays
ctcaggcatatttcgatcgtgattcatatatgaccggtagtaaaatatataatgttctactacactggctcatatatagataataataaattttgttaaggtaacctcgccgacgctcgacgatcgacccctatataatagtcttccatatggcatgcgcatcctaaataaagcacacaacttgtgcaagtgcaagctagctaggtagtaaaagctagcctcgccaacaacactgactgtgggcagctagctgatcatgtggaggctgaagatcggcggcgagggcggcgggccatggctgcggtcggcgagcggcttcaccggcaggcaggtatgggagttcgaccccgacgccggtacgcaggacgagatcgccgaggttgagaggctgaggcgggagttcacggagcgccgccgcttcgacaagagggccgtggcgcaggatctcctcttgcgcatgcaggtatttgcactacatgtcactggatcactcaatacggttttatcagcagagcatcgacacgagatctgtcgctatatttacaaccatcagaatgaagatggtggctggggcatgcaagaggttgggccaagcaccatgtttagctcatgcctgaactatgtcaccttgagacttctcggggaggcgtgtgcgcagcatgacgctttggccaagggacaagcatggattctgtctcatggaagtgcggcggcaatacctcagtggggaaagatttggctctcggtgatcggtttatatgactggaacggcaataattcgatcgttcctgagttgtggcttgttccatattctctcccattccatccagggcgattctggtgtttctgtcggttgatatatatgccaatggcttatttatatggcaagaagtttgtggggccaattacaccaaccatattatcaataagaaatgaaatctataagataccatatgatgaggtcgattggaacaaagctcgagatacttgcgctaaggaagaccttctctacccaaggacgttcgtgcaaaacgtcatttggacttgtgtgaataaaatcgtggaaccattgctaaatctttggccggctaagatgttaagagatacagcactgaagaacatcatgaatcatatccattatgaagacgaaagtactaggtacctttgtgtatgcccagtaaacaaggcactaaatatgatttgttgttgggttgagaatccaaattcagatgcattcaagcggcaccttccaaggatctatgattatatatggcttgctgaagatggcatgaagttaaaggtgtatgacggcacgcaagcatgggatacagcttttattgtcaaagcatattgctcgactgacctggttcatgagttttctccaacactcaggaaggctcatgagttcataaaaagtttgcagatccctgaaaaccaacccgaccatgaaaattattaccgccatagatcaaagggttcatgggctcattcaacattagacaatggatggtctgtatctgattctacagcagaagcaattcaggcattgttgttgttatcaaagttctcttccaatcttgtgggggatcccataaaagaagaaagattatttgatgcagtggattgcttgctttcttttatgaataaagatggtacattttcaacatacgagcgtaagagaactgcatctttgttggaggttctcaacccttccgagacttttctaaacattgttgttgatcacccgtcggtcgaatgcacgtcatctgcgattcaagctcttgttatgttcagagaaatgtatccaaggtatcgcgatcaagagataaaaaaatgtattaaaggagcatctaaatttattgagagcaaacaacaaaaggatggcacatggtttggcacttggggtgtatgttacacttatgggacattatttgcagtgcaaggattagttgttgctggaagaacttatgaaaacagttcttctattaggaaagcatgtaggtttctattgtcaaagcagctaatcacgggtggatggggtgagacatatccgtctaatggaactgcgatttaccaggtctatgcagaggccagtagtcctcatgtagtgaatacagcttgggcaatgttggctttaatttatgctggacaggttcagcgagatccaacaccattgtatggtgctgcaaaagaactgatcaatatgcaacaagagtcaggcgagtttccccaacaagaacacattgggagcttcaattgttccttttacttcaactatggaaactaccgtaacttgttcccaatatgggctcttggagagtttcggagacgaattgttgcagaaaagaagaggaaccaacaaacatgattgttttaggcatcaacaaattcggggtgaaagcttgtaaggggctcaagtttaacatgtggtgaaagacatgtcaatatactaaagctgatgtccatctggctaaaccatatgtacatatttttactatggaaacaacgatccatatgtatatatggaataaagggccacatatatgaccgtttcgccatctatattatatttttgaagtgaaaaatacaagactttgaag

SEQ ID NO: 41569 - DNA, 2679 bp, Zea Mays
ctcatatatagataataataaattttgttaaggtaacctcgccgacgctcgacgatcgacccctatataatagtcttccatatggcatgcgcatcctaaataaagcacacaacttgtgcaagtgcaagctagctaggtagtaaaagctagcctcgccaacaacactgactgtgggcagctagctgatcatgtggaggctgaagatcggcggcgagggcggcgggccatggctgcggtcggcgagcggcttcaccggcaggcaggtatgggagttcgaccccgacgccggtacgcaggacgagatcgccgaggttgagaggctgaggcgggagttcacggagcgccgccgcttcgacaagagggccgtggcgcaggatctcctcttgcgcatgcaggtatttgcactacatgtcactggatcactcaatacggttttatcagcagagcatcgacacgagatctgtcgctatatttacaaccatcagaatgaagatggtggctggggcatgcaagaggttgggccaagcaccatgtttagctcatgcctgaactatgtcaccttgagacttctcggggaggcgtgtgcgcagcatgacgctttggccaagggacaagcatggattctgtctcatggaagtgcggcggcaatacctcagtggggaaagatttggctctcggtgatcggtttatatgactggaacggcaataattcgatcgttcctgagttgtggcttgttccatattctctcccattccatccagggcgattctggtgtttctgtcggttgatatatatgccaatggcttatttatatggcaagaagtttgtggggccaattacaccaaccatattatcaataagaaatgaaatctataagataccatatgatgaggtcgattggaacaaagctcgagatacttgcgctaaggaagaccttctctacccaaggacgttcgtgcaaaacgtcatttggacttgtgtgaataaaatcgtggaaccattgctaaatctttggccggctaagatgttaagagatacagcactgaagaacatcatgaatcatatccattatgaagacgaaagtactaggtacctttgtgtatgcccagtaaacaaggcactaaatatgatttgttgttgggttgagaatccaaattcagatgcattcaagcggcaccttccaaggatctatgattatatatggcttgctgaagatggcatgaagttaaaggtgtatgacggcacgcaagcatgggatacagcttttattgtcaaagcatattgctcgactgacctggttcatgagttttctccaacactcaggaaggctcatgagttcataaaaagtttgcagatccctgaaaaccaacccgaccatgaaaattattaccgccatagatcaaagggttcatgggctcattcaacattagacaatggatggtctgtatctgattctacagcagaagcaattcaggcattgttgttgttatcaaagttctcttccaatcttgtgggggatcccataaaagaagaaagattatttgatgcagtggattgcttgctttcttttatggttctcaacccttccgagacttttctaaacattgttgttgatcacccgtcggtcgaatgcacgtcatctgcgattcaagctcttgttatgttcagagaaatgtatccaaggtatcgcgatcaagagataaaaaaatgtattaaaggagcatctaaatttattgagagcaaacaacaaaaggatggcacatggtttggcacttggggtgtatgttacacttatgggacattatttgcagtgcaaggattagttgttgctggaagaacttatgaaaacagttcttctattaggaaagcatgtaggtttctattgtcaaagcagctaatcacgggtggatggggtgagacatatccgtctaatggaactgcggtaattcttaatttcccttacctaactatgtgtcttcttggtcatttcatgtttgatatttcatagaatagcgtggtacacatatatttggtcttcgacaaaatatttaaatgttatcatgtgaattgttcccatctagccagtccatcaagtagtttagttcttaaagcattatatatcattagtgatggtcttcattttaagatttaccaggtctatgcagaggccagtagtcctcatgtagtgaatacagcttgggcaatgttggctttaatttatgctggacaggttcagcgagatccaacaccattgtatggtgctgcaaaagaactgatcaatatgcaacaagagtcaggcgagtttccccaacaagaacacattgggagcttcaattgttccttttacttcaactatggaaactaccgtaacttgttcccaatatgggctcttggagagtttcggagacgaattgttgcagaaaagaagaggaaccaacaaacatgattgttttaggcatcaacaaattcggggtgaaagcttgtaaggggctcaagtttaacatgtggtgaaagacatgtcaatatactaaagctgatgtccatctggctaaaccatatgtacatatttttactatggaaacaacgatccatatgtatatatggaataaagggccacatatatgaccgtttcgccatctatattatatttttgaagtgaaaaatacaagactttgaag

SEQ ID NO: 41570 - DNA, 951 bp, Zea Mays
acttccaagatggtacattttcaacatacgagcgtaagagaactgcatctttgttggaggttctcaacccttccgagacttttctaaacattgttgttgatcacccgtcggtcgaatgcacgtcatctgcgattcaagctcttgttatgttcagagaaatgtatccaaggtatcgcgatcaagagataaaaaaatgtattaaaggagcatctaaatttattgagagcaaacaacaaaaggatggcacatggtttggcacttggggtgtatgttacacttatgggacattatttgcagtgcaaggattagttgttgctggaagaacttatgaaaacagttcttctattaggaaagcatgtaggtttctattgtcaaagcagctaatcacgggtggatggggtgagacatatccgtctaatggaactgcggtctatgcagaggccagtagtcctcatgtagtgaatacagcttgggcaatgttggctttaatttatgctggacaggttcagcgagatccaacaccattgtatggtgctgcaaaagaactgatcaatatgcaacaagagtcaggcgagtttccccaacaagaacacattgggagcttcaattgttccttttacttcaactatggaaactaccgtaacttgttcccaatatgggctcttggagagtttcggagacgaattgttgcagaaaagaagaggaaccaacaaacatgattgttttaggcatcaacaaattcggggtgaaagcttgtaaggggctcaagtttaacatgtggtgaaagacatgtcaatatactaaagctgatgtccatctggctaaaccatatgtacatatttttactatggaaacaacgatccatatgtatatatggaataaagggccacatatatgaccgtttcgccatctatattatatttttgaagtgaaaaatacaagactttgaag

SEQ ID NO: 41571 - DNA, 1094 bp, Zea Mays
gtttctttaccctaaaattttcaccgctccaacgcagtcgccgccgtttttctcaaacctggccatcctcatctaccttgcagcgccggcgccctatcttccgctccttccgttccttgcgctcggcgcgcaggtggcggccccatctttcgcttcctcccttcctccgccaccactcaccccttgatccgttctgcctcctaaatttggcgtcaccaagcaaccccactcatgccgttctcaaaaccctacccgaccaatccgtccaattccaaggctgtcggctttgcgttatgagcgccgggtcaggggaggggcggaggatcagatcagcagccgcacgagcattgagcgatatggcttctatgtaggatgcaactggacatcgccgtccactcgtctagctattgatgctgaagtcccgatgcttcatgccaccgcgatggtggctggttgatctccgatatcaagaggagggaagaggcactgaagaatggtgcagatccacatttgtttttgcataattgctgccttagctccaccaattgtatttcatgggaaatcattaacgagaacacatggttatggtgttccacagactggcattttattcattcattgaaaggcttacctcgcttatggtgttccacagagtgacatgaaactattttcacttatgcaaaagatttgtgcattaagaatattttttatcagagttcactcgaggaatgcaagaattaggataggtagattagatcttttttattggtgtatcctgagtttcctctaataagaatcatgtgtcaccacctgagtcaattttactaaacatttttttgctaccagccttaaatacatactacaaatgctgatttaccctaaaattctacacatttactttgttttggttcacgttttacactaaaatccgtacgagccagaaacaaggcacaatcggatatgcgcgatttttatgctataattttggacatcattcgctcttatgaaacatatcaatgatttacgacaaaatttgtatatatttatgatgttttggttcacgttacgctaaaatccgctcgagtcataacctg

SEQ ID NO: 41572 - DNA, 1657 bp, Zea Mays
cgccgtttttctcaaacctggccatcctcatctaccttgcagcgccggcgccctatcttccgctccttccgttccttgcgctcggcgcgcaggtggcggccccatctttcgcttcctcccttcctccgccaccactcaccccttgatccgttctgcctcctaaatttggcgtcaccaagcaaccccactcatgccgttctcaaaaccctacccgaccaatccgtccaattccaaggctgtcggctttgcgttatgagcgccgggtcaggggaggggcggaggatcagatcagcagccgcacgagcattgagcgatatggcttctatgtaggatgcaactggacatcgccgtccactcgtctagctattgatgctgaagtcccgatgcttcatgccaccgcgatggtggctggttgatctccgatatcaagaggagggaagaggcactgaagaatggtgcagatccacatttgtttttgcataattgctgccttagctccaccaattgtatttcatgggaaatcattaacaagcatgtttgctttgtgaccctagaaaccagccaggcacaagcagcacctcgaccccctcctcgaccagatgactactgtctcgaggcgtacagtggccactcacctagcgggtgtgtctagctcgtcatcggtctccaatgccacgttcgcgctactactccaatcattgctgacccgtatgatctccactgacttccacaaggagtgcaggcaccttcggtcccatccgctgttaaggtacattgattatttttttgttttctacacgtagtgggtcgatagatgcaattcatagattatctattgtgggcgctggaagctaaaagggatatcagtcatcatctgctgatcagcagaagcaataatgaccaagctcttctctggtagcacctccaaaatttttcttctagagatgtattcctcatttcagtcgtttgtgctgactggtatgatctctccatcagctaataactggctaaaattatagcaatgtttaagaaaatgcatacaccattgggtttacagaataacaaaaataaataagggtagaatttaactcgatctgcagaatatattttagtggatgagaaatatatatcagcatatttggctaaacaacacccaatgtggaccatattataattctagtaacttaaaatccttaattactttatttgataaataaagtactttatgcatgctctgctcataaacctagataagattataagcaatgaggacaatcttatacctcccaacttcaacctctctgtatgaaaggattgtggacctcataacttaaagcttgaaaatgaaccaggtgccaggccttagaatattagtagatactactacatcaaaagggggacaaaaggtgtcacagtcttatccataatggcataaataaaatcattcttttattagatgcatgcgtttttttggtggtcctgcactcctgttgtatctctctaaaaacttgaagtgtcataacaagatgcaaaagtactagcagtggcggagcttctcataggacgaaaggagcacgaccacccctaaacatgtgtaaactacatagttgcagtcattttgcttgataaaaactaaaagttagccttgttatttaat

SEQ ID NO: 41573 - DNA, 2517 bp, Zea Mays
cgccgtttttctcaaacctggccatcctcatctaccttgcagcgccggcgccctatcttccgctccttccgttccttgcgctcggcgcgcaggtggcggccccatctttcgcttcctcccttcctccgccaccactcaccccttgatccgttctgcctcctaaatttggcgtcaccaagcaaccccactcatgccgttctcaaaaccctacccgaccaatccgtccaattccaaggctgtcggctttgcgttatgagcgccgggtcaggggaggggcggaggatcagatcagcagccgcacgagcattgagcgatatggcttctatgtaggatgcaactggacatcgccgtccactcgtctagctattgatgctgaagtcccgatgcttcatgccaccgcgatggtggctggttgatctccgatatcaagaggagggaagaggcactgaagaatggtgcagatccacatttgtttttgcataattgctgccttagctccaccaattgtatttcatgggaaatcattaacgtaagtttgccactccttttatctaaagtaatcaaagtcattagttattatgggcttgggtaatgtgagtaagcaccattgcatagatagccagtgatgttggctgctggaaaaggagaaatcaatgaattatagattgggatcacagaacttcatagaggaaactaggttgattgttcaatatctttttaagaacacttagtatcctggataatatgtgaaacaaacaatatgtgaaacaaataagtatttaaccagccgcatagaagcatgtttgctttgtgaccctagaaaccagccaggcacaagcagcacctcgaccccctcctcgaccagatgactactgtctcgaggcgtacagtggccactcacctagcgggtgtgtctagctcgtcatcggtctccaatgccacgttcgcgctactactccaatcattgctgacccgtatgatctccactgacttccacaaggagtgcaggcaccttcggtcccatccgctgttaaggtacattgattatttttttgttttctacacgtagtgggtcgatagatgcaattcatagattatctattgtgggcgctggaagctaaaagggatatcagtcatcatctgctgatcagcagaagcaataatgaccaagctcttctctggtagcacctccaaaatttttcttctagagatgtattcctcatttcagtcgtttgtgctgactggtatgatctctccatcagctaataactggctaaaattatagcaatgtttaagaaaatgcatacaccattgggtttacagaataacaaaaataaataagggtagaatttaactcgatctgcagaatatattttagtggatgagaaatatatatcagcatatttggctaaacaacacccaatgtggaccatattataattctagtaacttaaaatccttaattactttatttgataaataaagtactttatgcatgctctgctcataaacctagataagattataagcaatgaggacaatcttatacctcccaacttcaacctctctgtatgaaaggattgtggacctcataacttaaagcttgaaaatgaaccaggtgccaggccttagaatattagtagatactactacatcaaaagggggacaaaaggtgtcacagtcttatccataatggcataaataaaatcattcttttattagatgcatgcgtttttttggtggtcctgcactcctgttgtatctctctaaaaacttgaagtgtcataacaagatgcaaaagtactagcagtggcggagcttctcataggacgaaaggagcacgaccacccctaaacatgtgtaaactacatagttgcagtcattttgcttgataaaaactaaaagttagccttgttatttaatgattagcccctactggatttagggtagttgaatgtgtggtaatatttctctctttttccctgatgtgtaggagaacacatggttatggtgttccacagactggcattttattcattcattgaaaggcttacctcgcttatggtgttccacagagtgacatgaaactattttcacttatgcaaaagatttgtgcattaagaatattttttatcagagttcactcgaggaatgcaagaattaggataggtagattagatcttttttattggtgtatcctgagtttcctctaataagaatcatgtgtcaccacctgagtcaattttactaaacatttttttgctaccagccttaaatacatactacaaatgctgatttaccctaaaattctacacatttactttgttttggttcacgttttacactaaaatccgtacgagccagaaacaaggcacaatcggatatgcgcgatttttatgctataattttggacatcattcgctcttatgaaacatatcaatgatttacgacaaaatttgtatatatttatgatgttttggttcacgttacgctaaaatccgctcgagtcataacctg

SEQ ID NO: 41574 - DNA, 2437 bp, Zea Mays
cgccgtttttctcaaacctggccatcctcatctaccttgcagcgccggcgccctatcttccgctccttccgttccttgcgctcggcgcgcaggtggcggccccatctttcgcttcctcccttcctccgccaccactcaccccttgatccgttctgcctcctaaatttggcgtcaccaagcaaccccactcatgccgttctcaaaaccctacccgaccaatccgtccaattccaaggctgtcggctttgcgttatgagcgccgggtcaggggaggggcggaggatcagatcagcagccgcacgagcattgagcgatatggcttctatgtaggatgcaactggacatcgccgtccactcgtctagctattgatgctgaagtcccgatgcttcatgccaccgcgatggtggctggttgatctccgatatcaagaggagggaagaggcactgaagaatggtgcagatccacatttgtttttgcataattgctgccttagctccaccaattgtatttcatgggaaatcattaacgtaagtttgccactccttttatctaaagtaatcaaagtcattagttattatgggcttgggtaatgtgagtaagcaccattgcatagatagccagtgatgttggctgctggaaaaggagaaatcaatgaattatagattgggatcacagaacttcatagaggaaactaggttgattgttcaatatctttttaagaacacttagtatcctggataatatgtgaaacaaacaatatgtgaaacaaataagtatttaaccagccgcatagaagcatgtttgctttgtgaccctagaaaccagccaggcacaagcagcacctcgaccccctcctcgaccagatgactactgtctcgaggcgtacagtggccactcacctagcgggtgtgtctagctcgtcatcggtctccaatgccacgttcgcgctactactccaatcattgctgacccgtatgatctccactgacttccacaaggagtgcaggcaccttcggtcccatccgctgttaaggagaacacatggttatggtgttccacagactggcattttattcattcattgaaaggcttacctcgcttatggtgttccacagagtgacatgaaactattttcacttatgcaaaaggtttgataaaggaactattgtacttagattttgtcctacgtttagcatgtcagcaatttacattagatttgttcctacgtttacacctttttagccctcagatgcatgcataaatcttgattggtagatatattgacaagacatcattttccatatgctctaaatgttttagtagtttatgctgatgattttgctttctttccagttatgatatttcaatagacctttttatatgtgctaactacacaaaagataagctggtatctaccagctcaagacattgtttgctagtagacttcatattagttgatgattgtctcggtacaactcaagacatttttcataacaccattgttggtctatgagaaaataaagacaaccctttaggttgctgcaattttcatcgacctaggcacatgtgattattacacttgttgtggttttattataatatattgttctaagtctgattatgctttttagatgtacatatcatcgcactatatatgcaccccttttgcaactgttataactagccatggcaccatttatgcatccaactgttataccattggaaatccgcgcaactgcactatatccattggaattctgtgcttttgtcagtaattggtttgatggatttgaatttatgatccccaagtataatggcagatgcttaaatagttattggaaaatgggaaatctttctgctagacatgtatagggatgttttttgcgctcacaaccagttgattggaagcacattaagtcattagctctgctagtttatggaatatggaatgcttcatttttgtatgtgtcttttgggaataaaacattgttacattaattttcctaacagtctgttttcttttcagatttgtgcattaagaatattttttatcagagttcactcgaggaatgcaagaattaggataggtagattagatcttttttattggtgtatcctgagtttcctctaataagaatcatgtgtcaccacctgagtcaattttactaaacatttttttgctaccagccttaaatacatactacaaatgctgatttaccctaaaattctacacatttactttgttttggttcacgttttacactaaaatccgtacgagccagaaacaaggcacaatcggatatgcgcgatttttatgctataattttggacatcattcgctcttatgaaacatatcaatgatttacgacaaaatttgtatatatttatgatgttttggttcacgttacgctaaaatccgctcgagtcataacctg

SEQ ID NO: 41575 - DNA, 1931 bp, Zea Mays
cgccgtttttctcaaacctggccatcctcatctaccttgcagcgccggcgccctatcttccgctccttccgttccttgcgctcggcgcgcaggtggcggccccatctttcgcttcctcccttcctccgccaccactcaccccttgatccgttctgcctcctaaatttggcgtcaccaagcaaccccactcatgccgttctcaaaaccctacccgaccaatccgtccaattccaaggctgtcggctttgcgttatgagcgccgggtcaggggaggggcggaggatcagatcagcagccgcacgagcattgagcgatatggcttctatgtaggatgcaactggacatcgccgtccactcgtctagctattgatgctgaagtcccgatgcttcatgccaccgcgatggtggctggttgatctccgatatcaagaggagggaagaggcactgaagaatggtgcagatccacatttgtttttgcataattgctgccttagctccaccaattgtatttcatgggaaatcattaacgagaacacatggttatggtgttccacagactggcattttattcattcattgaaaggcttacctcgcttatggtgttccacagagtgacatgaaactattttcacttatgcaaaaggtttgataaaggaactattgtacttagattttgtcctacgtttagcatgtcagcaatttacattagatttgttcctacgtttacacctttttagccctcagatgcatgcataaatcttgattggtagatatattgacaagacatcattttccatatgctctaaatgttttagtagtttatgctgatgattttgctttctttccagttatgatatttcaatagacctttttatatgtgctaactacacaaaagataagctggtatctaccagctcaagacattgtttgctagtagacttcatattagttgatgattgtctcggtacaactcaagacatttttcataacaccattgttggtctatgagaaaataaagacaaccctttaggttgctgcaattttcatcgacctaggcacatgtgattattacacttgttgtggttttattataatatattgttctaagtctgattatgctttttagatgtacatatcatcgcactatatatgcaccccttttgcaactgttataactagccatggcaccatttatgcatccaactgttataccattggaaatccgcgcaactgcactatatccattggaattctgtgcttttgtcagtaattggtttgatggatttgaatttatgatccccaagtataatggcagatgcttaaatagttattggaaaatgggaaatctttctgctagacatgtatagggatgttttttgcgctcacaaccagttgattggaagcacattaagtcattagctctgctagtttatggaatatggaatgcttcatttttgtatgtgtcttttgggaataaaacattgttacattaattttcctaacagtctgttttcttttcagatttgtgcattaagaatattttttatcagagttcactcgaggaatgcaagaattaggataggtagattagatcttttttattggtgtatcctgagtttcctctaataagaatcatgtgtcaccacctgagtcaattttactaaacatttttttgctaccagccttaaatacatactacaaatgctgatttaccctaaaattctacacatttactttgttttggttcacgttttacactaaaatccgtacgagccagaaacaaggcacaatcggatatgcgcgatttttatgctataattttggacatcattcgctcttatgaaacatatcaatgatttacgacaaaatttgtatatatttatgatgttttggttcacgttacgctaaaatccgctcgagtcataacctg

SEQ ID NO: 41576 - DNA, 673 bp, Zea Mays
cgccgtttttctcaaacctggccatcctcatctaccttgcagcgccggcgccctatcttccgctccttccgttccttgcgctcggcgcgcaggtggcggccccatctttcgcttcctcccttcctccgccaccactcaccccttgatccgttctgcctcctaaatttggcgtcaccaagcaaccccactcatgccgttctcaaaaccctacccgaccaatccgtccaattccaaggctgtcggctttgcgttatgagcgccgggtcaggggaggggcggaggatcagatcagcagccgcacgagcattgagcgatatggcttctatgtaggatgcaactggacatcgccgtccactcgtctagctattgatgctgaagtcccgatgcttcatgccaccgcgatggtggctggttgatctccgatatcaagaggagggaagaggcactgaagaatggtgcagatccacatttgtttttgcataattgctgccttagctccaccaattgtatttcatgggaaatcattaacgagaacacatggttatggtgttccacagactggcattttattcattcattgaaaggcttacctcgcttatggtgttccacagagtgacatgaaactattttcacttatgcaaaaggtccgccattggaagaacgacgtcatcgt

SEQ ID NO: 41577 - DNA, 2594 bp, Zea Mays
ctgcatccgcgcccgcctgctcctcgtcctccctccacccgtctcctattcccttcctcccgccgcagcagcgagagcagagagcagagcggaacgagcaaatcttggggggggggggggggtgtcgcacccgctctccccgtgctgctggtggattcgttcaaggcgggggccgcctgcctgcccgcccgcttttccgtaccctggtccccggttgggttgggttggatttggttgcgaggtgttgttgggggtgggcgctcgggtggcggagtggttacttccccgcttggcctcttgctgcgccccgctgggccgtgtcgtgccattaaagccggcgcctttggtttctctctccacctctctctatccgcccccgccccggctctctctctagctgcagattggtgcctcacccctagcggtcggtggttggggccgggttccgacggctgctcgggagctcgactggggcttggaagtccaaagccgccgcctcctcgtggcgcgccgctccggaattcttgccttcttgggctccgaatctcgccgcccggtgtttgatttgcggcgttcctagcgaattcggggctgatttgcccccctatggcgaggatttgagtggactcgagaggaacaagtagaggggagtcctgatttgggcccctgccgtggtatgtgccatgaggaagctcttcttctccgagtcggcctgcaaggagaccaagctccactgcgcgccccactcatggctgcccctcgagagggggaagctctccaagttctccggccatgccgccgccggctcctccatattaaactgtcctgaggcggcaatgaggagtttgcagcttgctcgtgagcatgctgcaagtgatcatgaaaggcttgtctatgaaggatggatattgtatgatactggccactgcgaggaaggactgcagaaagcggaagcatcaattgcaatacaacggtcatttgaggcattttttctgaaagcttatgctttggctgattcgagtcttgatccttcgaccacagcaacagttgtatcacttctagaagatgcattgcggtgtccctcagatagacttcggaagggtcaagctctaaacaaccttggaagtgtttatgtggattgtgggaagcttgacctggcagctgaatgctacattaacgccctaaagatcggccacaccagagcgcaccaaggccttgcgagggttcatttccttcggaacaacagagtcggtgcgtatgatgaaatgaccaagctgatagagaaggccaggaacaacgcgtcggcatacgagaagagatctgagtactgcgagcgggagctgacgaaaacggacttgcagatggtcaccaaactcgaccctctgcgagtctacccctacagataccgtgctgctggtaagtgccgtttgcccgcttcctgctgcatggcatatctagtttcttatacttttaatacgacaaagctaggacgtgatgtgatcctagccccaccagattcaaagcaggttgaaacttagaatataaaaattcttgacacggtagtttattaattgttaatggatgtagctcatgtgtgctcaactcccaagtggttggtgctactttaacgaaccaactaccatggttcctaacataaaagctggtgagaagtcaatgtatgtagcctgccgctgcctacgttcaattttctatcagtaggtgtaacaaccataatatatttgcatccagcccacgaattagctcacccgttccttgtttttctgtttcctgctttgctgacgcggactcgttcctaactcgattattggcgcgcagtgctgatggacaaccacaaggagaaagaggccgtcgcggagctgaccagggcgatcgccttcaaggcggacctgaacctgctccacctgcgcgcggccttccacgagcacatcggcgacatctcgagcgccctccgggactgccgcgcggccctcctggtggaccccaaccaccaggagatgctggagctgcaccaccgggtgaacagccaggaaccatgagcggagcgccgccatggtgtacatacaggacgtgataggaagcccctcatagccaaccccccgccataccagtgtatgttttgtaccatacacagcatgtcaatgtaaggatagtagaaaagccactttaggtccctccctggctccctccccttgcaaaccaaacacctacattccttgtgtgcctagttagatatgttgtttgccatatagcctttcccttagtaaattattgttgtcgactgtgattaagcctcctaattgtacccgccacgtggcccgtgctgccagaatcaagaagttttgactgtaccttctgtatgtaaatgcaatgggggaaaaatgatgaatggaagcttttgtcaagcctgcaggcaacttgctggccactgaatgattgattgcacatgtgcaggtatgtgcttttggctgttgattagctggagcgttctttcttgctactactattactatactacccgtcggtcaggattagcatgcagtcattattgcactcattgggggtgaagattggag

SEQ ID NO: 41578 - DNA, 3257 bp, Zea Mays
ctgcatccgcgcccgcctgctcctcgtcctccctccacccgtctcctattcccttcctcccgccgcagcagcgagagcagagagcagagcggaacgagcaaatcttggggggggggggggggtgtcgcacccgctctccccgtgctgctggtggattcgttcaaggcgggggccgcctgcctgcccgcccgcttttccgtaccctggtccccggttgggttgggttggatttggttgcgaggtgttgttgggggtgggcgctcgggtggcggagtggttacttccccgcttggcctcttgctgcgccccgctgggccgtgtcgtgccattaaagccggcgcctttggtttctctctccacctctctctatccgcccccgccccggctctctctctagctgcagattggtgcctcacccctagcggtcggtggttggggccgggttccgacggctgctcgggagctcgactggggcttggaagtccaaagccgccgcctcctcgtggcgcgccgctccggaattcttgccttcttgggctccgaatctcgccgcccggtgtttgatttgcggcgttcctagcgaattcggggctgatttgcccccctatggcgaggatttgagtggactcgagaggaacaagtagaggggagtcctgatttgggcccctgccgtggtatgtgccatgaggaagctcttcttctccgagtcggcctgcaaggagaccaagctccactgcgcgccccactcatggctgcccctcgagagggggaagctctccaagttctccggccatgccgccgccggctcctccatagaggcattgatgaagatgccggagccggcagtgcttccgtacttcaagcccgcgaactatgtcgacatactggctcagatacacgaggagctggagtcctgccctcctgacgagaagtcctgcctgtacctgctccagttccaggtcttccgcggccttggggaggccaagctgtcacggaggagcctccagtctgcgtgggagaaggcgagcaccatacacgagaagctcatctttggggcgtggctcaagtacgagaagaaaggggaggaggcaatctccgacctgctcagctcgtgctgcaagtgctcacaggagttcaggctgctggattttgtgtcgcaagtctccactgggtcacacatgatgaactatgatgatgatgatgatgagtctgatgagtttcggggttctgcggtggttcatttccggataagagatgatatgattgcatgcgatcgacggaaacttgcagctctgtcaactccactgtatgcaatgcttaacggtggatttagggaatcctatctggaggtcattgacatgtctagaaatggtatctcccctattggcatgagggcaatcagtaaattcagcctatcaggaagactaccttatttgtcagcagatgctatcttggagatgcttgattttgccaataagttttgctgcaagggcctcaaggatgcctgtgagcgaaagcttgcttctttcatctcttcaaggcaagatgctatagatttcatggagtgtgctcttgagctgggctgttccattcttgctgcttcatgcttacaagtgctcttgaatgagcttccagagtgcttgaatgatgaacaagtggttaggatattctcctctgcaaataaggcacagagattgacaatggttggcaatgcatctttctccctatattgccttctcagtgaagtctccgtgagtaccaacccaacatcggatgtcactgtgagtttcttggaaaaactggtagagtcggcatcagattctaggcagaagcagctggccttacatcagctggcatgcaccagatttttaaggaaagattaccctgaatctgagtgcttgttcaatgctgccttttctgctggccatctttattcgttagtgggtttggctagattggcctctctgaggggtaataagcattttgctctcaagttgctagactctgtgatgtcatctcggtggcctcttggatggatgtatcaagagagagcactctatttggatggtgataacaagttagaaaatcttaacaaggctactgagttggaccctacccttacatatccctatatgtttcgagctgcatctttgatgaaaaggcaaagtgttgaagctgcattgatggagataaaccggatccttggatttaaactggtgctggagtgcttagaactaaggttctgttgctaccttgcccttgaggattatagggctgccttatgtgacgtgcaggcaatcctcactcttgccccagattatcgtatgattggtggccgggttgctgccaagcagctgcgaatgctagtgctagagaatgtagagcagtggacacctgctgactgttggatgcaactttatgatcgctggtcgtctgtggatgatatagggtccctctctgttatatatcaaatgctggagtcagagactgccaaaggagttttgtactttagacaatctttgcttcttctcagattaaactgtcctgaggcggcaatgaggagtttgcagcttgctcgtgagcatgctgcaagtgatcatgaaaggcttgtctatgaaggatggatattgtatgatactggccactgcgaggaaggactgcagaaagcggaagcatcaattgcaatacaacggtcatttgaggcattttttctgaaagcttatgctttggctgattcgagtcttgatccttcgaccacagcaacagttgtatcacttctagaagatgcattgcggtgtccctcagatagacttcggaagggtcaagctctaaacaaccttggaagtgtttatgtggattgtgggaagcttgacctggcagctgaatgctacattaacgccctaaagatcggccacaccagagcgcaccaaggccttgcgagggttcatttccttcggaacaacagagtcggtgcgtatgatgaaatgaccaagctgatagagaaggccaggaacaacgcgtcggcatacgagaagagatctgagtactgcgagcgggagctgacgaaaacggacttgcagatggtcaccaaactcgaccctctgcgagtctacccctacagataccgtgctgctggtatgtgcttttggctgttgattagctggagcgttctttcttgctactactattactatactacccgtcggtcaggattagcatgcagtcattattgcactcattgggggtgaagattggag

SEQ ID NO: 41579 - DNA, 552 bp, Zea Mays
aaacagtggacgcatcctagatcccaacggccagcgtccagcctccttggggcttgtacttgttcactgaatcactacttcgcgaggtcagccgtcaacgcatcagcagcaactagcaaggccgccaagcggcccaggacccaggccagctccaagcgaacaacctacgtacgactctatacctctcgccctctgagtctcgcgcggtcaggctgcaggccatctgggctccggcttccagcatccaccagacgtccttagaatacggtgcagcgagcagcgagcagcaagtcaccgagcagccgagcgaccgccgagcacagggcaccaccaagcagccgagccaccgcccagcgccgagtcttctctggtaaattaaacaggcttggataaattagtgtttcaatttagagttttagacagattgcttgtagggatttgaaaagattacttgtatggatgaatggattttgtttgtacagattgtatgtacaaattgtgttaaaaatattatttgatgttgttggaatgttaatttgtgataaatttctg

SEQ ID NO: 41580 - DNA, 432 bp, Zea Mays
atcactacttcgcgaggtcagccgtcaacgcatcagcagcaactagcaaggccgccaagcggcccaggacccaggccagctccaagcgaacaacctacgccatctgggctccggcttccagcatccaccagacgtccttagaatacggtgcagcgagcagcgagcagcaagtcaccgagcagccgagcgaccgccgagcacagggcaccaccaagcagccgagccaccgcccagcgccgagtcttctctggtaaattaaacaggcttggataaattagtgtttcaatttagagttttagacagattgcttgtagggatttgaaaagattacttgtatggatgaatggattttgtttgtacagattgtatgtacaaattgtgttaaaaatattatttgatgttgttggaatgttaatttgtgataaatttctg

SEQ ID NO: 41581 - DNA, 430 bp, Zea Mays
cgcgaggtcagccgtcaacgcatcagcagcaactagcaaggccgccaagcggcccaggacccaggccagctccaagcgaacaacctacggctgcaggccatctgggctccggcttccagcatccaccagacgtccttagaatacggtgcagcgagcagcgagcagcaagtcaccgagcagccgagcgaccgccgagcacagggcaccaccaagcagccgagccaccgcccagcgccgagtcttctctggtaaattaaacaggcttggataaattagtgtttcaatttagagttttagacagattgcttgtagggatttgaaaagattacttgtatggatgaatggattttgtttgtacagattgtatgtacaaattgtgttaaaaatattatttgatgttgttggaatgttaatttgtgataaatttctg

SEQ ID NO: 41582 - DNA, 477 bp, Zea Mays
atggggctggccacgctcagcgtagggccactcggccgaggaggggcagggcgtccgagcacagggcctttgcccacgcgcaagcagaacatggcgccaccggcaggggagaagttgcgaggagccacgctgcggcgagctggctggctggcccccgccgccgcgagctggcgcgcgggcagggggttggggagggggcggggggtcgccggagggccgctgtcagctggggcggggctggccagcgagatgagggccggccagcggggtcgctcggccgacgaggatggagagaggggcgtggccaggcggtgccgacagcgacggacgccgacgctcggacaagagcgagagcaacaacgacgactgggtggagaactagatggtggcacgtggcggtgccgtaccagaactccagaagagaagaaggaggctggcggtggcttgctagaagatatagatcagcagcagcagtag

SEQ ID NO: 41583 - DNA, 605 bp, Zea Mays
atcttttcttaactcaaatttttgaaattggtggtggtgcggtccttttgctttgggctaatactttctccccctttggcatgaatcgccaaaaacggatactttgagtgaaatataagccctttgaactaatttctccccctttggcgaacaaaatatgagtgaagattataccaaagacggagagtgacgcggagcgacggcgaaggatgagtgattcaatggagtggagtggaagcctttgtcttcgtcgaagactccaattccctttcaatctatgacttggtttgaaatacacttgaaaacatattagtcatagcatataaaagagatatgatcaaagatatattaatgagctatgtgtgcaagacatcaaaagaaattccgagaatcaagaatatgtagctcatgcctaagtttgttgaagtttgttcatctagtggcttggtaaagatatcgggtaattgttctttggtgttaatatatgcaatctcgatatcccccttttgttggtgatccctcagaaaatgatatcgaatggctatgtgtttagtgcggctatgttcaatgggattatccaccatgcggattgcactctcattatc

SEQ ID NO: 41584 - DNA, 989 bp, Zea Mays
gccacagcgacctatcatggaccgccctctatatcgcagagccgaaccatgattctgctgtccaagcctctagctctttgtcttggccatctcaagttcacaacagcagggctagtagtagtagttttgacggccaggctgggccgctggggccgtggttgggtaattgttttttttgagccaaggttgcttcggaggataattgaacttgtgccggagctgtgaatcatcgccagtctggggggaagaggctgccggaagatccgccatgagcagcgatcagcagaacgatgctcctggaagctacttcgtaggccgtccaaccaacccgggcgacaagacggaagaaccgcacgcccgcggggaccagaacccggcgaccgcgcaaactcccggcgagtacttcgttgggcgtccggcgagccatccccagcaggaacaggaagcagcacagcagcaaaccactaggcagagcacaccaagcttcttggccaaatgctgtccctgcctcgccggaggtggagctgcggaatagatcaagaactgcctcctgcagccctgctaagggcacccaacgaattgtgcgcatgagaaatggagttaatctgggatggtgatctatctttctgtatctgaattgaaacttgtgctctggaaactcctcttttttttttttcctcagtgttccacttttaatcgtttcttctgcatccttgtgcatccataccactgtcgcgtagtgcgaattggtccaaccagctgatttttgtttgtttgcccccacccccaaaaaaacgatatgtttcatttcaaaaatgtcaatgtgtatttatgtattattatttactttgcttgaggttattgtgaacttgtattaatcatgaattgtcataccgtttacaaatatatacatgcgtcaagttaaccttgaagctttttcaggtgactcagttttgtacttgtcctgtgttgaaacatctagattttat

SEQ ID NO: 41585 - DNA, 1063 bp, Zea Mays
cgacctatcatggaccgccctctatatcgcagagccgaaccatgattctgctgtccaagcctctagctctttgtcttggccatctcaagttcacaacagcagggctagtagtagtagttttgacggccaggctgggccgctggggccgtggttgggtaattgttttttttgagccaaggttgcttcggaggataattgaacttgtgccggagctgtgaatcatcgccagtctggtgacagctctgtccctctttgaaaaaaaaatactccctccgtcttcttgacttgtagccgtctgggtcgtctcctatgtccttgtcgcattcctgagagttgctaccaccggcgctaggggggaagaggctgccggaagatccgccatgagcagcgatcagcagaacgatgctcctggaagctacttcgtaggccgtccaaccaacccgggcgacaagacggaagaaccgcacgcccgcggggaccagaacccggcgaccgcgcaaactcccggcggaacaggaagcagcacagcagcaaaccactaggcagagcacaccaagcttcttggccaaatgctgtccctgcctcgccggaggtggagctgcggaatagatcaagaactgcctcctgcagccctgctaagggcacccaacgaattgtgcgcatgagaaatggagttaatctgggatggtgatctatctttctgtatctgaattgaaacttgtgctctggaaactcctcttttttttttttcctcagtgttccacttttaatcgtttcttctgcatccttgtgcatccataccactgtcgcgtagtgcgaattggtccaaccagctgatttttgtttgtttgcccccacccccaaaaaaacgatatgtttcatttcaaaaatgtcaatgtgtatttatgtattattatttactttgcttgaggttattgtgaacttgtattaatcatgaattgtcataccgtttacaaatatatacatgcgtcaagttaaccttgaagctttttcaggtgactcagttttgtacttgtcctgtgttgaaacatctagattttat

SEQ ID NO: 41586 - DNA, 1023 bp, Zea Mays
ggggaacctatagacgatgttgctctccctccatgggcaaagggttaacctgaagaatccatccacatcaacaaagaagcccttgaaagtgaatatgtgagctctaatctccataattggattaacctcataggtgtgcggtgttttcaattttaaatcactatctgtctactgacggtgagcaattgaacatcatttgttggtttagttttcacatattcacccaaaatctatttcaagtcccccctttgaccaactcattattgtttctattgttgaggtgttgattaggagcagctgattaggagcttcatcaaccaaactgtagggaaagcattatagtaccataacaacactatgtgacatatcaggtgttgatcaggagcagttgatcaggggtctcatccaccatactatagagaaagcattgtaatatcataacaacaatgtgacaggtatgctttcttgttgttgctttttgtcgtttttatatgatattcgttcttctggtaccacaacgctgacaacattggtctatgggaggtaagttgataatggaacccaagcctctgtagatgttattggttgtttcagtgttgtgatttaaaccattctaatattcattcatatcttgcatgcaaatgttggggattgtcatgcagtcctgtgtaggaaaggaatagaagtggagatgtcaaaggatcacaagccgacatatgacacatcaaaggcatcaaagatggctccctcaacggagtactacatgcgacctaggttttgggagactgggaaatgaaactacctgaaggctcgccatcgcctcttattgctaaaccagagatctgttggatgatcccgatggaagatgacgagttcctcatcattggctacgatgggatattcgtgatgaccagccagaatgttatgagcagtccgcaagggactccagaggcatgatgatttgtgttccgtcgcaacatatgggcactctactatcatatatatagaagtctgcagggtact

SEQ ID NO: 41587 - DNA, 3366 bp, Zea Mays
gaaatgggagttgggtgcagaagacttggcccagaaataaaaaaaaagaagctgtgtgttggtgctgtcctatatgcatgtcccaatcccatctccatgtaatggtcttcttcccttcccatccatcgtccgtgagctccgagcgtgagggcgagaggcgtcgctagctggctctcacggccggcaaatctgcgatcaactgcaggttcgccggattcatcgccccattccgctctgggctaaggttccaccagcacaaccctatggcagaagcagtgctccttgctgtcactaagattggttccgttcttggagatgaacctgccaagaccattataaacaagctgtctgaaaaaattcaagctctgagggaactcccacggaaagtggatcacataaggatgaaactaataataatgagcaaagttatacagcagattggcacagtctaccttacagatgaacttgtgaagagttggattggggaggtccggaaggtggcttaccgtgttgaggatgtagtagacaaatactcataccatcttcttcaactggaggaagaagggtttctgaagaaatttttcgtcaagggtacccattatgccattgttttcagtgaaattgctgatgaggtagctgagatagaagaggagattcagcaagttattcagatgaaggatcagtggttgcagccatcccagcttgtccctcaccctgagcaactcgctgaaatcgaaagacagcgttcccaagacagtttcccagaatttgtcaaagatgaagatctagtaggaattgaagaaaatagaaaattgctgactggatggatttactcagaagagcaggctagcatggtgataacagtttctggtatgggtggactgggaaaatctacactggttacaaacatttatgaacgtgaaaaggtcaacttcccggtacatgcttggattgttgtgtcacaggtctacacagtcgagtctttgttgagaaagctactatggaagattgggcatatgcaaccaccagtgccaagagagattgacaaaatggatgtacatgacttgaaggaggaaataaagagaaagctccagaatagaaaatgcttgattgtgttggatgatgtttgggagcaagaagtatacttcaaaatacatgatgctttccagacactccatggaagccgcatcatcattacaacacgaaaggaccatgttggtgctattgcttcctttgaccaccatcttgagctccaaccgttgtgtgggcctgatgcatttgaacttttctgtagaagggcttttcacaacaagaaggaccacaaatgccccgaggagcttaaggaaattgctggtgaaatagtgaaaaggtgccaaggcctgccactagcaattgttacagtcggcagcttgctgtcatctagaccacaaataaacatttggaatcaaacatacaaccagcttcggagtgagttgtcaaccaatgatcatgtccgagcaatcttaaatctaagctaccatgatctatctggagatctcagaaactgcttcttgtattgcagcttgtttcctgaagactaccccatgtcacgcgaagcccttgtgcggctctgggtcgcagaaggttttgttctgagtaaagaaaagaatacaccagaggaggtggctgagggaaatctcatggaattgatccaccgtaatatgcttgaagttgtagactatgatgagcttggcagggttagcacttgcaagatgcatgatatcatgagggacctggcactttgtgttgccaaagaagagaagtttggttctgcaaacgattatggtgaactgatacaggtggaccagaaggttcgtcgcttgtcgttatgtgggtggaatgttaaggcagcagctaagtttaaatttccatgtctccgtactcttgtggctcagggaataatttcattctctcctgacatggtatcctcaattatgtctcaatcaaattatttgacagttcttgagctgcaagattctgagatcactgaggtgccagcatttataggaaatctctttaacctacggtatattgggttaaggcgcaccaaagtcaagtcactcccagagtctattgagaagctcctcaacctccacactctggatatcaaacaaactcaaatagagaaactaccacgagggattgttaaggtcaagaagctaaggcaccttttagctgacaggtttgctgatgagaagcagacggagttcagatatttcatcggagtggaagcacctaaaggtctgttgaacctggaagaactacagactcttgaaacagtgcaagcgagcaaagacttgcctgaacagctgaagaaactgatgcaactcagaagcttatggatcgacaatgtaagcggtgcagattgtgataaccttttcgcgactctttcaaccatgccacttctttccagcctcctaatctccgcaagagatgtgaatgagacactttgcctccaagcccttgctccggaatttccaaagctccacaggctaattgtaaggggccgctgggctgccgagacactggaatatccaatattttgcaaccatgggaaacatctaaaatatttagcgcttagctggtgtcagcttggtgaagatccattgggggtccttgctccgcacgtgccgaacctcacctatttgagcatgaacagggtcagtagtgcaagcactttggttctttctgcagggtgctttcctcacctgaaaacactcgtcctgaagaaaatgcctaacgtcgagcagctggagattggacatggtgctcttccatgcatccaaggtctgtacatcatgtccctagcgcagctggataaggtccctcaaggcatcgaatcgcttctctccctcaagaagctttggcttctgtacctgcacgcggagtttagaacgcagtggctaacgaacgggatgcaccagaagatgcagcatgttcctgagattcgtgtctaggacacaggaaagccagatggttatttctgcagtactatgctggtatatatggtgtgtctgtgaaaaaactattttttgtaccttttcttcccttaagtcctgagttgttgtatgtggacttcacttgcagacacaaacgctcgctttgggtagctcgttagacccatatatatacgtgttgtgttggttcagttgctttaagttacttgtttgttcgaggcatttgccttctgtattgaacttcatgcaaatgatgttatgatcaaacttgtatgtccatgtattttaaatttttttacatgcctcatagaaagtatggattcccatatcatcatttgtctgatcggctaaaaacaatattgtatatgag

SEQ ID NO: 41588 - DNA, 3308 bp, Zea Mays
gttgggtgcagaagacttggcccagaaataaaaaaaaagaagctgtgtgttggtgctgtcctatatgcatgtcccaatcccatctccatgtaatggtcttcttcccttcccatccatcgtccgtgagctccgagcgtgagggcgagaggcgtcgctagctggctctcacggccggcaaatctgcgatcaactgcagcacaaccctatggcagaagcagtgctccttgctgtcactaagattggttccgttcttggagatgaacctgccaagaccattataaacaagctgtctgaaaaaattcaagctctgagggaactcccacggaaagtggatcacataaggatgaaactaataataatgagcaaagttatacagcagattggcacagtctaccttacagatgaacttgtgaagagttggattggggaggtccggaaggtggcttaccgtgttgaggatgtagtagacaaatactcataccatcttcttcaactggaggaagaagggtttctgaagaaatttttcgtcaagggtacccattatgccattgttttcagtgaaattgctgatgaggtagctgagatagaagaggagattcagcaagttattcagatgaaggatcagtggttgcagccatcccagcttgtccctcaccctgagcaactcgctgaaatcgaaagacagcgttcccaagacagtttcccagaatttgtcaaagatgaagatctagtaggaattgaagaaaatagaaaattgctgactggatggatttactcagaagagcaggctagcatggtgataacagtttctggtatgggtggactgggaaaatctacactggttacaaacatttatgaacgtgaaaaggtcaacttcccggtacatgcttggattgttgtgtcacaggtctacacagtcgagtctttgttgagaaagctactatggaagattgggcatatgcaaccaccagtgccaagagagattgacaaaatggatgtacatgacttgaaggaggaaataaagagaaagctccagaatagaaaatgcttgattgtgttggatgatgtttgggagcaagaagtatacttcaaaatacatgatgctttccagacactccatggaagccgcatcatcattacaacacgaaaggaccatgttggtgctattgcttcctttgaccaccatcttgagctccaaccgttgtgtgggcctgatgcatttgaacttttctgtagaagggcttttcacaacaagaaggaccacaaatgccccgaggagcttaaggaaattgctggtgaaatagtgaaaaggtgccaaggcctgccactagcaattgttacagtcggcagcttgctgtcatctagaccacaaataaacatttggaatcaaacatacaaccagcttcggagtgagttgtcaaccaatgatcatgtccgagcaatcttaaatctaagctaccatgatctatctggagatctcagaaactgcttcttgtattgcagcttgtttcctgaagactaccccatgtcacgcgaagcccttgtgcggctctgggtcgcagaaggttttgttctgagtaaagaaaagaatacaccagaggaggtggctgagggaaatctcatggaattgatccaccgtaatatgcttgaagttgtagactatgatgagcttggcagggttagcacttgcaagatgcatgatatcatgagggacctggcactttgtgttgccaaagaagagaagtttggttctgcaaacgattatggtgaactgatacaggtggaccagaaggttcgtcgcttgtcgttatgtgggtggaatgttaaggcagcagctaagtttaaatttccatgtctccgtactcttgtggctcagggaataatttcattctctcctgacatggtatcctcaattatgtctcaatcaaattatttgacagttcttgagctgcaagattctgagatcactgaggtgccagcatttataggaaatctctttaacctacggtatattgggttaaggcgcaccaaagtcaagtcactcccagagtctattgagaagctcctcaacctccacactctggatatcaaacaaactcaaatagagaaactaccacgagggattgttaaggtcaagaagctaaggcaccttttagctgacaggtttgctgatgagaagcagacggagttcagatatttcatcggagtggaagcacctaaaggtctgttgaacctggaagaactacagactcttgaaacagtgcaagcgagcaaagacttgcctgaacagctgaagaaactgatgcaactcagaagcttatggatcgacaatgtaagcggtgcagattgtgataaccttttcgcgactctttcaaccatgccacttctttccagcctcctaatctccgcaagagatgtgaatgagacactttgcctccaagcccttgctccggaatttccaaagctccacaggctaattgtaaggggccgctgggctgccgagacactggaatatccaatattttgcaaccatgggaaacatctaaaatatttagcgcttagctggtgtcagcttggtgaagatccattgggggtccttgctccgcacgtgccgaacctcacctatttgagcatgaacagggtcagtagtgcaagcactttggttctttctgcagggtgctttcctcacctgaaaacactcgtcctgaagaaaatgcctaacgtcgagcagctggagattggacatggtgctcttccatgcatccaaggtctgtacatcatgtccctagcgcagctggataaggtccctcaaggcatcgaatcgcttctctccctcaagaagctttggcttctgtacctgcacgcggagtttagaacgcagtggctaacgaacgggatgcaccagaagatgcagcatgttcctgagattcgtgtctaggacacaggaaagccagatggttatttctgcagtactatgctggtatatatggtgtgtctgtgaaaaaactattttttgtaccttttcttcccttaagtcctgagttgttgtatgtggacttcacttgcagacacaaacgctcgctttgggtagctcgttagacccatatatatacgtgttgtgttggttcagttgctttaagttacttgtttgttcgaggcatttgccttctgtattgaacttcatgcaaatgatgttatgatcaaacttgtatgtccatgtattttaaatttttttacatgcctcatagaaagtatggattcccatatcatcatttgtctgatcggctaaaaacaatattgtatatgag

SEQ ID NO: 41589 - DNA, 3471 bp, Zea Mays
cccaatcccatctccatgtaatggtcttcttcccttcccatccatcgtccgtgagctccgagcgtgagggcgagaggcgtcgctagctggctctcacggccggcaaatctgcgatcaactgcagactctgctctagcactctgcaggctctgaaactctgcgtctcatggccaagattagttcaccgtatcgatcactgctgacctttcgaccttgaatgcagacgctagctgtcgtgcaatgtgtgcgtgtatctccaataaatcctaaacttcgcgtgaacttcgactccgccctgatggaatattaggttcgccggattcatcgccccattccgctctgggctaaggttccaccagcacaaccctatggcagaagcagtgctccttgctgtcactaagattggttccgttcttggagatgaacctgccaagaccattataaacaagctgtctgaaaaaattcaagctctgagggaactcccacggaaagtggatcacataaggatgaaactaataataatgagcaaagttatacagcagattggcacagtctaccttacagatgaacttgtgaagagttggattggggaggtccggaaggtggcttaccgtgttgaggatgtagtagacaaatactcataccatcttcttcaactggaggaagaagggtttctgaagaaatttttcgtcaagggtacccattatgccattgttttcagtgaaattgctgatgaggtagctgagatagaagaggagattcagcaagttattcagatgaaggatcagtggttgcagccatcccagcttgtccctcaccctgagcaactcgctgaaatcgaaagacagcgttcccaagacagtttcccagaatttgtcaaagatgaagatctagtaggaattgaagaaaatagaaaattgctgactggatggatttactcagaagagcaggctagcatggtgataacagtttctggtatgggtggactgggaaaatctacactggttacaaacatttatgaacgtgaaaaggtcaacttcccggtacatgcttggattgttgtgtcacaggtctacacagtcgagtctttgttgagaaagctactatggaagattgggcatatgcaaccaccagtgccaagagagattgacaaaatggatgtacatgacttgaaggaggaaataaagagaaagctccagaatagaaaatgcttgattgtgttggatgatgtttgggagcaagaagtatacttcaaaatacatgatgctttccagacactccatggaagccgcatcatcattacaacacgaaaggaccatgttggtgctattgcttcctttgaccaccatcttgagctccaaccgttgtgtgggcctgatgcatttgaacttttctgtagaagggcttttcacaacaagaaggaccacaaatgccccgaggagcttaaggaaattgctggtgaaatagtgaaaaggtgccaaggcctgccactagcaattgttacagtcggcagcttgctgtcatctagaccacaaataaacatttggaatcaaacatacaaccagcttcggagtgagttgtcaaccaatgatcatgtccgagcaatcttaaatctaagctaccatgatctatctggagatctcagaaactgcttcttgtattgcagcttgtttcctgaagactaccccatgtcacgcgaagcccttgtgcggctctgggtcgcagaaggttttgttctgagtaaagaaaagaatacaccagaggaggtggctgagggaaatctcatggaattgatccaccgtaatatgcttgaagttgtagactatgatgagcttggcagggttagcacttgcaagatgcatgatatcatgagggacctggcactttgtgttgccaaagaagagaagtttggttctgcaaacgattatggtgaactgatacaggtggaccagaaggttcgtcgcttgtcgttatgtgggtggaatgttaaggcagcagctaagtttaaatttccatgtctccgtactcttgtggctcagggaataatttcattctctcctgacatggtatcctcaattatgtctcaatcaaattatttgacagttcttgagctgcaagattctgagatcactgaggtgccagcatttataggaaatctctttaacctacggtatattgggttaaggcgcaccaaagtcaagtcactcccagagtctattgagaagctcctcaacctccacactctggatatcaaacaaactcaaatagagaaactaccacgagggattgttaaggtcaagaagctaaggcaccttttagctgacaggtttgctgatgagaagcagacggagttcagatatttcatcggagtggaagcacctaaaggtctgttgaacctggaagaactacagactcttgaaacagtgcaagcgagcaaagacttgcctgaacagctgaagaaactgatgcaactcagaagcttatggatcgacaatgtaagcggtgcagattgtgataaccttttcgcgactctttcaaccatgccacttctttccagcctcctaatctccgcaagagatgtgaatgagacactttgcctccaagcccttgctccggaatttccaaagctccacaggctaattgtaaggggccgctgggctgccgagacactggaatatccaatattttgcaaccatgggaaacatctaaaatatttagcgcttagctggtgtcagcttggtgaagatccattgggggtccttgctccgcacgtgccgaacctcacctatttgagcatgaacagggtcagtagtgcaagcactttggttctttctgcagggtgctttcctcacctgaaaacactcgtcctgaagaaaatgcctaacgtcgagcagctggagattggacatggtgctcttccatgcatccaaggtctgtacatcatgtccctagcgcagctggataaggtccctcaaggcatcgaatcgcttctctccctcaagaagctttggcttctgtacctgcacgcggagtttagaacgcagtggctaacgaacgggatgcaccagaagatgcagcatgttcctgagattcgtgtctaggacacaggaaagccagatggttatttctgcagtactatgctggtatatatggtgtgtctgtgaaaaaactattttttgtaccttttcttcccttaagtcctgagttgttgtatgtggacttcacttgcagacacaaacgctcgctttgggtagctcgttagacccatatatatacgtgttgtgttggttcagttgctttaagttacttgtttgttcgaggcatttgccttctgtattgaacttcatgcaaatgatgttatgatcaaacttgtatgtccatgtattttaaatttttttacatgcctcatagaaagtatggattcccatatcatcatttgtctgatcggctaaaaacaatattgtatatgag

SEQ ID NO: 41590 - DNA, 3402 bp, Zea Mays
cccaatcccatctccatgtaatggtcttcttcccttcccatccatcgtccgtgagctccgagcgtgagggcgagaggcgtcgctagctggctctcacggccggcaaatctgcgatcaactgcagactctgctctagcactctgcaggctctgaaactctgcgtctcatggccaagattagttcaccgtatcgatcactgctgacctttcgaccttgaatgcagacgctagctgtcgtgcaagttcgccggattcatcgccccattccgctctgggctaaggttccaccagcacaaccctatggcagaagcagtgctccttgctgtcactaagattggttccgttcttggagatgaacctgccaagaccattataaacaagctgtctgaaaaaattcaagctctgagggaactcccacggaaagtggatcacataaggatgaaactaataataatgagcaaagttatacagcagattggcacagtctaccttacagatgaacttgtgaagagttggattggggaggtccggaaggtggcttaccgtgttgaggatgtagtagacaaatactcataccatcttcttcaactggaggaagaagggtttctgaagaaatttttcgtcaagggtacccattatgccattgttttcagtgaaattgctgatgaggtagctgagatagaagaggagattcagcaagttattcagatgaaggatcagtggttgcagccatcccagcttgtccctcaccctgagcaactcgctgaaatcgaaagacagcgttcccaagacagtttcccagaatttgtcaaagatgaagatctagtaggaattgaagaaaatagaaaattgctgactggatggatttactcagaagagcaggctagcatggtgataacagtttctggtatgggtggactgggaaaatctacactggttacaaacatttatgaacgtgaaaaggtcaacttcccggtacatgcttggattgttgtgtcacaggtctacacagtcgagtctttgttgagaaagctactatggaagattgggcatatgcaaccaccagtgccaagagagattgacaaaatggatgtacatgacttgaaggaggaaataaagagaaagctccagaatagaaaatgcttgattgtgttggatgatgtttgggagcaagaagtatacttcaaaatacatgatgctttccagacactccatggaagccgcatcatcattacaacacgaaaggaccatgttggtgctattgcttcctttgaccaccatcttgagctccaaccgttgtgtgggcctgatgcatttgaacttttctgtagaagggcttttcacaacaagaaggaccacaaatgccccgaggagcttaaggaaattgctggtgaaatagtgaaaaggtgccaaggcctgccactagcaattgttacagtcggcagcttgctgtcatctagaccacaaataaacatttggaatcaaacatacaaccagcttcggagtgagttgtcaaccaatgatcatgtccgagcaatcttaaatctaagctaccatgatctatctggagatctcagaaactgcttcttgtattgcagcttgtttcctgaagactaccccatgtcacgcgaagcccttgtgcggctctgggtcgcagaaggttttgttctgagtaaagaaaagaatacaccagaggaggtggctgagggaaatctcatggaattgatccaccgtaatatgcttgaagttgtagactatgatgagcttggcagggttagcacttgcaagatgcatgatatcatgagggacctggcactttgtgttgccaaagaagagaagtttggttctgcaaacgattatggtgaactgatacaggtggaccagaaggttcgtcgcttgtcgttatgtgggtggaatgttaaggcagcagctaagtttaaatttccatgtctccgtactcttgtggctcagggaataatttcattctctcctgacatggtatcctcaattatgtctcaatcaaattatttgacagttcttgagctgcaagattctgagatcactgaggtgccagcatttataggaaatctctttaacctacggtatattgggttaaggcgcaccaaagtcaagtcactcccagagtctattgagaagctcctcaacctccacactctggatatcaaacaaactcaaatagagaaactaccacgagggattgttaaggtcaagaagctaaggcaccttttagctgacaggtttgctgatgagaagcagacggagttcagatatttcatcggagtggaagcacctaaaggtctgttgaacctggaagaactacagactcttgaaacagtgcaagcgagcaaagacttgcctgaacagctgaagaaactgatgcaactcagaagcttatggatcgacaatgtaagcggtgcagattgtgataaccttttcgcgactctttcaaccatgccacttctttccagcctcctaatctccgcaagagatgtgaatgagacactttgcctccaagcccttgctccggaatttccaaagctccacaggctaattgtaaggggccgctgggctgccgagacactggaatatccaatattttgcaaccatgggaaacatctaaaatatttagcgcttagctggtgtcagcttggtgaagatccattgggggtccttgctccgcacgtgccgaacctcacctatttgagcatgaacagggtcagtagtgcaagcactttggttctttctgcagggtgctttcctcacctgaaaacactcgtcctgaagaaaatgcctaacgtcgagcagctggagattggacatggtgctcttccatgcatccaaggtctgtacatcatgtccctagcgcagctggataaggtccctcaaggcatcgaatcgcttctctccctcaagaagctttggcttctgtacctgcacgcggagtttagaacgcagtggctaacgaacgggatgcaccagaagatgcagcatgttcctgagattcgtgtctaggacacaggaaagccagatggttatttctgcagtactatgctggtatatatggtgtgtctgtgaaaaaactattttttgtaccttttcttcccttaagtcctgagttgttgtatgtggacttcacttgcagacacaaacgctcgctttgggtagctcgttagacccatatatatacgtgttgtgttggttcagttgctttaagttacttgtttgttcgaggcatttgccttctgtattgaacttcatgcaaatgatgttatgatcaaacttgtatgtccatgtattttaaatttttttacatgcctcatagaaagtatggattcccatatcatcatttgtctgatcggctaaaaacaatattgtatatgag

SEQ ID NO: 41591 - DNA, 3191 bp, Zea Mays
acaatcatcggcggaccaaattcaaccgaggttcgccggattcatcgccccattccgctctgggctaaggttccaccagcacaaccctatggcagaagcagtgctccttgctgtcactaagattggttccgttcttggagatgaacctgccaagaccattataaacaagctgtctgaaaaaattcaagctctgagggaactcccacggaaagtggatcacataaggatgaaactaataataatgagcaaagttatacagcagattggcacagtctaccttacagatgaacttgtgaagagttggattggggaggtccggaaggtggcttaccgtgttgaggatgtagtagacaaatactcataccatcttcttcaactggaggaagaagggtttctgaagaaatttttcgtcaagggtacccattatgccattgttttcagtgaaattgctgatgaggtagctgagatagaagaggagattcagcaagttattcagatgaaggatcagtggttgcagccatcccagcttgtccctcaccctgagcaactcgctgaaatcgaaagacagcgttcccaagacagtttcccagaatttgtcaaagatgaagatctagtaggaattgaagaaaatagaaaattgctgactggatggatttactcagaagagcaggctagcatggtgataacagtttctggtatgggtggactgggaaaatctacactggttacaaacatttatgaacgtgaaaaggtcaacttcccggtacatgcttggattgttgtgtcacaggtctacacagtcgagtctttgttgagaaagctactatggaagattgggcatatgcaaccaccagtgccaagagagattgacaaaatggatgtacatgacttgaaggaggaaataaagagaaagctccagaatagaaaatgcttgattgtgttggatgatgtttgggagcaagaagtatacttcaaaatacatgatgctttccagacactccatggaagccgcatcatcattacaacacgaaaggaccatgttggtgctattgcttcctttgaccaccatcttgagctccaaccgttgtgtgggcctgatgcatttgaacttttctgtagaagggcttttcacaacaagaaggaccacaaatgccccgaggagcttaaggaaattgctggtgaaatagtgaaaaggtgccaaggcctgccactagcaattgttacagtcggcagcttgctgtcatctagaccacaaataaacatttggaatcaaacatacaaccagcttcggagtgagttgtcaaccaatgatcatgtccgagcaatcttaaatctaagctaccatgatctatctggagatctcagaaactgcttcttgtattgcagcttgtttcctgaagactaccccatgtcacgcgaagcccttgtgcggctctgggtcgcagaaggttttgttctgagtaaagaaaagaatacaccagaggaggtggctgagggaaatctcatggaattgatccaccgtaatatgcttgaagttgtagactatgatgagcttggcagggttagcacttgcaagatgcatgatatcatgagggacctggcactttgtgttgccaaagaagagaagtttggttctgcaaacgattatggtgaactgatacaggtggaccagaaggttcgtcgcttgtcgttatgtgggtggaatgttaaggcagcagctaagtttaaatttccatgtctccgtactcttgtggctcagggaataatttcattctctcctgacatggtatcctcaattatgtctcaatcaaattatttgacagttcttgagctgcaagattctgagatcactgaggtgccagcatttataggaaatctctttaacctacggtatattgggttaaggcgcaccaaagtcaagtcactcccagagtctattgagaagctcctcaacctccacactctggatatcaaacaaactcaaatagagaaactaccacgagggattgttaaggtcaagaagctaaggcaccttttagctgacaggtttgctgatgagaagcagacggagttcagatatttcatcggagtggaagcacctaaaggtctgttgaacctggaagaactacagactcttgaaacagtgcaagcgagcaaagacttgcctgaacagctgaagaaactgatgcaactcagaagcttatggatcgacaatgtaagcggtgcagattgtgataaccttttcgcgactctttcaaccatgccacttctttccagcctcctaatctccgcaagagatgtgaatgagacactttgcctccaagcccttgctccggaatttccaaagctccacaggctaattgtaaggggccgctgggctgccgagacactggaatatccaatattttgcaaccatgggaaacatctaaaatatttagcgcttagctggtgtcagcttggtgaagatccattgggggtccttgctccgcacgtgccgaacctcacctatttgagcatgaacagggtcagtagtgcaagcactttggttctttctgcagggtgctttcctcacctgaaaacactcgtcctgaagaaaatgcctaacgtcgagcagctggagattggacatggtgctcttccatgcatccaaggtctgtacatcatgtccctagcgcagctggataaggtccctcaaggcatcgaatcgcttctctccctcaagaagctttggcttctgtacctgcacgcggagtttagaacgcagtggctaacgaacgggatgcaccagaagatgcagcatgttcctgagattcgtgtctaggacacaggaaagccagatggttatttctgcagtactatgctggtatatatggtgtgtctgtgaaaaaactattttttgtaccttttcttcccttaagtcctgagttgttgtatgtggacttcacttgcagacacaaacgctcgctttgggtagctcgttagacccatatatatacgtgttgtgttggttcagttgctttaagttacttgtttgttcgaggcatttgccttctgtattgaacttcatgcaaatgatgttatgatcaaacttgtatgtccatgtattttaaatttttttacatgcctcatagaaagtatggattcccatatcatcatttgtctgatcggctaaaaacaatattgtatatgag

SEQ ID NO: 41592 - DNA, 1464 bp, Zea Mays
gccgtctgccagcaggggcactcgccaccagccagatttccgccccaccccctgccaccggacagctgtcgtcgccacctccttgcatccccatggtttcccctgtggaaagagtggatctacctgttaggagctcggatttgtctgatccccaagattttctgttaggggatgaacagagaatggaggtattagaaattgattggggggcaatacaaattgatgatagatgggaggaagaaggagaacaagagactgcctctgagtcattgatgtatgatcggttaggattgttagctgaagatgaacgtgaaactactgaaaggcaagagactgtccgccaaagcgatgaatttaatgatgaattgccctgcactgattgcataccacaagaaagggtatttgagtgcaatagatctaatccagtaatgaagattgggagtttgtacaaggatatgaaagaatttagactggctatcaggcaatatgcaattaataatgagtttgagttagggattgagtcaagctcaccattcagatatcgagcttattgcaaaggaggtgattgtccatggagaatcaatgcaaggctacaaaatgccgggtctcccacagtcgttgttacagttatcgtggataagcacacatgcacttctagtggtcgtcgaaaaacaacaacacccaccagctcatgggttgcttccctagcaatgccattccttacgaagaaaccacatatgggagctaaagaattgcaaaataccttgcaagagcagcacaattggtcttctggcaaccagcactggccatctcccaccagcaaattgacaccagaaattggcactgcttcatttccagtcgccagatacgtcgttgcttgctgttgccagtgctggtcttctggtgttgtccaaaatgaagctggccatctgcaaggaacccaggaactaccagaaactggccatctgcttgatttcagtcgccatctgcaaggaacccagaaactatagctaccagaagaacagcaaaatggcaccagaaattggcactgcttcatttccagtcgccagatacgtgtccaaatgaacagcaaattggcaccagaagaacagcttctttttacagttaccagcttctgtccaaatggccattacacatgtccaaatgacagaaatttgaatggacagaaaatagtaaactggaaacacaagttcaagttaccgagggccatattcagataaccttaatgaaaacagaatggacaacgttacaaaagctatcgagtgccattcaacactcgacagaatggacaacccaggttgacagtacttcactaccaagttcagttaccttacacaaactaactattacacggataccttacacaagctgtcccttacacaaataacacatatagtgccgttaaacaacacccatattactctacttcatctgacgatccga

SEQ ID NO: 41593 - DNA, 3206 bp, Zea Mays
cgttgcgcctagtcgacgaaatgcgacgccgagatcactgggctacgagtacggctgcgcgccggcacagccaagcgcggcagcggcgcttgcgtcgaagggaaatggttacatgataggggagagctggatatgcattgttcgccggattcatcgccccattccgctctgggctaaggttccaccagcacaaccctatggcagaagcagtgctccttgctgtcactaagattggttccgttcttggagatgaacctgccaagaccattataaacaagctgtctgaaaaaattcaagctctgagggaactcccacggaaagtggatcacataaggatgaaactaataataatgagcaaagttatacagcagattggcacagtctaccttacagatgaacttgtgaagagttggattggggaggtccggaaggtggcttaccgtgttgaggatgtagtagacaaatactcataccatcttcttcaactggaggaagaagggtttctgaagaaatttttcgtcaagggtacccattatgccattgttttcagtgaaattgctgatgaggtagctgagatagaagaggagattcagcaagttattcagatgaaggatcagtggttgcagccatcccagcttgtccctcaccctgagcaactcgctgaaatcgaaagacagcgttcccaagacagtttcccagaatttgtcaaagatgaagatctagtaggaattgaagaaaatagaaaattgctgactggatggatttactcagaagagcaggctagcatggtgataacagtttctggtatgggtggactgggaaaatctacactggttacaaacatttatgaacgtgaaaaggtcaacttcccggtacatgcttggattgttgtgtcacaggtctacacagtcgagtctttgttgagaaagctactatggaagattgggcatatgcaaccaccagtgccaagagagattgacaaaatggatgtacatgacttgaaggaggaaataaagagaaagctccagaatagaaaatgcttgattgtgttggatgatgtttgggagcaagaagtatacttcaaaatacatgatgctttccagacactccatggaagccgcatcatcattacaacacgaaaggaccatgttggtgctattgcttcctttgaccaccatcttgagctccaaccgttgtgtgggcctgatgcatttgaacttttctgtagaagggcttttcacaacaagaaggaccacaaatgccccgaggagcttaaggaaattgctggtgaaatagtgaaaaggtgccaaggcctgccactagcaattgttacagtcggcagcttgctgtcatctagaccacaaataaacatttggaatcaaacatacaaccagcttcggacttgtttcctgaagactaccccatgtcacgcgaagcccttgtgcggctctgggtcgcagaaggttttgttctgagtaaagaaaagaatacaccagaggaggtggctgagggaaatctcatggaattgatccaccgtaatatgcttgaagttgtagactatgatgagcttggcagggttagcacttgcaagatgcatgatatcatgagggacctggcactttgtgttgccaaagaagagaagtttggttctgcaaacgattatggtgaactgatacaggtggaccagaaggttcgtcgcttgtcgttatgtgggtggaatgttaaggcagcagctaagtttaaatttccatgtctccgtactcttgtggctcagggaataatttcattctctcctgacatggtatcctcaattatgtctcaatcaaattatttgacagttcttgagctgcaagattctgagatcactgaggtgccagcatttataggaaatctctttaacctacggtatattgggttaaggcgcaccaaagtcaagtcactcccagagtctattgagaagctcctcaacctccacactctggatatcaaacaaactcaaatagagaaactaccacgagggattgttaaggtcaagaagctaaggcaccttttagctgacaggtttgctgatgagaagcagacggagttcagatatttcatcggagtggaagcacctaaaggtctgttgaacctggaagaactacagactcttgaaacagtgcaagcgagcaaagacttgcctgaacagctgaagaaactgatgcaactcagaagcttatggatcgacaatgtaagcggtgcagattgtgataaccttttcgcgactctttcaaccatgccacttctttccagcctcctaatctccgcaagagatgtgaatgagacactttgcctccaagcccttgctccggaatttccaaagctccacaggctaattgtaaggggccgctgggctgccgagacactggaatatccaatattttgcaaccatgggaaacatctaaaatatttagcgcttagctggtgtcagcttggtgaagatccattgggggtccttgctccgcacgtgccgaacctcacctatttgagcatgaacagggtcagtagtgcaagcactttggttctttctgcagggtgctttcctcacctgaaaacactcgtcctgaagaaaatgcctaacgtcgagcagctggagattggacatggtgctcttccatgcatccaaggtctgtacatcatgtccctagcgcagctggataaggtccctcaaggcatcgaatcgcttctctccctcaagaagctttggcttctgtacctgcacgcggagtttagaacgcagtggctaacgaacgggatgcaccagaagatgcagcatgttcctgagattcgtgtctaggacacaggaaagccagatggttatttctgcagtactatgctggtatatatggtgtgtctgtgaaaaaactattttttgtaccttttcttcccttaagtcctgagttgttgtatgtggacttcacttgcagacacaaacgctcgctttgggtagctcgttagacccatatatatacgtgttgtgttggttcagttgctttaagttacttgtttgttcgaggcatttgccttctgtattgaacttcatgcaaatgatgttatgatcaaacttgtatgtccatgtattttaaatttttttacatgcctcatagaaagtatggattcccatatcatcatttgtctgatcggctaaaaacaatattgtatatgag

SEQ ID NO: 41594 - DNA, 396 bp, Zea Mays
gcaagatacaccacgaaactacaatacatgagagcaacagaaaagtacaatagcaattcactggtccaacattctctatatacataaacacatttgcacaccatccatatcttttagaacaaatccagactgggactatgcagtaggaataaataaaccacaggcacaagaaaaatagactgatcaatatgtggccaagaaggaagctttcaggtttcacagtttattattggcacgatggctgcataactgatctttctaatcggttagattggatcgaatagcactgaagaaataagaggaagcaaacagcaccagtcactaatccttgatatcgtaacgataggaaactgacactctagagctcaaaatccccagtggacgacagtacctttt

SEQ ID NO: 41595 - DNA, 2183 bp, Zea Mays
cgggctctcgatggggcaatgggtgtctcacgatggcggcctcaggggtaggatcgcaggtgctgacgcagcatcttccaccaaaaagctctggaacatgcttcttgccctagggaacattgcctttgcctatacttttgctgaagtgctgattgggatccaggacacactcaagtcactgccaccagagaacaggacgatgaaaaagacagcaatgtatgggattggagccactaccatcttctacatctctgttggctgcgttgagtatgctgcatttggttcaaatgctctaggtaacatcttgacggcaagcaggtttggtcccttctggctcgtcgacattgccaacatgtgcctcaacctccacctgattggtgcataccaggccagcacatctcagttggtatacgctcagcttatctttgcttcgattgagaggtgggcttcctctagatggtcggtagccaagttcatcagcagcgcatacactgtcagcatccccctcatgcagagaggattggtgaatgtggggccttacaagctcgtcctaaaaaggctgatttttttgccttggattaagcttatcgttgatcattttcagatttgggaatctggtctgaaccgcattgttatattatatactaatagttgataatgatttatttaagctgtgacctgctggagggtcttgttcttcagcctggtattccagataggcatatttggaaattcaatgcttctggggactactcttctagttctgcctacaaagctcttctccttggagcggttgattttggcccggctgagcggatttggaagtcttgggctccgggtaaatgcaaattttttctgtggctcgtggaacataatagatgctggacagctgacaggttggctttgagggggctggatcaccccatctgctgtccgctctgtgaccaggccgatgagacaattaatcatttgctggtcgagtgcagttttgcaaagcagttttggtttcttctccttcggtcgggggacttccaggtgctctgtccttctacaggggatagctgttttgactcttggtgggagaagagtgctgagatggtgggcaagcctttgtcgaaggggttcaactcgctggtcattctgggtgcgtggtccatttggaagcatagaaataggtgtgtgtttgatggctgtagcccgagtgttgtgatcgccctctcggctgcaagggaagagatgttgtgctggcgtttggctggcgctaaagctctctcttctttccatctagaggagttgctttaagagtggtgtatttggtggtgtgtgtctgttagtctgttgttcgtgttttttggggtttcaccccttttctcttcttaatacaaaaatacgcagatctcctgcgtattcaagaaaaaaaaatgatttatttaagcccctttgtcccatgattcctatatataactttatagagtttagaatgattcgtggtcaaagcttccctgtggtccacaacaattagctagagtgagctttttgaactgctgatttcatttattttagcaatctctatttctatttaaatggtaaaaaataagctaaaagtatgcaaaaaaataggggtttgaacaatggttgttggtttttggttatacattcacatcaatctagctaactaaacatacatatttttgtgttttatactctacacacaatcataatgtagatattttgtaaaaaataaaggaaaaataaaaactggaatgtatttgaacaactatcaaatttaaacaaggtctaactatgtggtatatatagaaaccgtagcaacgcatgagcacctcactagtgggcatttaaatggcacttattacattcatagttcaaaagcaaatcattcatgagcagagaaataaaataaaaaatagacacacatctgttctggtttactctcctatctgctacaattctttgtaaagtacactttcatattccaactttgcctttcttggaaccactgggtgaattgataatttcactatcattttggaacgtgggtgatggaggaaaaaaaggtgtttgtcaatgagatgttatatttactgcagacccatgcaggaaaatagattcgaggaagcaatgcagatgaacattcttgtggttaaacatacctcttttttaaa

SEQ ID NO: 41596 - DNA, 588 bp, Zea Mays
ctttactgcggaagaatagaaatagcatttcatacctttgttttggtccttggatctctccgcagctttcctcttccaacctcaagcttttactggagttcgcagtgctgctgcagcagcagcacacgcagcttcgtagcatcaggccagggcgtgggactcggaagagacgccaccatcggaggagctctctcctcgctgaacatcatttgacagtccctcgaggcatcaaatccttgagctccttgaaaaagctctggcttctgggtctccacagtaacttcaaggctcgatgggacatggagggaatgcagaaggatctacagcatgttctggagatacgtacctaacagcagaagctttgtttttgtgtttgtcaaacgtgattgctctttctgtagtaaaagtgtcctagaatgcaactgtatccacttcaaaatccatcaagtttgcagttagacattagggattggtgcatttgtggatcatttgtcagatgattgtttccgaaataataattccgaaaacatggtttactatctttgccatcagtatgcaatctagacttgccaaagtcgatgttcttta

SEQ ID NO: 41597 - DNA, 5879 bp, Zea Mays
gtcgacttctttaaattgagtgtcatgccagcttagcccatccatcgcgaacccagtccaccgcgcactactctgtttcgtccatcagagcgtgagttcacaggagttccctgaaatcggtcgtcagcgccaccgtgataccctccgccgtggccagagctgttcagtagatcagccagaatagatcatcgtcattactgaacaccgccggaaccagccttcacgtcgactagctcttctgcgcttcctccgttcaacttcgcgcgagtactgcaactctggtgagccaatgctgcttttcaagtcggtgaattaaacgctaccgcatggagccgctaggaacaagctcgccggagctttagctccgccgttgtcgtgaacaaacatggattttgggcagaccagtcaaattagcttcggtattatgcttgggattgtctctggaatggtgttcgggtacccgctatcattggttgtggtcactggctatgagtcccgcgaccggagccaggtgttcgaccggggtcagtgcgggggtgctgttttgatttttgaccaacttattaaaagcaatgctcagccttaaccattccttttggccttacatttcacatgagccctcaccataagtgagctcatacacattattccccaaaacttgttaagcgatgaacatatgtgagctcactcttgatatactcacaccgaggtcaagaataggtacgataagatgaggagcagaaaggataatacgatgagtttgtgagaggtctaggtcatcgtctcccagtcaactatggttgctgaggatcgttgtcgtcatatgatgtaattatttagctattttgtacagaacttctattatatgataaagatatgacattgatttctataccatgagtcatcatatgtgtgagacttgatcccaacacacatttgagatgtgcccgggtttgctcttaaatctggacgtgacaaccatacttacttctcccagtgctaagataagcaataggactaaagagatacatatgtagaaactccaatggtcttgatgtagtcatgacatttttaggtgatgtcctcctccaacctgcttccctacttggcaagctacacaaggtctatctttcgcaaaacatgcattcattagtcctaaaacatgctcaccattaagaagattatgaaggttcttcatcccgacatgtgctaggatacgatgccatagccaacccatgttggtctttgcaagtaaacatgcatcaagtttggtgatatcgttcgaaaaatctactatataaagttttccattaagtacacctttaaatgcaacataaccatcacttcttctaaagacttgtcacatcaacatcagtaaataaacagttatagccaatggaacaaagttgactgacaaatagcaggttctaatcaagagagtctaccaggaagacattagaaatagaatgttcggttgtgattgcaatcttacccaacccctttacccttgccttgattctcgtctccaaatatgattgcattctaggaatctttgtttttgacgtaggaagaaaacatccgattctcccctatcatgtgatttgtgcatccactatcgataacccagcttgagcccccggatgcataaacctgtaaaaaaaattaggttaggagtttaggtacccaactagagttgggtcctgtcagcttagtcatataagattttggcacccaaacgcaagtcttaccacccttgcgcttgggtcccacatgagatgcaactactttgcctaatttaaaatagattacataagaagcatcaaaagtgcggtatgaaatcgaaggaccatgagatgcattcctagccttatgcacatgaataaatctcgcatgaggaacattttacctaggtctactcctaccatgagcaaaagataaactagaagaagcaatcatggcatgaggagtataaacaccattatgatcaatacaagcattgcgaacattcttaacattagtgtaaataaaagaatgattcttgcaaacatgagaagaatgagcactactagccataggcacttccccttttccttgataaacatggggacctcatggctctttttgtctttagctcccttttggaagccaaaaccatccttaatggagggatgtctaccaacgatgtatgctttcctagcaaatataactttctctatgtcatctttgcaagttttaagttgagcatttaaatgggcaacatcaacattcaacttagcaatgataaatacatgatcattacaggcattaacaccaaaatctttgtatctagtgcaaattgatacatgctcaagagatgaactagcaacatggcattcattcaatttatctagcctatcattcaaatcatcatttgcaatcttaagactagaaatagatgaatgacaagaagatagctcagcagataacaactcattcttcttaatttctaaagcaagggatttttctacatcaactaatttaccatgctcctcaaaaagtaaattctcttggttttctatcaatctatccttttcatttaaagcatcaattacttcattgattttagtatttttttgttctacataagcccttaaatagattgatataatcaatatcatcatccctagaatgagtatacttgggtgtatctctagaatataccttcttctccttagccatgagacaaatgtgatgctcattggggacaagagccaatttgttaaaagcagaggcggcgtgtccctcatcgtcggagtcgaaggaggagccgtctgagttccacaccttgccaatgtgtgcctcgcccttcttcttcttgtagaatttcttcttttctactttcttccccttggcgttctcgtcatcatcctagtcattctcattatcaggacaattagctataaaatgaccattcttcccgcatttgaagcaggcatgctttccccttgatttgcccttgttggagaagtccttgcaccccttgagtgtgttctttaagcgtttgatgacaagcaccatttcctcatcattgaggttggttgtttgtcatcaaatgtccccataatactcataattaacgttcaaacacttaactgacatgaattaaactttagatagagaaccaaacaaccttagggttgatttggtaaaaaaggaattggataggaaccattcctctccatgattcctatcctattcctttgttactaaactaactcttaagagctagtttgaaaactcaaacctacctataattaggattagaggtaattaaggtgttcctcctatttcaaacttaccctaagaccatctccaagagtagaggcaaccgtagatccatttttaaaaatacctcccctgtgttgaaatagcaggctccaacagatgagctatttttggcacgcccaacgtatctatctgctcctccaacaaaaacatggttctctacctccttgacgcatctcgttcgcaccaactgacttcgtacttccatgtgctcggggaaggtgtggacgacagcgcaggcgactcgacaacacaggcgcagcaacgtggcggcgcacgacaaggcagaatggcaacgcagggcgtacgacacgttgtaggcgcatggcaaagcaacgtgagttgcaggcgcggcgacttgacggcgcagggcggagcaacgccacacgcagcgacggggcgcgcgaggcacgacgacacgacagcgtgaggcacatcgtcctctccaatcttctattgtgcaggtctgtttgaggtacattgctatagtaagatgcaaccaaactgaaagatgcatgatttactaggaacttgagaaagaacggaggaaaagccaatagcatcaaaaccattagaaagttcagacttaagtattattcttttgttcttaataaattcggtcaagaaacactagggagtcgtcggagtaaacaaagcagactgaagaaatctatgagaaaaaggaatagatgcccaacacattgaagaacagattagaagcctattcggcagcactattccaattgcaactgcacttagtactatgacgacagagcatctgtgaagggagcacgactacaacaacaactaaagtagcggaatcaatcaaggaccaggttgatttagtaatgtgaagggattattatctcgtccaccgatgaactgcgtttggaagtaaatggcggcggcgggagtggaactcgctagagaacgatctgcgtttggaagtaaatggcgggagcaaaattcgctggagggcaaactgcatttggaagtaactgtccttataatgcctatgttggattgggttgactgttagagtaattatatatatatatatatagggcaggtataacgggagccctgggcttcggatattaaaggaagcccaggtcggttccgaggtctggtcgctgggacaggcacgcctgtgtttaacgtggggctgagaggcggcatgcaggacagacggcgccgttacgcggttgtttgaatggcaaggcggtaaacataagggaatggcgcagaattaaagggaatagtttccacatgcaaacgttattactatgatatgtggacgcgtaatttatggatcttgcatgggaagtaatgcgcggaaggtaaaaaaatgtagcataagatggtgaaagctatggcataaaaccgaaacgacataatagttgcataaatagtatataccgtttggcgtaaaacgttgagtcattgtgcgtaaatattttattatggattttagtttgacattgacatcgccataatatcgggacggtttcggaaataattgggagaccctgtaaacgtggatgcagttacttttatagtatccgagattaactttcattcgaaaaaaaagaccactaagcctgcataactaatcggagttggagatggccggctctggagagtcgtcggtgatggaaggatatggcgttcgtcttgatccagagacagagggaggagttggtggttactcactggtgacaccacctcctgctctactgggtcctgagatcgccgagatgagcataggggaagaaggagaacaaagggttcgacctcctatgtccaatattagctccagggagatggatacgccacaaatactgcattcacatgcaaaaaacattgatccaactatagtgccaacggtagggatgactttcaaggatgttgatgatgcatataaattctataaaaggtatgcatatgaagttggatttccactgaagaaatacagagagaagacattcagtaagtggataaattgttcacgtgaaggtaaaagtgcactaaaatcaaatgatacacctaggatgaggaataggtcatcggggcgtacacaatgtaaagctggaataaaattaaaaaaaatatatgatgatgaaaaaaatggttgtagctgcaaaaattgaactcgtaaacttggagcataatcatgagttcataactgacgaagcagagaaacaacatttacgttgcaacaaaattagggatgctgagttcataaattttgtggatgcaatgcatgatagccgagtgccgcagcattgcatagttgattttatatcagaaatgcatgatgggccggagaacgtaccggtaactgctcgatctgaaaaacatgtaagcaatacttttttgttacatgtgtatatattaagagccataaatattactatagtaaatgtgtgtgtaataattttttgtgcaaacaaatgtaggagggcagccaggagaagagaaaactgcgcaaatgatgtagccaaacttttggctttctttagagaatgcaagaaacaaaatccacaatttttttg

SEQ ID NO: 41598 - DNA, 2397 bp, Zea Mays
cgcgcactactctgtttcgtccatcagagcgtgagttcacaggagttccctgaaatcggtcgtcagcgccaccgtgataccctccgccgtggccagagctgttcaggtcagttcatgctcctctggtccatgttttagcatcttctggtgctagtgaagctcattgagcttcccgattgaactctaccatagtagatcagccagaatagatcatcgtcattactgaacaccgccggaaccagccttcacgtcgactagctcttctgcgcttcctccgttcaacttcgcgcgagtactgcaactctggtgtggacgacagcgcaggcgactcgacaacacaggcgcagcaacgtggcggcgcacgacaaggcagaatggcaacgcagggcgtacgacacgttgtaggcgcatggcaaagcaacgtgagttgcaggcgcggcgacttgacggcgcagggcggagcaacgccacacgcagcgacggggcgcgcgaggcacgacgacacgacagcgtgaggcacatcgtcctctccaatcttctattgtgcaggtctgtttgaggtacattgctatagtaagatgcaaccaaactgaaagatgcatgatttactaggaacttgagaaagaacggaggaaaagccaatagcatcaaaaccattagaaagttcagacttaagtattattcttttgttcttaataaattcggtcaagaaacactagggagtcgtcggagtaaacaaagcagactgaagaaatctatgagaaaaaggaatagatgcccaacacattgaagaacagattagaagcctattcggcagcactattccaattgcaactgcacttagtactatgacgacagagcatctgtgaagggagcacgactacaacaacaactaaagtagcggaatcaatcaaggaccaggttgatttagtaatgtgaagggattattatctcgtccaccgatgaactgcgtttggaagtaaatggcggcggcgggagtggaactcgctagagaacgatctgcgtttggaagtaaatggcgggagcaaaattcgctggagggcaaactgcatttggaagtaactgtccttataatgcctatgttggattgggttgactgttagagtaattatatatatatatatatagggcaggtataacgggagccctgggcttcggatattaaaggaagcccaggtcggttccgaggtctggtcgctgggacaggcacgcctgtgtttaacgtggggctgagaggcggcatgcaggacagacggcgccgttacgcggttgtttgaatggcaaggcggtaaacataagggaatggcgcagaattaaagggaatagtttccacatgcaaacgttattactatgatatgtggacgcgtaatttatggatcttgcatgggaagtaatgcgcggaaggtaaaaaaatgtagcataagatggtgaaagctatggcataaaaccgaaacgacataatagttgcataaatagtatataccgtttggcgtaaaacgttgagtcattgtgcgtaaatattttattatggattttagtttgacattgacatcgccataatatcgggacggtttcggaaataattgggagaccctgtaaacgtggatgcagttacttttatagtatccgagattaactttcattcgaaaaaaaagaccactaagcctgcataactaatcggagttggagatggccggctctggagagtcgtcggtgatggaaggatatggcgttcgtcttgatccagagacagagggaggagttggtggttactcactggtgacaccacctcctgctctactgggtcctgagatcgccgagatgagcataggggaagaaggagaacaaagggttcgacctcctatgtccaatattagctccagggagatggatacgccacaaatactgcattcacatgcaaaaaacattgatccaactatagtgccaacggtagggatgactttcaaggatgttgatgatgcatataaattctataaaaggtatgcatatgaagttggatttccactgaagaaatacagagagaagacattcagtaagtggataaattgttcacgtgaagctgcaaaaattgaactcgtaaacttggagcataatcatgagttcataactgacgaagcagagaaacaacatttacgttgcaacaaaattagggatgctgagttcataaattttgtggatgcaatgcatgatagccgagtgccgcagcattgcatagttgattttatatcagaaatgcatgatgggccggagaacgtaccggagggcagccaggagaagagaaaactgcgcaaatgatgtagccaaacttttggctttctttagagaatgcaagaaacaaaatccacaatttttttg

SEQ ID NO: 41599 - DNA, 2719 bp, Zea Mays
aaaaattcgggtcaacggttcacacggtcataattggaagagttcgagttgcttgattgcttctgcggatgcgcttcccccatcctcacccaaaacctaccggcaaaacctacagcccttcgtctcccacacgcactctgccactcatctctaggttgtgtacgatcatcagcgagaggagctccctcgcttatttgtctctgaaacagacatcattgcttcagttagggaatgaagggagattccagcagacaaaatagcttagaggacaactcacaaatactaagtgcatttccaagggaaccaaagctagaattcctaaaaaacatcacgaaagacttctcaagtgaacgagtgattggacatggtgtctttggagtggtttataagggcatacttcagaatggacaactggttgctgtgaagaagcttgtgcaaacatccggagttcatgatagacggtttcagaatgaggcaggcaatctccagtttctggagcacagaaatatagtcaagttacttggttcttgttaccaagtagaaaagaaattggtggagagaaacaacaaacattttctatcagatgttccagaaaagtttctatgctatgaatatctgtctaatggaagccttgacaactatatttacgatgaatcttctggaattgattggaccatgcgcttcaaaataatcttggggatatgcaatgggttacattttctgcatgaggagcgaagtgaagccatagttcatttgaaccttaaacctagcaacataatgttgggtgacgacatggtgccgaaaattgcagattttgggctttcaaggttgtttggtgaagaacaaaccagaactctcaccaaaaacgttgtgggatggataggatacattgccccggaataccattacagaggagaaatatcagttaagtcagacatattcagtttgggtgttcttattcttgaaatagtgacaggactgaagagggacctcaatattcaagacatttcttctgagttactaattgacaatgtatctaaaaattggacagaaatgtcgcatatagaatcaaagtatccatccttggaagaacaacacctactacaagtaaaaagatgcattgaacttggtttgaactgtgtggagtctgatccaaagaaaaggcctactgtaggatcaataattggtaaactcaaagaaatcagtcatgaagctagcatacacaaatttatggagaagaaactgcaactgataactgaattcccaagggaaccaaagctacacttcatagaggttatcacaggggactttgccaatgaacgtgagattggtaaaggttcttttggggtagtttataagggagtgcttcaaaatggagaagtggttgcggtcaaaaggcttttggtagttgcaaaaactaatctggataagcaatatctgaatgaagtatctagtctgattgatctcaaccatagaaatatagtgaagctatttgggtattgtaatgaaatacaacggaaactggtggagtcccatggaacatatgtttttgcagacacagaagaaaggatactctgctatgaatatttgcctaggggaagccttgacaagtatctttacggtgcatctcatgagcttaactggaatatcagcttcaaaataatacaaggaatttgtcatggtttacagttcttacatgaatcgcaaagacccataattcacatggatctcaaacctggcaatatattgttggatgataacttaatgcccaaaattgccgattttggtttatcaaggctctttggcgaagagcaaacacgtgcactcacttcaaatgttgtgggatcaagagggtacatggctccagaatattactacagaggtgaagtctcaaccaaatcagatatatacagtctgggcatccttataatcgagatagtaacagggttaaaagtcgattctaacactgtagacttatcgtctaagaaccttatcgacaatgtacaaaggatttggacaaaaatgccgcagatagcttctaagtacccgacgttggaagcaagcaacctccaacaagttaaaagatgcattgatgctgggttaaattgtgtgagcgaaaaaccaagagaaaggccatccgcaggggaaattatcaagcagcttaacggaagcagctttccatctcgcaactagatgcttagggcctttggtctttttctagtttctgaccactaaaagctgatgcggaccgtcaatcgccttggcttttcaatcaccttttatgagaatcgtttcagtaaaaaccatctaaaattaacataaacacataaccgattaagtcgtcacaatagtaggaatatgtcactttctagattatgaactctttggaccacttcattttcttccatacgtgatctctacgatacttagattctcttcacaaccagattctttctgcagccagattctcaaaaaagctggtcagaaaaaaatgaaccaaataggccttagatcttgatctaaatcaaattcttagggcaaattttgtaaccctatttttctaatagatttctattttactaaggcttcgtttgtttcgttggaattgaattccattctaatgatcataatttagacacaaactaattgaattaaaatatttgtatatgtaatatatttgtatagtatcttaaatcatatgagagatagttatatacta

SEQ ID NO: 41600 - DNA, 2572 bp, Zea Mays
cgggtcaacggttcacacggtcataattggaagagttcgagttgcttgattgcttctgcggatgcgcttcccccatcctcacccaaaacctaccggcaaaacctacagcccttcgtctcccacacgcactctgccactcatctctaggttgtgtacgatcatcagcgagaggagctccctcgcttatttgtctctgaaacagacatcattgcttcaggtattctccagttagggaatgaagggagattccagcagacaaaatagcttagaggacaactcacaaatactaagtgcatttccaagggaaccaaagctagaattcctaaaaaacatcacgaaagacttctcaagtgaacgagtgattggacatggtgtctttggagtggtttataagggcatacttcagaatggacaactggttgctgtgaagaagcttgtgcaaacatccggagttcatgatagacggtttcagaatgaggcaggcaatctccagtttctggagcacagaaatatagtcaagttacttggttcttgttaccaagtagaaaagaaattggtggagagaaacaacaaacattttctatcagatgttccagaaaagtttctatgctatgaatatctgtctaatggaagccttgacaactatatttacgatgaatcttctggaattgattggaccatgcgcttcaaaataatcttggggatatgcaatgggttacattttctgcatgaggagcgaagtgaagccatagttcatttgaaccttaaacctagcaacataatgttgggtgacgacatggtgccgaaaattgcagattttgggctttcaaggttgtttggtgaagaacaaaccagaactctcaccaaaaacgttgtgggatggataggatacattgccccggaataccattacagaggagaaatatcagttaagtcagacatattcagtttgggtgttcttattcttgaaatagtgacaggactgaagagggacctcaatattcaagacatttcttctgagttactaattgacaatgtatctaaaaattggacagaaatgtcgcatatagaatcaaagtatccatccttggaagaacaacacctactacaagtaaaaagatgcattgaacttggtttgaactgtgtggagtctgatccaaagaaaaggcctactgtaggatcaataattggtaaactcaaagaaatcagtcatgaagctagcatacacaaatttatggagaagaaactgcaactgataactgaattcccaagggaaccaaagctacacttcatagaggttatcacaggggactttgccaatgaacgtgagattggtaaaggttcttttggggtagtttataagggagtgcttcaaaatggagaagtggttgcggtcaaaaggcttttggtagttgcaaaaactaatctggataagcaatatctgaatgaagtatctagtctgattgatctcaaccatagaaatatagtgaagctatttgggtattgtaatgaaatacaacggaaactggtggagtcccatggaacatatgtttttgcagacacagaagaaaggatactctgctatgaatatttgcctaggggaagccttgacaagtatctttacggtgcatctcatgagcttaactggaatatcagcttcaaaataatacaaggaatttgtcatggtttacagttcttacatgaatcgcaaagacccataattcacatggatctcaaacctggcaatatattgttggatgataacttaatgcccaaaattgccgattttggtttatcaaggctctttggcgaagagcaaacacgtgcactcacttcaaatgttgtgggatcaaggtacaaaggatttggacaaaaatgccgcagatagcttctaagtacccgacgttggaagcaagcaacctccaacaagttaaaagatgcattgatgctgggttaaattgtgtgagcgaaaaaccaagagaaaggccatccgcaggggaaattatcaagcagcttaacggaagcagctttccatctcgcaactagatgcttagggcctttggtctttttctagtttctgaccactaaaagctgatgcggaccgtcaatcgccttggcttttcaatcaccttttatgagaatcgtttcagtaaaaaccatctaaaattaacataaacacataaccgattaagtcgtcacaatagtaggaatatgtcactttctagattatgaactctttggaccacttcattttcttccatacgtgatctctacgatacttagattctcttcacaaccagattctttctgcagccagattctcaaaaaagctggtcagaaaaaaatgaaccaaataggccttagatcttgatctaaatcaaattcttagggcaaattttgtaaccctatttttctaatagatttctattttactaaggcttcgtttgtttcgttggaattgaattccattctaatgatcataatttagacacaaactaattgaattaaaatatttgtatatgtaatatatttgtatagtatcttaaatcatatgagagatagttatatacta

SEQ ID NO: 41601 - DNA, 2723 bp, Zea Mays
cgggtcaacggttcacacggtcataattggaagagttcgagttgcttgattgcttctgcggatgcgcttcccccatcctcacccaaaacctaccggcaaaacctacagcccttcgtctcccacacgcactctgccactcatctctaggttgtgtacgatcatcagcgagaggagctccctcgcttatttgtctctgaaacagacatcattgcttcaggtattctccagttagggaatgaagggagattccagcagacaaaatagcttagaggacaactcacaaatactaagtgcatttccaagggaaccaaagctagaattcctaaaaaacatcacgaaagacttctcaagtgaacgagtgattggacatggtgtctttggagtggtttataagggcatacttcagaatggacaactggttgctgtgaagaagcttgtgcaaacatccggagttcatgatagacggtttcagaatgaggcaggcaatctccagtttctggagcacagaaatatagtcaagttacttggttcttgttaccaagtagaaaagaaattggtggagagaaacaacaaacattttctatcagatgttccagaaaagtttctatgctatgaatatctgtctaatggaagccttgacaactatatttacgatgaatcttctggaattgattggaccatgcgcttcaaaataatcttggggatatgcaatgggttacattttctgcatgaggagcgaagtgaagccatagttcatttgaaccttaaacctagcaacataatgttgggtgacgacatggtgccgaaaattgcagattttgggctttcaaggttgtttggtgaagaacaaaccagaactctcaccaaaaacgttgtgggatggataggatacattgccccggaataccattacagaggagaaatatcagttaagtcagacatattcagtttgggtgttcttattcttgaaatagtgacaggactgaagagggacctcaatattcaagacatttcttctgagttactaattgacaatgtatctaaaaattggacagaaatgtcgcatatagaatcaaagtatccatccttggaagaacaacacctactacaagtaaaaagatgcattgaacttggtttgaactgtgtggagtctgatccaaagaaaaggcctactgtaggatcaataattggtaaactcaaagaaatcagtcatgaagctagcatacacaaatttatggagaagaaactgcaactgataactgaattcccaagggaaccaaagctacacttcatagaggttatcacaggggactttgccaatgaacgtgagattggtaaaggttcttttggggtagtttataagggagtgcttcaaaatggagaagtggttgcggtcaaaaggcttttggtagttgcaaaaactaatctggataagcaatatctgaatgaagtatctagtctgattgatctcaaccatagaaatatagtgaagctatttgggtattgtaatgaaatacaacggaaactggtggagtcccatggaacatatgtttttgcagacacagaagaaaggatactctgctatgaatatttgcctaggggaagccttgacaagtatctttacggtgcatctcatgagcttaactggaatatcagcttcaaaataatacaaggaatttgtcatggtttacagttcttacatgaatcgcaaagacccataattcacatggatctcaaacctggcaatatattgttggatgataacttaatgcccaaaattgccgattttggtttatcaaggctctttggcgaagagcaaacacgtgcactcacttcaaatgttgtgggatcaagagggtacatggctccagaatattactacagaggtgaagtctcaaccaaatcagatatatacagtctgggcatccttataatcgagatagtaacagggttaaaagtcgattctaacactgtagacttatcgtctaagaaccttatcgacaatgtacaaaggatttggacaaaaatgccgcagatagcttctaagtacccgacgttggaagcaagcaacctccaacaagttaaaagatgcattgatgctgggttaaattgtgtgagcgaaaaaccaagagaaaggccatccgcaggggaaattatcaagcagcttaacggaagcagctttccatctcgcaactagatgcttagggcctttggtctttttctagtttctgaccactaaaagctgatgcggaccgtcaatcgccttggcttttcaatcaccttttatgagaatcgtttcagtaaaaaccatctaaaattaacataaacacataaccgattaagtcgtcacaatagtaggaatatgtcactttctagattatgaactctttggaccacttcattttcttccatacgtgatctctacgatacttagattctcttcacaaccagattctttctgcagccagattctcaaaaaagctggtcagaaaaaaatgaaccaaataggccttagatcttgatctaaatcaaattcttagggcaaattttgtaaccctatttttctaatagatttctattttactaaggcttcgtttgtttcgttggaattgaattccattctaatgatcataatttagacacaaactaattgaattaaaatatttgtatatgtaatatatttgtatagtatcttaaatcatatgagagatagttatatacta

SEQ ID NO: 41602 - DNA, 2708 bp, Zea Mays
cgggtcaacggttcacacggtcataattggaagagttcgagttgcttgattgcttctgcggatgcgcttcccccatcctcacccaaaacctaccggcaaaacctacagcccttcgtctcccacacgcactctgccactcatctctaggttgtgtacgatcatcagcgagaggagctccctcgcttatttgtctctgaaacagacatcattgcttcagggaatgaagggagattccagcagacaaaatagcttagaggacaactcacaaatactaagtgcatttccaagggaaccaaagctagaattcctaaaaaacatcacgaaagacttctcaagtgaacgagtgattggacatggtgtctttggagtggtttataagggcatacttcagaatggacaactggttgctgtgaagaagcttgtgcaaacatccggagttcatgatagacggtttcagaatgaggcaggcaatctccagtttctggagcacagaaatatagtcaagttacttggttcttgttaccaagtagaaaagaaattggtggagagaaacaacaaacattttctatcagatgttccagaaaagtttctatgctatgaatatctgtctaatggaagccttgacaactatatttacgatgaatcttctggaattgattggaccatgcgcttcaaaataatcttggggatatgcaatgggttacattttctgcatgaggagcgaagtgaagccatagttcatttgaaccttaaacctagcaacataatgttgggtgacgacatggtgccgaaaattgcagattttgggctttcaaggttgtttggtgaagaacaaaccagaactctcaccaaaaacgttgtgggatggataggatacattgccccggaataccattacagaggagaaatatcagttaagtcagacatattcagtttgggtgttcttattcttgaaatagtgacaggactgaagagggacctcaatattcaagacatttcttctgagttactaattgacaatgtatctaaaaattggacagaaatgtcgcatatagaatcaaagtatccatccttggaagaacaacacctactacaagtaaaaagatgcattgaacttggtttgaactgtgtggagtctgatccaaagaaaaggcctactgtaggatcaataattggtaaactcaaagaaatcagtcatgaagctagcatacacaaatttatggagaagaaactgcaactgataactgaattcccaagggaaccaaagctacacttcatagaggttatcacaggggactttgccaatgaacgtgagattggtaaaggttcttttggggtagtttataagggagtgcttcaaaatggagaagtggttgcggtcaaaaggcttttggtagttgcaaaaactaatctggataagcaatatctgaatgaagtatctagtctgattgatctcaaccatagaaatatagtgaagctatttgggtattgtaatgaaatacaacggaaactggtggagtcccatggaacatatgtttttgcagacacagaagaaaggatactctgctatgaatatttgcctaggggaagccttgacaagtatctttacggtgcatctcatgagcttaactggaatatcagcttcaaaataatacaaggaatttgtcatggtttacagttcttacatgaatcgcaaagacccataattcacatggatctcaaacctggcaatatattgttggatgataacttaatgcccaaaattgccgattttggtttatcaaggctctttggcgaagagcaaacacgtgcactcacttcaaatgttgtgggatcaagagggtacatggctccagaatattactacagaggtgaagtctcaaccaaatcagatatatacagtctgggcatccttataatcgagatagtaacagggttaaaagtcgattctaacactgtagacttatcgtctaagaaccttatcgacaatgtacaaaggatttggacaaaaatgccgcagatagcttctaagtacccgacgttggaagcaagcaacctccaacaagttaaaagatgcattgatgctgggttaaattgtgtgagcgaaaaaccaagagaaaggccatccgcaggggaaattatcaagcagcttaacggaagcagctttccatctcgcaactagatgcttagggcctttggtctttttctagtttctgaccactaaaagctgatgcggaccgtcaatcgccttggcttttcaatcaccttttatgagaatcgtttcagtaaaaaccatctaaaattaacataaacacataaccgattaagtcgtcacaatagtaggaatatgtcactttctagattatgaactctttggaccacttcattttcttccatacgtgatctctacgatacttagattctcttcacaaccagattctttctgcagccagattctcaaaaaagctggtcagaaaaaaatgaaccaaataggccttagatcttgatctaaatcaaattcttagggcaaattttgtaaccctatttttctaatagatttctattttactaaggcttcgtttgtttcgttggaattgaattccattctaatgatcataatttagacacaaactaattgaattaaaatatttgtatatgtaatatatttgtatagtatcttaaatcatatgagagatagttatatacta

SEQ ID NO: 41603 - DNA, 1223 bp, Zea Mays
atggatctagggttagaggatcggaggaaggaggagtcggcgggtcagggaggcgcgctgacagagaggcgcgcggcggcgcgggacagggaggcgcaaggcggcggcgggggcagggagtcttggatctgtgcgcgaggcggcgacgggggacacgaagtcttggatgaatcttctggaattgattggaccatgcgcttcaaaataatcttggggatatgcaatgggttacattttctgcatgaggagcgaagtgaagccatagttcatttgaaccttaaacctagcaacataatgttgggtgacgacatggtgccgaaaattgcagattttgggctttcaaggttgtttggtgaagaacaaaccagaactctcaccaaaaacgttgtgggatggataggatacattgccccggaataccattacagaggagaaatatcagttaagtcagacatattcagtttgggtgttcttattcttgaaatagtgacaggactgaagagggacctcaatattcaagacatttcttctgagttactaattgacaatgtatctaaaaattggacagaaatgtcgcatatagaatcaaagtatccatccttggaagaacaacacctactacaagtaaaaagatgcattgaacttggtttgaactgtgtggagtctgatccaaagaaaaggcctactgtaggatcaataattggtaaactcaaagaaatcagtcatgaagctagcatacacaaatttatggagaagaaactgcaactgataactgaattcccaagggaaccaaagctacacttcatagaggttatcacaggggactttgccaatgaacgtgagattggtaaaggttcttttggggtagtttataagggagtgcttcaaaatggagaagtggttgcggtcaaaaggcttttggtagttgcaaaaactaatctggataagcaatatctgaatgaagtatctagtctgattgatctcaaccatagaaatatagtgaagctatttgggtattgtaatgaaatacaacggaaactggtggagtcccatggaacatatgtttttgcagacacagaagaaaggatactctgctatgaatatttgcctaggggaagccttgacaagtatctttacggatcgcaaaacaggggatgtgattgggactgaccgtcgccgtaaatcttcacctcgcctctacatcttggacactttgcgtcttc

SEQ ID NO: 41604 - DNA, 1122 bp, Zea Mays
gtatggatcaccaagggaaaaaaggtgcatctcatgagcttaactggaatatcagcttcaaaataatacaaggaatttgtcatggtttacagttcttacatgaatcgcaaagacccataattcacatggatctcaaacctggcaatatattgttggatgataacttaatgcccaaaattgccgattttggtttatcaaggctctttggcgaagagcaaacacgtgcactcacttcaaatgttgtgggatcaagagggtacatggctccagaatattactacagaggtgaagtctcaaccaaatcagatatatacagtctgggcatccttataatcgagatagtaacagggttaaaagtcgattctaacactgtagacttatcgtctaagaaccttatcgacaatgtacaaaggatttggacaaaaatgccgcagatagcttctaagtacccgacgttggaagcaagcaacctccaacaagttaaaagatgcattgatgctgggttaaattgtgtgagcgaaaaaccaagagaaaggccatccgcaggggaaattatcaagcagcttaacggaagcagctttccatctcgcaactagatgcttagggcctttggtctttttctagtttctgaccactaaaagctgatgcggaccgtcaatcgccttggcttttcaatcaccttttatgagaatcgtttcagtaaaaaccatctaaaattaacataaacacataaccgattaagtcgtcacaatagtaggaatatgtcactttctagattatgaactctttggaccacttcattttcttccatacgtgatctctacgatacttagattctcttcacaaccagattctttctgcagccagattctcaaaaaagctggtcagaaaaaaatgaaccaaataggccttagatcttgatctaaatcaaattcttagggcaaattttgtaaccctatttttctaatagatttctattttactaaggcttcgtttgtttcgttggaattgaattccattctaatgatcataatttagacacaaactaattgaattaaaatatttgtatatgtaatatatttgtatagtatcttaaatcatatgagagatagttatatacta

SEQ ID NO: 41605 - DNA, 1120 bp, Zea Mays
ttcatcttaagatttcttagaggtgcatctcatgagcttaactggaatatcagcttcaaaataatacaaggaatttgtcatggtttacagttcttacatgaatcgcaaagacccataattcacatggatctcaaacctggcaatatattgttggatgataacttaatgcccaaaattgccgattttggtttatcaaggctctttggcgaagagcaaacacgtgcactcacttcaaatgttgtgggatcaagagggtacatggctccagaatattactacagaggtgaagtctcaaccaaatcagatatatacagtctgggcatccttataatcgagatagtaacagggttaaaagtcgattctaacactgtagacttatcgtctaagaaccttatcgacaatgtacaaaggatttggacaaaaatgccgcagatagcttctaagtacccgacgttggaagcaagcaacctccaacaagttaaaagatgcattgatgctgggttaaattgtgtgagcgaaaaaccaagagaaaggccatccgcaggggaaattatcaagcagcttaacggaagcagctttccatctcgcaactagatgcttagggcctttggtctttttctagtttctgaccactaaaagctgatgcggaccgtcaatcgccttggcttttcaatcaccttttatgagaatcgtttcagtaaaaaccatctaaaattaacataaacacataaccgattaagtcgtcacaatagtaggaatatgtcactttctagattatgaactctttggaccacttcattttcttccatacgtgatctctacgatacttagattctcttcacaaccagattctttctgcagccagattctcaaaaaagctggtcagaaaaaaatgaaccaaataggccttagatcttgatctaaatcaaattcttagggcaaattttgtaaccctatttttctaatagatttctattttactaaggcttcgtttgtttcgttggaattgaattccattctaatgatcataatttagacacaaactaattgaattaaaatatttgtatatgtaatatatttgtatagtatcttaaatcatatgagagatagttatatacta

SEQ ID NO: 41606 - DNA, 1776 bp, Zea Mays
cttatttttccaaactgttgaatggagttcatgtatttattaaatacagtacaaagaaacttaacataggcacgcggattaagacccgcaagcggaatattgcagctcctttggaccctgcatcattctctgatgcaattgttcagatctatttggataatggtggagacctggaacttgtcgccaaaagtatcgagtcttcagacctcaacttctcacgttacggtgacaccttttttgaggtggtttttgttggagggcgcactcagccaggcactgtaaaacctgaagaaggagaccgccacccttattcggtgttagattgtgcgtcacagcgtgaagcaattttgcctttcgtactctatatccagaaaacattgcgcaggaggccttttttaataaagaatcttgaaaatgttatgcgtaaattcctgcaatccttggagttctttgaggaaaatgagaggaagaaactcgccatattcacagcccttgcattttctcagaagctatcagggcttcctcctgagactgtgttccagccattgctcaaggataatcttgttgccaaagggatagtactttcattcattactgagtttttcaaggagtaccttgaggaaaacagcttggatgatttgattgcacttttgaagaaaggcaaaatggaggacaatctgttggacttcttcccatcagctaagagatcttctgaggctttatctgagcatttcaccaaagaaggtctgactagccttgttgagtacaacgaaaagaagatgtttgaggttaaacttaaggagataaagtcaacactgactgctatgataaatgatgaggctgcaatatctgaagtgattgagactgtcaagcagcaagttaaggatgctaaatttcctgatttagaggttattcgcatgttgtgggatgtgctcatggaggctgttcagtggtctgggaagaaccagcagcaaaattccaatgcagcacttaggcaggtgaaagcttggactgagcttttgaatgctttttgcacgagtggcagactcgaactggaacttatacacaaagttcagacacagtgctatgaggatgctaagctgatgaagctgtttccggaaatcataagaacactgtatgaccaagatgtcctagctgaagatactatagtcctttggttccgtaaaggttcaaacccgaagggcaggcaatcttttgtgaaagctctggagccgtttgtcaaatggctcgaggaggctgaggaggaagaataagctcttgatttggagattggccgaatgtgacgaattatggttctcgaaaatattacctttttttttatttcgaaagctatgaaaggttgaggagttatggttgctgctagttattgccgagtttgttactggcgatagatttatgttatgctgtttaggcacttggctctcggctgcagtatgttgctgttaaggtgttgaaacttctgttatcattactgaactggtttataatgtgacgtcaatttactatgggtattgtacatcactactgggtggcgcaaagcactcgggaaagcttgcaaacctaatgtaacactcggcaaagaagaatcaatgaactgtacaacgatctctttctcgagagcattatgtcgggcactcacgaagtttttgttgagtgtcacttagtgcttagtaaaaaaaagtctcgataacaatgataggtgattgagactgtaccgagtgttttcaatagcactcaataaataaagatagcctt

SEQ ID NO: 41607 - DNA, 845 bp, Zea Mays
ataaaccccccgtaacctaaccccaagtcctagtcccactcccatcctctcgacatctttacgtccctagcggctggtggtcgtccgcctatctggattcggccatcctaggctccgcccatctggatctggtgccttagggactacccccatctagatctggccatcctaggctccaaagaccggacactcggcacgacgatcggcgccttaggcatggacactgaggagccgaggtgcccggggatgtcgcgttcactggcagcgctgggatgtcttccatcgtgctgaggtagatgataatgccaacgtagaaggggatgatgcttagttgggttcaactctatcctgtcctgtcagtttggatggcgaaggtggagtgttgagagcaccatagatggttccaataagagaatgagaaccagaatgtcaaaaactagggtttggaaagattggaagcctctcttcaaaatcacgaacgataagcaagttcggtatgctgctatatgtaagatttgcaatgtagagttgtttgctaagtctagtggtggtactggtcatctattgaggcatgttgctgcttgtaccggaactgtaattgctattatgtgaactgtaactgctactatgtcttcactggtgaaaaatctttgtggtctgtttcactatttgtgactatgtagtatgcgcttgtaaggctgtaactgctattatgtaaactataagtctgtaactgctaatatgcttttatgtcttcactggtgaactataaatatttttgtggtatgttggtgactgcgctaacaactgaactgctattatgtcaaatgtaactactattatat

SEQ ID NO: 41608 - DNA, 729 bp, Zea Mays
catctgtttgtttggaagcccatcatccgactgatattcgtccaggggaagcctttttccggttggaaacagccctggcctcttccgaccagctacccgcgaccgcaactctagcctctagagctctcccctagcgacgccaatcctagcctcaggagctcttccctgagacccggctccatcgtcttctgtgacatcgtccccttctcctcgataagggactgggcagtcatggcggtgagtagggtggtggcctactagcctatggtgggagtttggtttggggatccgctgacctgcatcactgtctgcttctgagtgcaaagtggaagcaatgcatgaagtcgacatgaagaagaaaaatgcaacgaactgtatctagtgcagtttaattggtgttacttgatgttggtgtttcgttgcattacagttttatgttatattgactatctgtttgcgtgaatggagatgacattgatggatggattagcttcgttacatattagatggtattcaaattaaactttgtgtgaatcatatttgtttgtgtgaatggagaccaatctgtttctgtgatgtttcatttgtttctgtttttttctaattttttgtgttcattgcgcctcattgtgtgaatggagaccaagctgttcaaagtgtttcgttgtacgaatggagaccaatcagtttgtgaatggataccaatatatttatgtgatatttttgctc

SEQ ID NO: 41609 - DNA, 711 bp, Zea Mays
gactgatattcgtccaggggaagcctttttccggttggaaacagccctggcctcttccgaccagctacccgcgaccgcaactctagcctctagagctctcccctagcgacgccaatcctagcctcaggagctcttccctgagacccggctccatcgtcttctgtgacatcgtccccttctcctcgataaggggactctagggactgggcagtcatggcggtgagtagggtggtggcctactagcctatggtgggagtttggtttggggatccgctgacctgcatcactgtctgcttctgagtgcaaagtggaagcaatgcatgaagtcgacatgaagaagaaaaatgcaacgaactgtatctagtgcagtttaattggtgttacttgatgttggtgtttcgttgcattacagttttatgttatattgactatctgtttgcgtgaatggagatgacattgatggatggattagcttcgttacatattagatggtattcaaattaaactttgtgtgaatcatatttgtttgtgtgaatggagaccaatctgtttctgtgatgtttcatttgtttctgtttttttctaattttttgtgttcattgcgcctcattgtgtgaatggagaccaagctgttcaaagtgtttcgttgtacgaatggagaccaatcagtttgtgaatggataccaatatatttatgtgatatttttgctc

SEQ ID NO: 41610 - DNA, 3163 bp, Zea Mays
caaagcaccacttgcgtgtggagaatacccgcagctctctatgaagttactcgatcgtagtgtttggctctcgtgtgggctaccctttgcgtaggtgcaccaacgaggattagttggaaccttgcgtggttccggatacctcggtaaaaataccggcgtcatacacgagtgtttgcatctctaccttgctctttagcttccgcatttatattaagcatctaagtttcaatcttaactttctaagttagttttttagaattgaaacttagccattgcggtagagataccaacacttagacaaaaactagtttgcacattatagattatttatttgcatagattttgctctaggggtttaattgtgtcctagtttagagaaagttttagaagtcctaattcacccctaccttaggcatcactgttttcttcagcagaacatattaaacttttttttaaaaggagtcgagattgtagacaaaaggagagggtttttttagaaacacaaaggtggttttcctcggcagacaaagcagaaaggcctggcaaaagtggcccgtggatcccaagagtcgccacgcaaggcccagccaaaaacctgaccccacaagcgagacatgacgaaggccgtgatgcgagagcgacaaaaaaacggcctcggcggcgccggcgtcttcggattctccgcccgacgcgcgccttatttccttccctctcagtctccgcgccgtcctgccaccctgcgtttcatcacgctcgcaggtttctaacaccaaggcacctgccaataaattttgcctactggcactccatatattagaagcaatatgaatccgtatttcttgggattcattctcccttttgtggcatctctgctgcttaccaagagaaagtccgagaagaagaggggggtgccagtcaatgtgggtggagagcctggctgcgccatccgtaaccacagatttgaaagacctgtcaagacgcgctgggaggggatttccacgcttgctgagctatttgagcaatcgtgcaagcagtttgcctctacacccctgtttggcaccaggaagctcattgcaagagaaatggtagtggctgctgatggaagatcctttgagaagctccatttgggaaactatgagtggagaagctatgctgatgcattcaaaactgtctgcaatttcgcttctggtctactgcggattggacacctcaaggatgagcgtgttgctatttttgctgacacacgggctgagtggcagattgcgttgcaggcatgcttcagacaaaatattgcagttgtcacaatctatgcctctttgggggagggagcgctatgtcactcactaaatgagaccgaggtaactactgttgtatgtggacgaaaagaatttaaaaagctgattgatataagtgggcaacttgacactgtgaaacatgtcatctacattgatgaggaaggcatctcagttgaagtgtccttggctgaaaactgtactagctggacagtcaagtcatttgaagaggtagagagtataggcttgcaaagacctgttgaagcaaacttgcctctcccatcagatactgcagtgattatgtatacgagtggaagcacaggaatgcctaagggagtcatgatgagccaccaaaatgtcttggctgtagtttcagctgttatgacgattgtgcctggtcttggcaagaaggatgtgtacctggcatatcttcccctagcacatatccttgaattggcagctgaggcaatcataactggtgttggggcttcaataggttacgggtcacctttgaccctgactgatacatcaaataaaataaaaaaggggacgcaaggtgatgcttctgtactgaagccaacgctaatgactgctgtacctgctatacttgatcgtgttcgtgatggtgtacgaaaaaatgtagatgcaaaaggtgggttagcgaagagattatttgatattgcctatagccgtcgtctagctgctgtcaatggaagctggttgggtgcgtggggactagagaagcttttgtgggatatgctcgtcttccgaaaggttcgtgcaatcttgggaggacggattcgctttattcttgcaggtggagcacctctgtcaggggaaacacagagatttatcaatatatgtcttggggctccaatatctcaaggatatggcttgactgaaacctgtgctggtgggacattttcagagtatgatgaaacatctgttggtcgcgttggtccccctttgccttgttcatacattaagttgatagactgggccgaaggtggatacttaacaaccgattcaccaatgcctcggggtgaaatagttattggaggtccaaatgtaactaaaggctacttcaaaaatgaagcaaaaacaaatgaggtgtacaaggttgatgaaagaggcatgcgatggttctactctggcgacattgggcgcttgcacccagatggatgtcttgaaattatcgaccgcaagaaggatatagtcaagcttcaacacggtgaatatgtttctctaggaaaggtggaggctactttgagtgtgtgctcatacgttgaccagatcatgatccatgctgaccccttccacagctactgtgtggcacttgttgtaactgcacagagtgagctgaaatcctgggcctcaaaacaaggaatgacatatagtgatttctcagatttgtgccacaagcaagggacagtcaaagaagtcctccaatctttggtgaaggctggtaagcaagcacggttggagaagtttgagatccctgccaaaatcaagctgataccggagccgtggacgccggagtcaggcctcgtcacggctgccctcaagctcaagagggaggtgatcaagaaggcatacgagatggaccttgcccagttgtacagtcagtgacctgccgctacagtttctcaacgataggggtgatcctggtagctaccggcaacaacagttttttttatttgtacctcgtactatgttcctgtctttcttttaagacaatagttgactggtaaatcagttgccgataatgtgtagccttccattgcccgcccaaagagaactataattagcccttatttatttggctattatcatattcacctcaattcaaatacgttagccattataattga

SEQ ID NO: 41611 - DNA, 2620 bp, Zea Mays
gacaaaaaaacggcctcggcggcgccggcgtcttcggattctccgcccgacgcgcgccttatttccttccctctcagtctccgcgccgtcctgccaccctgcgtttcatcacgctcgcaggtttctaacaccaaggcacctgccaataaattttgcctactggcactccatatattagaagcaatatgaatccgtatttcttgggattcattctcccttttgtggcatctctgctgcttaccaagagaaagtccgagaagaagaggggggtgccagtcaatgtgggtggagagcctggctgcgccatccgtaaccacagatttgaaagacctgtcaagacgcgctgggaggggatttccacgcttgctgagctatttgagcaatcgtgcaagcagtttgcctctacacccctgtttggcaccaggaagctcattgcaagagaaatggtagtggctgctgatggaagatcctttgagaagctccatttgggaaactatgagtggagaagctatgctgatgcattcaaaactgtctgcaatttcgcttctggtctactgcggattggacacctcaaggatgagcgtgttgctatttttgctgacacacgggctgagtggcagattgcgttgcagggcatgcttcagacaaaatattgcagttgtcacaatctatgcctctttgggggagggagcgctatgtcactcactaaatgagaccgaggtaactactgttgtatgtggacgaaaagaatttaaaaagctgattgatataagtgggcaacttgacactgtgaaacatgtcatctacattgatgaggaaggcatctcagttgaagtgtccttggctgaaaactgtactagctggacagtcaagtcatttgaagaggtagagagtataggcttgcaaagacctgttgaagcaaacttgcctctcccatcagatactgcagtgattatgtatacgagtggaagcacaggaatgcctaagggagtcatgatgagccaccaaaatgtcttggctgtagtttcagctgttatgacgattgtgcctggtcttggcaagaaggatgtgtacctggcatatcttcccctagcacatatccttgaattggcagctgaggcaatcataactggtgttggggcttcaataggttacgggtcacctttgaccctgactgatacatcaaataaaataaaaaaggggacgcaaggtgatgcttctgtactgaagccaacgctaatgactgctgtacctgctatacttgatcgtgttcgtgatggtgtacgaaaaaatgtaagttcttcgttacaattagttcataaattgccttttgtgatctttcatgttctctctgctgttctatttctttcatgctgagatgaattcaggtagatgcaaaaggtgggttagcgaagagattatttgatattgcctatagccgtcgtctagctgctgtcaatggaagctggttgggtgcgtggggactagagaagcttttgtgggatatgctcgtcttccgaaaggttcgtgcaatcttgggaggacggattcgctttattcttgcaggtggagcacctctgtcaggggaaacacagagatttatcaatatatgtcttggggctccaatatctcaaggatatggcttgactgaaacctgtgctggtgggacattttcagagtatgatgaaacatctgttggtcgcgttggtccccctttgccttgttcatacattaagttgatagactgggccgaaggtggatacttaacaaccgattcaccaatgcctcggggtgaaatagttattggaggtccaaatgtaactaaaggctacttcaaaaatgaagcaaaaacaaatgaggtgtacaaggttgatgaaagaggcatgcgatggttctactctggcgacattgggcgcttgcacccagatggatgtcttgaaattatcgaccgcaagaaggatatagtcaagcttcaacacggtgaatatgtttctctaggaaaggtggaggctactttgagtgtgtgctcatacgttgaccagatcatgatccatgctgaccccttccacagctactgtgtggcacttgttgtaactgcacagagtgagctgaaatcctgggcctcaaaacaaggaatgacatatagtgatttctcagatttgtgccacaagcaagggacagtcaaagaagtcctccaatctttggtgaaggctggtaagcaagcacggttggagaagtttgagatccctgccaaaatcaagctgataccggagccgtggacgccggagtcaggcctcgtcacggctgccctcaagctcaagagggaggtgatcaagaaggcatacgagatggaccttgcccagttgtacagtcagtgacctgccgctacagtttctcaacgataggggtgatcctggtagctaccggcaacaacagttttttttatttgtacctcgtactatgttcctgtctttcttttaagacaatagttgactggtaaatcagttgccgataatgtgtagccttccattgcccgcccaaagagaactataattagcccttatttatttggctattatcatattcacctcaattcaaatacgttagccattataattga

SEQ ID NO: 41612 - DNA, 2436 bp, Zea Mays
aaacggcctcggcggcgccggcgtcttcggattctccgcccgacgcgcgccttatttccttccctctcagtctccgcgccgtcctgccaccctgcgtttcatcacgctcgcaggtttctaacaccaaggcacctgccaataaattttgcctactggcactccatatattagaagcaatatgaatccgtatttcttgggattcattctcccttttgtggcatctctgctgcttaccaagagaaagtccgagaagaagaggggggtgccagtcaatgtgggtggagagcctggctgcgccatccgtaaccacagatttgaaagacctgtcaagacgcgctgggaggggatttccacgcttgctgagctatttgagcaatcgtgcaagcagtttgcctctacacccctgtttggcaccaggaagctcattgcaagagaaatggtagtggctgctgatggaagatcctttgagaagctccatttgggaaactatgagtggagaagctatgctgatgcattcaaaactgtctgcaatttcgcttctggtctactgcggattggacacctcaaggatgagcgtgttgctatttttgctgacacacgggctgagtggcagattgcgttgcagaccgaggtaactactgttgtatgtggacgaaaagaatttaaaaagctgattgatataagtgggcaacttgacactgtgaaacatgtcatctacattgatgaggaaggcatctcagttgaagtgtccttggctgaaaactgtactagctggacagtcaagtcatttgaagaggtagagagtataggcttgcaaagacctgttgaagcaaacttgcctctcccatcagatactgcagtgattatgtatacgagtggaagcacaggaatgcctaagggagtcatgatgagccaccaaaatgtcttggctgtagtttcagctgttatgacgattgtgcctggtcttggcaagaaggatgtgtacctggcatatcttcccctagcacatatccttgaattggcagctgaggcaatcataactggtgttggggcttcaataggttacgggtcacctttgaccctgactgatacatcaaataaaataaaaaaggggacgcaaggtgatgcttctgtactgaagccaacgctaatgactgctgtacctgctatacttgatcgtgttcgtgatggtgtacgaaaaaatgtagatgcaaaaggtgggttagcgaagagattatttgatattgcctatagccgtcgtctagctgctgtcaatggaagctggttgggtgcgtggggactagagaagcttttgtgggatatgctcgtcttccgaaaggttcgtgcaatcttgggaggacggattcgctttattcttgcaggtggagcacctctgtcaggggaaacacagagatttatcaatatatgtcttggggctccaatatctcaaggatatggcttgactgaaacctgtgctggtgggacattttcagagtatgatgaaacatctgttggtcgcgttggtccccctttgccttgttcatacattaagttgatagactgggccgaaggtggatacttaacaaccgattcaccaatgcctcggggtgaaatagttattggaggtccaaatgtaactaaaggctacttcaaaaatgaagcaaaaacaaatgaggtgtacaaggttgatgaaagaggcatgcgatggttctactctggcgacattgggcgcttgcacccagatggatgtcttgaaattatcgaccgcaagaaggatatagtcaagcttcaacacggtgaatatgtttctctaggaaaggtggaggctactttgagtgtgtgctcatacgttgaccagatcatgatccatgctgaccccttccacagctactgtgtggcacttgttgtaactgcacagagtgagctgaaatcctgggcctcaaaacaaggaatgacatatagtgatttctcagatttgtgccacaagcaagggacagtcaaagaagtcctccaatctttggtgaaggctggtaagcaagcacggttggagaagtttgagatccctgccaaaatcaagctgataccggagccgtggacgccggagtcaggcctcgtcacggctgccctcaagctcaagagggaggtgatcaagaaggcatacgagatggaccttgcccagttgtacagtcagtgacctgccgctacagtttctcaacgataggggtgatcctggtagctaccggcaacaacagttttttttatttgtacctcgtactatgttcctgtctttcttttaagacaatagttgactggtaaatcagttgccgataatgtgtagccttccattgcccgcccaaagagaactataattagcccttatttatttggctattatcatattcacctcaattcaaatacgttagccattataattga

SEQ ID NO: 41613 - DNA, 1982 bp, Zea Mays
cagatattggcaaatatagatgctatcgagcatcaaacatctgaagttcagataatgtaaattcgtcgttgagtttcttcacaatacaaggcatgcttcagacaaaatattgcagttgtcacaatctatgcctctttgggggagggagcgctatgtcactcactaaatgagaccgaggtaactactgttgtatgtggacgaaaagaatttaaaaagctgattgatataagtgggcaacttgacactgtgaaacatgtcatctacattgatgaggaaggcatctcagttgaagtgtccttggctgaaaactgtactagctggacagtcaagtcatttgaagaggtagagagtataggcttgcaaagacctgttgaagcaaacttgcctctcccatcagatactgcagtgattatgtatacgagtggaagcacaggaatgcctaagggagtcatgatgagccaccaaaatgtcttggctgtagtttcagctgttatgacgattgtgcctggtcttggcaagaaggatgtgtacctggcatatcttcccctagcacatatccttgaattggcagctgaggcaatcataactggtgttggggcttcaataggttacgggtcacctttgaccctgactgatacatcaaataaaataaaaaaggggacgcaaggtgatgcttctgtactgaagccaacgctaatgactgctgtacctgctatacttgatcgtgttcgtgatggtgtacgaaaaaatgtagatgcaaaaggtgggttagcgaagagattatttgatattgcctatagccgtcgtctagctgctgtcaatggaagctggttgggtgcgtggggactagagaagcttttgtgggatatgctcgtcttccgaaaggttcgtgcaatcttgggaggacggattcgctttattcttgcaggtggagcacctctgtcaggggaaacacagagatttatcaatatatgtcttggggctccaatatctcaaggatatggcttgactgaaacctgtgctggtgggacattttcagagtatgatgaaacatctgttggtcgcgttggtccccctttgccttgttcatacattaagttgatagactgggccgaaggtggatacttaacaaccgattcaccaatgcctcggggtgaaatagttattggaggtccaaatgtaactaaaggctacttcaaaaatgaagcaaaaacaaatgaggtgtacaaggttgatgaaagaggcatgcgatggttctactctggcgacattgggcgcttgcacccagatggatgtcttgaaattatcgaccgcaagaaggatatagtcaagcttcaacacggtgaatatgtttctctaggaaaggtggaggctactttgagtgtgtgctcatacgttgaccagatcatgatccatgctgaccccttccacagctactgtgtggcacttgttgtaactgcacagagtgagctgaaatcctgggcctcaaaacaaggaatgacatatagtgatttctcagatttgtgccacaagcaagggacagtcaaagaagtcctccaatctttggtgaaggctggtaagcaagcacggttggagaagtttgagatccctgccaaaatcaagctgataccggagccgtggacgccggagtcaggcctcgtcacggctgccctcaagctcaagagggaggtgatcaagaaggcatacgagatggaccttgcccagttgtacagtcagtgacctgccgctacagtttctcaacgataggggtgatcctggtagctaccggcaacaacagttttttttatttgtacctcgtactatgttcctgtctttcttttaagacaatagttgactggtaaatcagttgccgataatgtgtagccttccattgcccgcccaaagagaactataattagcccttatttatttggctattatcatattcacctcaattcaaatacgttagccattataattga

SEQ ID NO: 41614 - DNA, 1924 bp, Zea Mays
gccggtttcattcaattatatcaccatttaatgcatgcttcagacaaaatattgcagttgtcacaatctatgcctctttgggggagggagcgctatgtcactcactaaatgagaccgaggtaactactgttgtatgtggacgaaaagaatttaaaaagctgattgatataagtgggcaacttgacactgtgaaacatgtcatctacattgatgaggaaggcatctcagttgaagtgtccttggctgaaaactgtactagctggacagtcaagtcatttgaagaggtagagagtataggcttgcaaagacctgttgaagcaaacttgcctctcccatcagatactgcagtgattatgtatacgagtggaagcacaggaatgcctaagggagtcatgatgagccaccaaaatgtcttggctgtagtttcagctgttatgacgattgtgcctggtcttggcaagaaggatgtgtacctggcatatcttcccctagcacatatccttgaattggcagctgaggcaatcataactggtgttggggcttcaataggttacgggtcacctttgaccctgactgatacatcaaataaaataaaaaaggggacgcaaggtgatgcttctgtactgaagccaacgctaatgactgctgtacctgctatacttgatcgtgttcgtgatggtgtacgaaaaaatgtagatgcaaaaggtgggttagcgaagagattatttgatattgcctatagccgtcgtctagctgctgtcaatggaagctggttgggtgcgtggggactagagaagcttttgtgggatatgctcgtcttccgaaaggttcgtgcaatcttgggaggacggattcgctttattcttgcaggtggagcacctctgtcaggggaaacacagagatttatcaatatatgtcttggggctccaatatctcaaggatatggcttgactgaaacctgtgctggtgggacattttcagagtatgatgaaacatctgttggtcgcgttggtccccctttgccttgttcatacattaagttgatagactgggccgaaggtggatacttaacaaccgattcaccaatgcctcggggtgaaatagttattggaggtccaaatgtaactaaaggctacttcaaaaatgaagcaaaaacaaatgaggtgtacaaggttgatgaaagaggcatgcgatggttctactctggcgacattgggcgcttgcacccagatggatgtcttgaaattatcgaccgcaagaaggatatagtcaagcttcaacacggtgaatatgtttctctaggaaaggtggaggctactttgagtgtgtgctcatacgttgaccagatcatgatccatgctgaccccttccacagctactgtgtggcacttgttgtaactgcacagagtgagctgaaatcctgggcctcaaaacaaggaatgacatatagtgatttctcagatttgtgccacaagcaagggacagtcaaagaagtcctccaatctttggtgaaggctggtaagcaagcacggttggagaagtttgagatccctgccaaaatcaagctgataccggagccgtggacgccggagtcaggcctcgtcacggctgccctcaagctcaagagggaggtgatcaagaaggcatacgagatggaccttgcccagttgtacagtcagtgacctgccgctacagtttctcaacgataggggtgatcctggtagctaccggcaacaacagttttttttatttgtacctcgtactatgttcctgtctttcttttaagacaatagttgactggtaaatcagttgccgataatgtgtagccttccattgcccgcccaaagagaactataattagcccttatttatttggctattatcatattcacctcaattcaaatacgttagccattataattga

SEQ ID NO: 41615 - DNA, 1852 bp, Zea Mays
attcaaacagcaaatcagaggcacattgcccagcaggaattgcaaggggcagcatgaggaattcaaaacattcccagtgatgagtttgtacttcatacacctatcaaccattggctcaaaaacatcagaaacaaaacatcagctatcgctgtgaacatgccgaagtatagatgacaatgaaaatccaggcatccagtaaaggggcaaagaaatatatatatcacgttattatttggctacacctccgtgttcattattcaccaaggataaaaattaaatccacttagcccaggagcatccatccaatcttaacccacatccctccaaccttaacccaataaataacctctgcttaacaccgccaaaaccaacatggctggaagtgtcaccttccttcagctacaaattgtttcattaatacatggtaacaagaataaactagacaagggcatagagtttcaattctcttagaatagcataataaacagtacggtaatcgcagaatggtagtgcacttaatctgctcgggattgaccagcacgggatgaaaggataattccaacaatgagaccgtacagagcaagcgcttctgcgaaaatgaggatgaggatcatgcccacaaaaagcttcggctgttgtgcattcgccctgaaatcagtggcccagaaaataagtcaataaaatttcaattcccaaataagcatgtactgcctccttaaaagaagaaacgctcaaagaaaggagattaggttgatcattaacagccttgttcacccaaagtttacacataagcactgttttacactgttctgcattgtagactacactgttcgcagagtggaatttgaatatgggtatgcgtatgtgtaagctgctggagatagtcttataagcctataaatagtcatatatcaatttgcatactcatccaagagcatgatcttgttcatagaacagtaaaacttaggttggtcatacttcagtaagaaagaaatacaataatatgacagttagcactacatctacggtgcactaaccaacaactattatttacacgcatggggagcttaaagatacagatgaaagaaaacacatacctacatgttcttctaatcaacactattttctcaattaaaggaaaatgttttagaaagtgcaatatcaaaacaaaacaggagcatgacgtagagtaaacacatgctatcattaaaatgacagggaatagttccaagtcagaaagaatatttattaattgtacagtagggggaataattttagacattttatttttcgattgtttgacgacccaagacgaaaattcatgtgcaagaccaacagtacaaaagatattagactaataataagaatttgaatgccactacctacctatagtacatggatttagatcttctagctgagttggttacgtggacttagtagcatagcactcatcaggtcctaagttcgactccacatgggagcgaatttaagttgaggttaaaaatcctcctatctatcccacgccaaagcattggtataaggcccggcctcagtagcaaccgttctcacatgactaaaagtggggcagggattcgagggtttttattgacctccatgagaaggtcttgttcttaatcccggagctctcttacccctgcaggtcaattttttttatggtgataaaatgtgggctctctaggtgtattaaccttgtagcactcaaatagcacaatatcaacattctggccatggcattgaatagtagatagtaggaaaaggacatagtaaatatatgatgtccactacaaagagagagggagctttacctgactccagcatcaccaacaatgcc

SEQ ID NO: 41616 - DNA, 281 bp, Zea Mays
gacgaacatgagaagacgagggcggcggcggcgccgaggaaaccgaagaagggggccgtctcatcgccgctgaacaccgacgacatcttggtctccggcttcctgctcctctgcgtgcctctcagtggtgggttgccttgctcggtctacgggaggccgcgtcgctggggcgaggaggaacgaaagggaagcttgggtgggcaggcaagatgcgatctctctcgagccgagtttggtttctttttgttgcgactacccctatcactccccgatctgatctg

SEQ ID NO: 41617 - DNA, 1375 bp, Zea Mays
atgacatcttgcctagagatgtcaaaaataaactgtcctgttcgttttagttgggaggacctaaatctattcctaagaaaagatgcagccacagaactgaaaagaacacctgaccaaaccccaattcatgatgtttacactgcatataggtccctgcaatattggaattccacaatctctagcatgcgggtattaagaaccaaaagaaaattaacgtatggagcagaacctgatcatcgaaggaaggctcagagtgtgatgaagcagagccagagctatcgctctccccagggctcttatccaatgacttgcgcttccagagccaactgcggcgatccatccgacaaccaccagaacattcaaagcagcaacagggaaggttggcgttgccttgccaccaccaaatgtccaaatgcggggttcatatatcagcactgaaaattgaaagagaactcaatacaagcgacgttgcagagactacagagttgtacattaagctggacatcatgcagtaaaataatgactggaggacatgacattttgaggatgcaattaccaaaatgtttacaaggcaaccctcaccgacacaggattatattttttttccttttctgctgttaaaaaatacagagatcggtaggatgcaggcagtgattgagtacggctgcagagaccgagaaaacgtacggccaaacattctttgtgcaaggcttttacaatgcccaaatgataagtttgtcagacaaaaaaaatccacccttccatttcagactctgtgctctggaaaacagagaaaaacgtttcgtatagaaaaaaaatcgcggacaggatcgaaaaataggctgcacctaaaacctccagaatcctacaaaaatgtagcggagggatgagacaaaggctcaaattccccggagatcaacattaatggttttctttagaaaaaactgagatttcttccttcaaatccaccgaaaatctcagtcaaacacactccgcatgcagaaagatgaaatccgcagaaaacccggagggagaaagattgcggggctagaaaaacttcagctttcgcccatcaccaaatctcagcaaaatcccacatcggagacacaatgcagaccaaaaccctaacgaaaatcgccaggaggagggtgcaggacagcatctgtgcccacccggtaccccaccaaaaaataatttcaggaaaaaaaaggaacaaccagccaagattcaagaaacgggggcggcgcaagaaaaagcgaaacggagagcattaatacctgcgaccacagcccagccagtagggaatggcaaccgtcacaagaaccgcgtggaacgccagacaaaaaaaattaaagcttcggtttttacttccaac

SEQ ID NO: 41618 - DNA, 243 bp, Zea Mays
agctcatcccacttttcctcgatcagatccattatagcaactgactgttctggggtagctagagatgatacaatggcaatgcaattaccaagggcaaaccaccggaagtccatcatagcagggctgacgttgccaagaaagtagcctcctcgacatggcatgaaaccaaacacccaatcaggaatggaatccggaatgacattaaacttgttcacagctgtgtgggaatactcttctgttttg

SEQ ID NO: 41619 - DNA, 1618 bp, Zea Mays
aacaaaaccgcaaaaacccagaaggaagtagaggcccccttcttgccccctacgcagccgtgtgccgtacaccgtgcacgcacgccgctcctcgcctccctgcaccatggacgccggcgagtgctccacctccaaaccccctcagccctctgccgcctccccgccctgcggcggggaggaggtcgcgtggtgcgagatcaggcggaatgccggggacgcgtcgtccgccactattcggaaccttagctcggatgcaattattgttgatggaagaattgtcgaacaagaatgcgtagacatcaaaccaggcagtgagattgtctctggaccccagaaagaagggcatttaatatatacatttgaaattacagaggcagaggatcatgaaaaaaaaaatgtcaagattgttctagatatcgagaatgcaaaatgcagcatatgcctgaatttgtggcatgatgttgttactgttgctccatgcctgcacaacttctgcaatggatgtttctcagagtggttaaggaggtcttcatctaattcacgtgataaaagccagagcgctgcatgcccacaatgtaggacaacagttcaatcagttggaaggaatcacttcctgcataatattgaagaggctatattgcaagctttttcctcactacagagatctgatgaggagattgcgttgttagagtcgtatgcttcagttaagtcgaatatggttttgggtcaacagaaaaaccaatcaaggaaaagacgtttttcacgttctagtgatgataccgacaattcagatctaccatgtcctcaatgccgtaatgaatttggtggatttagatgcagcccaggatctgtgcacttgcaatgcagtggatgtggaggaatgatgccagccagatctaacatcagtataccacaaaaatgcttggggtgtgataaagcgttttgtggggcttattggtattcgcaaggtgtgagttcaagtcattgcaatctgatctgcaaccaggatactttgaagagtatttatcagcgacatatctctgcacttcctgacacaattcatgggggcaatccatatgaaaaagatattacagaaagatgtatacagcaatcaggcaaaacattgcaagttgtaatctcagagtggatatcaaaatttgacaacatggaaattgatcgttcaaggttgcaattgaataatgtggatgcaattacttccaggacatatatctgcaaccattgctacagcaagtttgttgatttcctgctctactggttccgtgtatcattgccccaaaatcttcttccacgtgatgctgcggagagggagagctgctggtacggtttcatgtgccgcacccagcaccatcggcctgaccacgccaagaagctgaaccacgtgtgtcgcccgacaagaggcaaccagccctagtgagacttgactgtttctgtcaccattgtcatcaccatccattgtatgtgtgtgtcatcaaaatggtcaggaagtgtggcgcgtccatgtttggaaccctttttggtttgatcctggctggacctgacaaggaaattatattgctgctggtgccggaaccgccgctctgtcggcaggtccgggggg

SEQ ID NO: 41620 - DNA, 1591 bp, Zea Mays
aaaacccagaaggaagtagaggcccccttcttgccccctacgcagccgtgtgccgtacaccgtgcacgcacgccgctcctcgcctccctgcaccatggacgccggcgagtgctccacctccaaaccccctcagccctctgccgcctccccgccctgcggcggggaggaggtcgcgtggtgcgagatcaggcggaatgccggggacgcgtcgtccgccactattcggaaccttagctcggatgcaattattgttgatggaagaattgtcgaacaagaatgcgtagacatcaaaccaggcagtgagattgtctctggaccccagaaagaagggcatttaatatatacatttgaaattacagaggcagaggatcatgaaaaaaaaaatgtcaagattgttctagatatcgagaatgcaaaatgcagcatatgcctgaatttgtggcatgatgttgttactgttgctccatgcctgcacaacttctgcaatggatgtttctcagagtggttaaggaggtcttcatctaattcacgtgataaaagccagagcgctgcatgcccacaatgtaggacaacagttcaatcagttggaaggaatcacttcctgcataatattgaagaggctatattgcaagctttttcctcactacagagatctgatgaggagattgcgttgttagagtcgtatgcttcagttaagtcgaatatgaaaaaccaatcaaggaaaagacgtttttcacgttctagtgatgataccgacaattcagatctaccatgtcctcaatgccgtaatgaatttggtggatttagatgcagcccaggatctgtgcacttgcaatgcagtggatgtggaggaatgatgccagccagatctaacatcagtataccacaaaaatgcttggggtgtgataaagcgttttgtggggcttattggtattcgcaaggtgtgagttcaagtcattgcaatctgatctgcaaccaggatactttgaagagtatttatcagcgacatatctctgcacttcctgacacaattcatgggggcaatccatatgaaaaagatattacagaaagatgtatacagcaatcaggcaaaacattgcaagttgtaatctcagagtggatatcaaaatttgacaacatggaaattgatcgttcaaggttgcaattgaataatgtggatgcaattacttccaggacatatatctgcaaccattgctacagcaagtttgttgatttcctgctctactggttccgtgtatcattgccccaaaatcttcttccacgtgatgctgcggagagggagagctgctggtacggtttcatgtgccgcacccagcaccatcggcctgaccacgccaagaagctgaaccacgtgtgtcgcccgacaagaggcaaccagccctagtgagacttgactgtttctgtcaccattgtcatcaccatccattgtatgtgtgtgtcatcaaaatggtcaggaagtgtggcgcgtccatgtttggaaccctttttggtttgatcctggctggacctgacaaggaaattatattgctgctggtgccggaaccgccgctctgtcggcaggtccgggggg

SEQ ID NO: 41621 - DNA, 1569 bp, Zea Mays
cccccttcttgccccctacgcagccgtgtgccgtacaccgtgcacgcacgccgctcctcgcctccctgcaccatggacgccggcgagtgctccacctccaaaccccctcagccctctgccgcctccccgccctgcggcggggaggaggtcgcgtggtgcgagatcaggcggaatgccggggacgcgtcgtccgccactattcggaaccttagctcggatgcaattattgttgatggaagaattgtcgaacaagaatgcgtagacatcaaaccaggcagtgagattgtctctggaccccagaaagaagggcatttaatatatacatttgaaattacagaggcagaggatcatgaaaaaaaaaatgtcaagattgttctagatatcgagaatgcaaaatgcagcatatgcctgaatttgtggcatgatgttgttactgttgctccatgcctgcacaacttctgcaatggatgtttctcagagtggttaaggaggtcttcatctaattcacgtgataaaagccagagcgctgcatgcccacaatgtaggacaacagttcaatcagttggaaggaatcacttcctgcataatattgaagaggctatattgcaagctttttcctcactacagagatctgatgaggagattgcgttgttagagtcgtatgcttcagttttgggtcaacagaaaaaccaatcaaggaaaagacgtttttcacgttctagtgatgataccgacaattcagatctaccatgtcctcaatgccgtaatgaatttggtggatttagatgcagcccaggatctgtgcacttgcaatgcagtggatgtggaggaatgatgccagccagatctaacatcagtataccacaaaaatgcttggggtgtgataaagcgttttgtggggcttattggtattcgcaaggtgtgagttcaagtcattgcaatctgatctgcaaccaggatactttgaagagtatttatcagcgacatatctctgcacttcctgacacaattcatgggggcaatccatatgaaaaagatattacagaaagatgtatacagcaatcaggcaaaacattgcaagttgtaatctcagagtggatatcaaaatttgacaacatggaaattgatcgttcaaggttgcaattgaataatgtggatgcaattacttccaggacatatatctgcaaccattgctacagcaagtttgttgatttcctgctctactggttccgtgtatcattgccccaaaatcttcttccacgtgatgctgcggagagggagagctgctggtacggtttcatgtgccgcacccagcaccatcggcctgaccacgccaagaagctgaaccacgtgtgtcgcccgacaagaggcaaccagccctagtgagacttgactgtttctgtcaccattgtcatcaccatccattgtatgtgtgtgtcatcaaaatggtcaggaagtgtggcgcgtccatgtttggaaccctttttggtttgatcctggctggacctgacaaggaaattatattgctgctggtgccggaaccgccgctctgtcggcaggtccgggggg

SEQ ID NO: 41622 - DNA, 1549 bp, Zea Mays
ttcttgccccctacgcagccgtgtgccgtacaccgtgcacgcacgccgctcctcgcctccctgcaccatggacgccggcgagtgctccacctccaaaccccctcagccctctgccgcctccccgccctgcggcggggaggaggtcgcgtggtgcgagatcaggcggaatgccggggacgcgtcgtccgccactattcggaaccttagctcggatgcaattattgttgatggaagaattgtcgaacaagaatgcgtagacatcaaaccaggcagtgagattgtctctggaccccagaaagaagaggcagaggatcatgaaaaaaaaaatgtcaagattgttctagatatcgagaatgcaaaatgcagcatatgcctgaatttgtggcatgatgttgttactgttgctccatgcctgcacaacttctgcaatggatgtttctcagagtggttaaggaggtcttcatctaattcacgtgataaaagccagagcgctgcatgcccacaatgtaggacaacagttcaatcagttggaaggaatcacttcctgcataatattgaagaggctatattgcaagctttttcctcactacagagatctgatgaggagattgcgttgttagagtcgtatgcttcagttaagtcgaatatggttttgggtcaacagaaaaaccaatcaaggaaaagacgtttttcacgttctagtgatgataccgacaattcagatctaccatgtcctcaatgccgtaatgaatttggtggatttagatgcagcccaggatctgtgcacttgcaatgcagtggatgtggaggaatgatgccagccagatctaacatcagtataccacaaaaatgcttggggtgtgataaagcgttttgtggggcttattggtattcgcaaggtgtgagttcaagtcattgcaatctgatctgcaaccaggatactttgaagagtatttatcagcgacatatctctgcacttcctgacacaattcatgggggcaatccatatgaaaaagatattacagaaagatgtatacagcaatcaggcaaaacattgcaagttgtaatctcagagtggatatcaaaatttgacaacatggaaattgatcgttcaaggttgcaattgaataatgtggatgcaattacttccaggacatatatctgcaaccattgctacagcaagtttgttgatttcctgctctactggttccgtgtatcattgccccaaaatcttcttccacgtgatgctgcggagagggagagctgctggtacggtttcatgtgccgcacccagcaccatcggcctgaccacgccaagaagctgaaccacgtgtgtcgcccgacaagaggcaaccagccctagtgagacttgactgtttctgtcaccattgtcatcaccatccattgtatgtgtgtgtcatcaaaatggtcaggaagtgtggcgcgtccatgtttggaaccctttttggtttgatcctggctggacctgacaaggaaattatattgctgctggtgccggaaccgccgctctgtcggcaggtccgggggg

SEQ ID NO: 41623 - DNA, 1515 bp, Zea Mays
ttcttgccccctacgcagccgtgtgccgtacaccgtgcacgcacgccgctcctcgcctccctgcaccatggacgccggcgagtgctccacctccaaaccccctcagccctctgccgcctccccgccctgcggcggggaggaggtcgcgtggtgcgagatcaggcggaatgccggggacgcgtcgtccgccactattcggaaccttagctcggatgcaattattgttgatggaagaattgtcgaacaagaatgcgtagacatcaaaccaggcagtgagattgtctctggaccccagaaagaagggcatttaatatatacatttgaaattacagaggcagaggatcatgaaaaaaaaaatgtcaagattgttctagatatcgagaatgcaaaatgcagcatatgcctgaatttgtggcatgatgttgttactgttgctccatgcctgcacaacttctgcaatggatgtttctcagagtggttaaggaggtcttcatctaattcacgtgataaaagccagagcgctgcatgcccacaatgtaggacaacagttcaatcagttggaaggaatcacttcctgcataatattgaagaggctatattgcaagctttttcctcactacagagatctgatgaggagattgcgttgttagagtcgtatgcttcagttaagtcgaatatggttttgggtcaacagaaaaaccaatcaaggaaaagacgtttttcacgttctagtgatgataccgacaattcagatctaccatgtcctcaatgccgtaatgaatttggtggatttagatgcagcccaggatctgtgcacttgcaatgcagtggatgtggaggaatgatgccagccagatctaacatcagtataccacaaaaatgcttggggtgtgataaagcgttttgtggggcttattggtattcgcaaggtgtgagttcaagtcattgcaatctgatctgcaaccaggatactttgaagagtatttatcagcgacatatctctgcacttcctgacacaattcatgggggcaatccatatgaaaaagatattacagaaagatgtatacagcaatcaggcaaaacattgcaagttgtaatctcagagtggatatcaaaatttgacaacatggaaattgatcgttcaaggttgcaattgaataatgtggatgcaattacttccaggacatatatctgcaacttcttccacgtgatgctgcggagagggagagctgctggtacggtttcatgtgccgcacccagcaccatcggcctgaccacgccaagaagctgaaccacgtgtgtcgcccgacaagaggcaaccagccctagtgagacttgactgtttctgtcaccattgtcatcaccatccattgtatgtgtgtgtcatcaaaatggtcaggaagtgtggcgcgtccatgtttggaaccctttttggtttgatcctggctggacctgacaaggaaattatattgctgctggtgccggaaccgccgctctgtcggcaggtccgggggg

SEQ ID NO: 41624 - DNA, 1600 bp, Zea Mays
ttcttgccccctacgcagccgtgtgccgtacaccgtgcacgcacgccgctcctcgcctccctgcaccatggacgccggcgagtgctccacctccaaaccccctcagccctctgccgcctccccgtcctcccccaccgtatgggctaggctggtgcccgccgattccgcgtgcccgacggtggaggtggccgaagacgactccgtggtctgctccctcgttgcgccgccctgcggcggggaggaggtcgcgtggtgcgagatcaggcggaatgccggggacgcgtcgtccgccactattcggaaccttagctcggatgcaattattgttgatggaagaattgtcgaacaagaatgcgtagacatcaaaccaggcagtgagattgtctctggaccccagaaagaagggcatttaatatatacatttgaaattacagaggcagaggatcatgaaaaaaaaaatgtcaagattgttctagatatcgagaatgcaaaatgcagcatatgcctgaatttgtggcatgatgttgttactgttgctccatgcctgcacaacttctgcaatggatgtttctcagagtggttaaggaggtcttcatctaattcacgtgataaaagccagagcgctgcatgcccacaatgtaggacaacagttcaatcagttggaaggaatcacttcctgcataatattgaagaggctatattgcaagctttttcctcactacagagatctgatgaggagattgcgttgttagagtcgtatgcttcagttttgggtcaacagaaaaaccaatcaaggaaaagacgtttttcacgttctagtgatgataccgacaattcagatctaccatgtcctcaatgccgtaatgaatttggtggatttagatgcagcccaggatctgtgcacttgcaatgcagtggatgtggaggaatgatgccagccagatctaacatcagtataccacaaaaatgcttggggtgtgataaagcgttttgtggggcttattggtattcgcaaggtgtgagttcaagtcattgcaatctgatctgcaaccaggatactttgaagagtattacagaaagatgtatacagcaatcaggcaaaacattgcaagttgtaatctcagagtggatatcaaaatttgacaacatggaaattgatcgttcaaggttgcaattgaataatgtggatgcaattacttccaggacatatatctgcaaccattgctacagcaagtttgttgatttcctgctctactggttccgtgtatcattgccccaaaatcttcttccacgtgatgctgcggagagggagagctgctggtacggtttcatgtgccgcacccagcaccatcggcctgaccacgccaagaagctgaaccacgtgtgtcgcccgacaagaggcaaccagccctagtgagacttgactgtttctgtcaccattgtcatcaccatccattgtatgtgtgtgtcatcaaaatggtcaggaagtgtggcgcgtccatgtttggaaccctttttggtttgatcctggctggacctgacaaggaaattatattgctgctggtgccggaaccgccgctctgtcggcaggtccgggggg

SEQ ID NO: 41625 - DNA, 1651 bp, Zea Mays
ttcttgccccctacgcagccgtgtgccgtacaccgtgcacgcacgccgctcctcgcctccctgcaccatggacgccggcgagtgctccacctccaaaccccctcagccctctgccgcctccccgtcctcccccaccgtatgggctaggctggtgcccgccgattccgcgtgcccgacggtggaggtggccgaagacgactccgtggtctgctccctcgttgcgccgccctgcggcggggaggaggtcgcgtggtgcgagatcaggcggaatgccggggacgcgtcgtccgccactattcggaaccttagctcggatgcaattattgttgatggaagaattgtcgaacaagaatgcgtagacatcaaaccaggcagtgagattgtctctggaccccagaaagaagaggcagaggatcatgaaaaaaaaaatgtcaagattgttctagatatcgagaatgcaaaatgcagcatatgcctgaatttgtggcatgatgttgttactgttgctccatgcctgcacaacttctgcaatggatgtttctcagagtggttaaggaggtcttcatctaattcacgtgataaaagccagagcgctgcatgcccacaatgtaggacaacagttcaatcagttggaaggaatcacttcctgcataatattgaagaggctatattgcaagctttttcctcactacagagatctgatgaggagattgcgttgttagagtcgtatgcttcagttaagtcgaatatggttttgggtcaacagaaaaaccaatcaaggaaaagacgtttttcacgttctagtgatgataccgacaattcagatctaccatgtcctcaatgccgtaatgaatttggtggatttagatgcagcccaggatctgtgcacttgcaatgcagtggatgtggaggaatgatgccagccagatctaacatcagtataccacaaaaatgcttggggtgtgataaagcgttttgtggggcttattggtattcgcaaggtgtgagttcaagtcattgcaatctgatctgcaaccaggatactttgaagagtatttatcagcgacatatctctgcacttcctgacacaattcatgggggcaatccatatgaaaaagatattacagaaagatgtatacagcaatcaggcaaaacattgcaagttgtaatctcagagtggatatcaaaatttgacaacatggaaattgatcgttcaaggttgcaattgaataatgtggatgcaattacttccaggacatatatctgcaaccattgctacagcaagtttgttgatttcctgctctactggttccgtgtatcattgccccaaaatcttcttccacgtgatgctgcggagagggagagctgctggtacggtttcatgtgccgcacccagcaccatcggcctgaccacgccaagaagctgaaccacgtgtgtcgcccgacaagaggcaaccagccctagtgagacttgactgtttctgtcaccattgtcatcaccatccattgtatgtgtgtgtcatcaaaatggtcaggaagtgtggcgcgtccatgtttggaaccctttttggtttgatcctggctggacctgacaaggaaattatattgctgctggtgccggaaccgccgctctgtcggcaggtccgggggg

SEQ ID NO: 41626 - DNA, 1468 bp, Zea Mays
ttcttgccccctacgcagccgtgtgccgtacaccgtgcacgcacgccgctcctcgcctccctgcaccatggacgccggcgagtgctccacctccaaaccccctcagccctctgccgcctccccgccctgcggcggggaggaggtcgcgtggtgcgagatcaggcggaatgccggggacgcgtcgtccgccactattcggaaccttagctcggatgcaattattgttgatggaagaattgtcgaacaagaatgcgtagacatcaaaccaggcagtgagattgtctctggaccccagaaagaagaggcagaggatcatgaaaaaaaaaatgtcaagattgttctagatatcgagaatgcaaaatgcagcatatgcctgaatttgtggcatgatgttgttactgttgctccatgcctgcacaacttctgcaatggatgtttctcagagtggttaaggaggtcttcatctaattcacgtgataaaagccagagcgctgcatgcccacaatgtaggacaacagttcaatcagttggaaggaatcacttcctgcataatattgaagaggctatattgcaagctttttcctcactacagagatctgatgaggagattgcgttgttagagtcgtatgcttcagttttgggtcaacagaaaaaccaatcaaggaaaagacgtttttcacgttctagtgatgataccgacaattcagatctaccatgtcctcaatgccgtaatgaatttggtggatttagatgcagcccaggatctgtgcacttgcaatgcagtggatgtggaggaatgatgccagccagatctaacatcagtataccacaaaaatgcttggggtgtgataaagcgttttgtggggcttattggtattcgcaaggtgtgagttcaagtcattgcaatctgatctgcaaccaggatactttgaagagtattacagaaagatgtatacagcaatcaggcaaaacattgcaagttgtaatctcagagtggatatcaaaatttgacaacatggaaattgatcgttcaaggttgcaattgaataatgtggatgcaattacttccaggacatatatctgcaaccattgctacagcaagtttgttgatttcctgctctactggttccgtgtatcattgccccaaaatcttcttccacgtgatgctgcggagagggagagctgctggtacggtttcatgtgccgcacccagcaccatcggcctgaccacgccaagaagctgaaccacgtgtgtcgcccgacaagaggcaaccagccctagtgagacttgactgtttctgtcaccattgtcatcaccatccattgtatgtgtgtgtcatcaaaatggtcaggaagtgtggcgcgtccatgtttggaaccctttttggtttgatcctggctggacctgacaaggaaattatattgctgctggtgccggaaccgccgctctgtcggcaggtccgggggg

SEQ ID NO: 41627 - DNA, 1615 bp, Zea Mays
ttcttgccccctacgcagccgtgtgccgtacaccgtgcacgcacgccgctcctcgcctccctgcaccatggacgccggcgagtgctccacctccaaaccccctcagccctctgccgcctccccgtcctcccccaccgtatgggctaggctggtgcccgccgattccgcgtgcccgacggtggaggtggccgaagacgactccgtggtctgctccctcgttgcgccgccctgcggcggggaggaggtcgcgtggtgcgagatcaggcggaatgccggggacgcgtcgtccgccactattcggaaccttagctcggatgcaattattgttgatggaagaattgtcgaacaagaatgcgtagacatcaaaccaggcagtgagattgtctctggaccccagaaagaagggcatttaatatatacatttgaaattacagaggcagaggatcatgaaaaaaaaaatgtcaagattgttctagatatcgagaatgcaaaatgcagcatatgcctgaatttgtggcatgatgttgttactgttgctccatgcctgcacaacttctgcaatggatgtttctcagagtggttaaggaggtcttcatctaattcacgtgataaaagccagagcgctgcatgcccacaatgtaggacaacagttcaatcagttggaaggaatcacttcctgcataatattgaagaggctatattgcaagctttttcctcactacagagatctgatgaggagattgcgttgttagagtcgtatgcttcagttaagtcgaatatggttttgggtcaacagaaaaaccaatcaaggaaaagacgtttttcacgttctagtgatgataccgacaattcagatctaccatgtcctcaatgccgtaatgaatttggtggatttagatgcagcccaggatctgtgcacttgcaatgcagtggatgtggaggaatgatgccagccagatctaacatcagtataccacaaaaatgcttggggtgtgataaagcgttttgtggggcttattggtattcgcaaggtgtgagttcaagtcattgcaatctgatctgcaaccaggatactttgaagagtattacagaaagatgtatacagcaatcaggcaaaacattgcaagttgtaatctcagagtggatatcaaaatttgacaacatggaaattgatcgttcaaggttgcaattgaataatgtggatgcaattacttccaggacatatatctgcaaccattgctacagcaagtttgttgatttcctgctctactggttccgtgtatcattgccccaaaatcttcttccacgtgatgctgcggagagggagagctgctggtacggtttcatgtgccgcacccagcaccatcggcctgaccacgccaagaagctgaaccacgtgtgtcgcccgacaagaggcaaccagccctagtgagacttgactgtttctgtcaccattgtcatcaccatccattgtatgtgtgtgtcatcaaaatggtcaggaagtgtggcgcgtccatgtttggaaccctttttggtttgatcctggctggacctgacaaggaaattatattgctgctggtgccggaaccgccgctctgtcggcaggtccgggggg

SEQ ID NO: 41628 - DNA, 536 bp, Zea Mays
ctcacctgttattgggatggtttgttacatattttattacttgcaacacataacgtgattgatgcttggtgacagaatcggctgaagtacttgccctaaattcttccagttctttagtgagaagttgtcctgctcttgtatttcttgctcccaaacgttgagcacaaattagcacagcctgcacatcttgtatcctatttgatgtagtagcagacgaatcaatgttgaataatatcttgtgcatgttagatatgataatattcagtggatcctctgggtcatcagctaaaaggggatccagaccttcaagatcaaagtgttcagaaattgcccatatcaagcgtgaagatatacgtggagtgtgaacctggaaaggtacagttaatcaaatttaataatcttggactattctgaaaaagtaaatgtagagcatggatttgtttgtattcgctatttaaagagtcagcactagcctccttaatcactgcctaggcgctagtaggtgccagcacactacccgccttaaaaaaactcgg

SEQ ID NO: 41629 - DNA, 307 bp, Zea Mays
taagctgtagctgcaaatttctaagtcgcatctcattcagaatctgatcttgagatgcaccagctttaattgtcttcacaccacctctggtgtcgtatatatgacaaagcctcccaaacaactttagatagcaatcaactgcataggtacgaccatcacaatcccaaagaacacagggcctgcaaacttccaccacatccaaagcaggttctgtccaattaagggcaccataaccagttccgtaggctaaagctcctataactctgctctctgtcccagaattcttcaactctggtagtggaaggga

SEQ ID NO: 41630 - DNA, 1408 bp, Zea Mays
gcccaaccacaaccggccaacccaaccacaatcccccgtgcttgtgcgtacatttttttccatccattcagcctaaactatcacctaaaatctaggatatattattccccccaaaacaaaccctaaccggccggcccaattctcacgcgctcgccgcctaggagcattcacgttggcggcgggcggcggctcggttcctctcctccaccgcacctccaagaatccacctccacgactgagctgacggctcggtagcgccatggcagttcaccggctccaaccttccccatccggcctacagtgctccaccgcccggtcgccagtgctcctccatgggccacggctgacgggtgcacgcaccggttatttttccagcacttgacattcgagtgaaaaatgtcgcagggacatattctcttgaacataaaggagaaaatgatctcttcgcacatcagacaaggcttctactctttcagaagaaagtcatttttaggagaatcgtgaacaaaatgaccagatgtttaggcctggttggaaggacatttttcgaatgaatcagagtgagctcgaggctgagatttgaaaaggtctctcgagattctactcttgatccaaggaggaaggcctatctgatccaaaatctcatgaccagccgttggatagttgctcagcaataatcaccacaaccaagcgtcgaaggacataatggatgtacacgatgacctggatgtgttccttcgtaccgagacccagggaaacaaatatttgggctgtgagcattacaaaagaaactgcaagcttgttgctgcatgctgcaataagctattcacttgcagattctgtcacgataaagtaactcaagaggtccacttattgactcttatgaccatgtaattggtgttaatacaactacattaacatgtaaaggttggtagatctggaaggtcttgatggtctaatacctatctatgagtacggaagaaaaggcgggagaagtcggtctctgcagcatcgcgcgtgaaaaaaaatcagccaattccacgagcattgatgttgtcatgacttcaaaagaggagagaccatgctaagaataatgcattatgacatttgtcaggcttacatatcgactgtttgatatggatagatgtataggtttatgaccaatccagttcaaagcaattggagtatagaagaaataaggagaaacaggaaagctctgtacatcttgcattttgctgttgtttgtcgaagtttcaatgtctgtcgcgtgacaaaatatagttgtaatttatattttggcatgcacgaaacaggtgtatttattcatttttgaacgaaattttatgtcaaatcctctattgcgttatatacgaaattttaacgcggcatgcacggaaactaacactaa

SEQ ID NO: 41631 - DNA, 1669 bp, Zea Mays
gcccaaccacaaccggccaacccaaccacaatcccccgtgcttgtgcgtacatttttttccatccattcagcctaaactatcacctaaaatctaggatatattattccccccaaaacaaaccctaaccggccggcccaattctcacgcgctcgccgcctaggagcattcacgttggcggcgggcggcggctcggttcctctcctccaccgcacctccaagaatccacctccacgactgagctgacggctcggtagcgccatggcagttcaccggctccaaccttccccatccggcctacagtgctccaccgcccggtcgccagtgctcctccatgggccacggctgacgggtgcacgcaccgggcgacgagcacccaccaccggttatgtgcaccctctctccttcggtccttcctccctttcttccgtgctaagccaccgagcacccaagcggtttggcctgatgccacatctctggtaggagaggtggatttggtggacctagattcgatgtgcagagagcgacttggaggtggctgacatcttcaagcactgcatcatgcagttacaactactgttggccatacagggaaatgctgggcctattataccaattgttcaaagttatttttccagcacttgacattcgagtgaaaaatgtcgcagggacatattctcttgaacataaaggagaaaatgatctcttcgcacatcagacaaggcttctactctttcagaagaaagtcatttttaggagaatcgtgaacaaaatgaccagatgtttaggcctggttggaaggacatttttcgaatgaatcagagtgagctcgaggctgagatttgaaaaggtctctcgagattctactcttgatccaaggaggaaggcctatctgatccaaaatctcatgaccagccgttggatagttgctcagcaataatcaccacaaccaagcgtcgaaggacataatggatgtacacgatgacctggatgtgttccttcgtaccgagacccagggaaacaaatatttgggctgtgagcattacaaaagaaactgcaagcttgttgctgcatgctgcaataagctattcacttgcagattctgtcacgataaagtaactcaagaggtccacttattgactcttatgaccatgtaattggtgttaatacaactacattaacatgtaaaggttggtagatctggaaggtcttgatggtctaatacctatctatgagtacggaagaaaaggcgggagaagtcggtctctgcagcatcgcgcgtgaaaaaaaatcagccaattccacgagcattgatgttgtcatgacttcaaaagaggagagaccatgctaagaataatgcattatgacatttgtcaggcttacatatcgactgtttgatatggatagatgtataggtttatgaccaatccagttcaaagcaattggagtatagaagaaataaggagaaacaggaaagctctgtacatcttgcattttgctgttgtttgtcgaagtttcaatgtctgtcgcgtgacaaaatatagttgtaatttatattttggcatgcacgaaacaggtgtatttattcatttttgaacgaaattttatgtcaaatcctctattgcgttatatacgaaattttaacgcggcatgcacggaaactaacactaa

SEQ ID NO: 41632 - DNA, 1828 bp, Zea Mays
gcccaaccacaaccggccaacccaaccacaatcccccgtgcttgtgcgtacatttttttccatccattcagcctaaactatcacctaaaatctaggatatattattccccccaaaacaaaccctaaccggccggcccaattctcacgcgctcgccgcctaggagcattcacgttggcggcgggcggcggctcggttcctctcctccaccgcacctccaagaatccacctccacgactgagctgacggctcggtagcgccatggcagttcaccggctccaaccttccccatccggcctacagtgctccaccgcccggtcgccagtgctcctccatgggccacggctgacgggtgcacgcaccgatggttggtgcaggtaggagaggtggatttggtggacctagattcgatgtgcagagagcgacttggaggtggctgacatcttcaagcactgcatcatgcagttacaactactgttggccatacagggaaatgctgggcctattataccaattgttcaaagcatggaccttgtataattacatgtttttatcatagatagattaatttctgaaatgcccatagattggtatatttgtggaaatttatttgccaactgtaagcccgtcgtgatgcatagaacatttgtggtataagatttttctgttgatgtttgcaggttatttttccagcacttgacattcgagtgaaaaatgtcgcagggacatattctcttgaacataaaggagaaaatgatctcttcgcacatcagacaaggcttctactctttcagaaggtttgttcagttggttttttatcctctagaatggtggacgggatttctatgtcattgagatatttttatttggccttgtagaaagtcatttttaggagaatcgtgaacaaaatgaccagatgtttaggcctggttggaaggacatttttcgaatgaatcagagtgagctcgaggctgagatttgaaaaggtctctcgagattctactcttgatccaaggaggaaggcctatctgatccaaaatctcatgaccagccgttggatagttgctcagcaataatcaccacaaccaagcgtcgaaggacataatggatgtacacgatgacctggatgtgttccttcgtaccgagacccagggaaacaaatatttgggctgtgagcattacaaaagaaactgcaagcttgttgctgcatgctgcaataagctattcacttgcagattctgtcacgataaagttagtgaccatacaatggacaagtaactcaagaggtccacttattgactcttatgaccatgtaattggtgttaatacaactacattaacatgtaaaggttggtagatctggaaggtcttgatggtctaatacctatctatgagtacggaagaaaaggcgggagaagtcggtctctgcagcatcgcgcgtgaaaaaaaatcagccaattccacgagcattgatgttgtcatgacttcaaaagaggagagaccatgctaagaataatgcattatgacatttgtcaggcttacatatcgactgtttgatatggatagatgtataggtttatgaccaatccagttcaaagcaattggagtatagaagaaataaggagaaacaggaaagctctgtacatcttgcattttgctgttgtttgtcgaagtttcaatgtctgtcgcgtgacaaaatatagttgtaatttatattttggcatgcacgaaacaggtgtatttattcatttttgaacgaaattttatgtcaaatcctctattgcgttatatacgaaattttaacgcggcatgcacggaaactaacactaa

SEQ ID NO: 41633 - DNA, 1626 bp, Zea Mays
gcccaaccacaaccggccaacccaaccacaatcccccgtgcttgtgcgtacatttttttccatccattcagcctaaactatcacctaaaatctaggatatattattccccccaaaacaaaccctaaccggccggcccaattctcacgcgctcgccgcctaggagcattcacgttggcggcgggcggcggctcggttcctctcctccaccgcacctccaagaatccacctccacgactgagctgacggctcggtagcgccatggcagttcaccggctccaaccttccccatccggcctacagtgctccaccgcccggtcgccagtgctcctccatgggccacggctgacgggtgcacgcaccgggcgacgagcacccaccaccggttatgtgcaccctctctccttcggtccttcctccctttcttccgtgctaagccaccgagcacccaagcggtttggcctgatgccacatctctggtaggagaggtggatttggtggacctagattcgatgtgcagagagcgacttggaggtggctgacatcttcaagcactgcatcatgcagttacaactactgttggccatacagggaaatgctgggcctattataccaattgttcaaagcatggaccttgtataattacatgtttttatcatagatagattaatttctgaaatgcccatagattggtatatttgtggaaatttatttgccaactgtaagcccgtcgtgatgcatagaacatttgtggtataagatttttctgttgatgtttgcaggttatttttccagcacttgacattcgagtgaaaaatgtcgcagggacatattctcttgaacataaaggagaaaatgatctcttcgcacatcagacaaggcttctactctttcagaagaaagtcatttttaggagaatcgtgaacaaaatgaccagatgtttaggcctggttggaaggacatttttcgaatgaatcagagtgagctcgaggctgagatttgaaaaggtctctcgagattctactcttgatccaaggaggaaggcctatctgatccaaaatctcatgaccaggtaactcaagaggtccacttattgactcttatgaccatgtaattggtgttaatacaactacattaacatgtaaaggttggtagatctggaaggtcttgatggtctaatacctatctatgagtacggaagaaaaggcgggagaagtcggtctctgcagcatcgcgcgtgaaaaaaaatcagccaattccacgagcattgatgttgtcatgacttcaaaagaggagagaccatgctaagaataatgcattatgacatttgtcaggcttacatatcgactgtttgatatggatagatgtataggtttatgaccaatccagttcaaagcaattggagtatagaagaaataaggagaaacaggaaagctctgtacatcttgcattttgctgttgtttgtcgaagtttcaatgtctgtcgcgtgacaaaatatagttgtaatttatattttggcatgcacgaaacaggtgtatttattcatttttgaacgaaattttatgtcaaatcctctattgcgttatatacgaaattttaacgcggcatgcacggaaactaacactaa

SEQ ID NO: 41634 - DNA, 1577 bp, Zea Mays
gcccaaccacaaccggccaacccaaccacaatcccccgtgcttgtgcgtacatttttttccatccattcagcctaaactatcacctaaaatctaggatatattattccccccaaaacaaaccctaaccggccggcccaattctcacgcgctcgccgcctaggagcattcacgttggcggcgggcggcggctcggttcctctcctccaccgcacctccaagaatccacctccacgactgagctgacggctcggtagcgccatggcagttcaccggctccaaccttccccatccggcctacagtgctccaccgcccggtcgccagtgctcctccatgggccacggctgacgggtgcacgcaccggtaggagaggtggatttggtggacctagattcgatgtgcagagagcgacttggaggtggctgacatcttcaagcactgcatcatgcagttacaactactgttggccatacagggaaatgctgggcctattataccaattgttcaaagttatttttccagcacttgacattcgagtgaaaaatgtcgcagggacatattctcttgaacataaaggagaaaatgatctcttcgcacatcagacaaggcttctactctttcagaagaaagtcatttttaggagaatcgtgaacaaaatgaccagatgtttaggcctggttggaaggacatttttcgaatgaatcagagtgagctcgaggctgagatttgaaaaggtctctcgagattctactcttgatccaaggaggaaggcctatctgatccaaaatctcatgaccagccgttggatagttgctcagcaataatcaccacaaccaagcgtcgaaggacataatggatgtacacgatgacctggatgtgttccttcgtaccgagacccagggaaacaaatatttgggctgtgagcattacaaaagaaactgcaagcttgttgctgcatgctgcaataagctattcacttgcagattctgtcacgataaagttagtgaccatacaatggacaagtaactcaagaggtccacttattgactcttatgaccatgtaattggtgttaatacaactacattaacatgtaaaggttggtagatctggaaggtcttgatggtctaatacctatctatgagtacggaagaaaaggcgggagaagtcggtctctgcagcatcgcgcgtgaaaaaaaatcagccaattccacgagcattgatgttgtcatgacttcaaaagaggagagaccatgctaagaataatgcattatgacatttgtcaggcttacatatcgactgtttgatatggatagatgtataggtttatgaccaatccagttcaaagcaattggagtatagaagaaataaggagaaacaggaaagctctgtacatcttgcattttgctgttgtttgtcgaagtttcaatgtctgtcgcgtgacaaaatatagttgtaatttatattttggcatgcacgaaacaggtgtatttattcatttttgaacgaaattttatgtcaaatcctctattgcgttatatacgaaattttaacgcggcatgcacggaaactaacactaa

SEQ ID NO: 41635 - DNA, 1463 bp, Zea Mays
gcccaaccacaaccggccaacccaaccacaatcccccgtgcttgtgcgtacatttttttccatccattcagcctaaactatcacctaaaatctaggatatattattccccccaaaacaaaccctaaccggccggcccaattctcacgcgctcgccgcctaggagcattcacgttggcggcgggcggcggctcggttcctctcctccaccgcacctccaagaatccacctccacgactgagctgacggctcggtagcgccatggcagttcaccggctccaaccttccccatccggcctacagtgctccaccgcccggtcgccagtgctcctccatgggccacggctgacgggtgcacgcaccggtaggagaggtggatttggtggacctagattcgatgtgcagagagcgacttggaggttatttttccagcacttgacattcgagtgaaaaatgtcgcagggacatattctcttgaacataaaggagaaaatgatctcttcgcacatcagacaaggcttctactctttcagaagaaagtcatttttaggagaatcgtgaacaaaatgaccagatgtttaggcctggttggaaggacatttttcgaatgaatcagagtgagctcgaggctgagatttgaaaaggtctctcgagattctactcttgatccaaggaggaaggcctatctgatccaaaatctcatgaccagccgttggatagttgctcagcaataatcaccacaaccaagcgtcgaaggacataatggatgtacacgatgacctggatgtgttccttcgtaccgagacccagggaaacaaatatttgggctgtgagcattacaaaagaaactgcaagcttgttgctgcatgctgcaataagctattcacttgcagattctgtcacgataaagtaactcaagaggtccacttattgactcttatgaccatgtaattggtgttaatacaactacattaacatgtaaaggttggtagatctggaaggtcttgatggtctaatacctatctatgagtacggaagaaaaggcgggagaagtcggtctctgcagcatcgcgcgtgaaaaaaaatcagccaattccacgagcattgatgttgtcatgacttcaaaagaggagagaccatgctaagaataatgcattatgacatttgtcaggcttacatatcgactgtttgatatggatagatgtataggtttatgaccaatccagttcaaagcaattggagtatagaagaaataaggagaaacaggaaagctctgtacatcttgcattttgctgttgtttgtcgaagtttcaatgtctgtcgcgtgacaaaatatagttgtaatttatattttggcatgcacgaaacaggtgtatttattcatttttgaacgaaattttatgtcaaatcctctattgcgttatatacgaaattttaacgcggcatgcacggaaactaacactaa

SEQ ID NO: 41636 - DNA, 1495 bp, Zea Mays
cggcccgacggctactgtcttgaggcatacgggcgacgagcacccaccaccggttatgtgcaccctctctccttcggtccttcctccctttcttccgtgctaagccaccgagcacccaagcggtttggcctgatgccacatctctggtaggagaggtggatttggtggacctagattcgatgtgcagagagcgacttggaggtggctgacatcttcaagcactgcatcatgcagttacaactactgttggccatacagggaaatgctgggcctattataccaattgttcaaagcatggaccttgtataattacatgtttttatcatagatagattaatttctgaaatgcccatagattggtatatttgtggaaatttatttgccaactgtaagcccgtcgtgatgcatagaacatttgtggtataagatttttctgttgatgtttgcaggttatttttccagcacttgacattcgagtgaaaaatgtcgcagggacatattctcttgaacataaaggagaaaatgatctcttcgcacatcagacaaggcttctactctttcagaagaaagtcatttttaggagaatcgtgaacaaaatgaccagatgtttaggcctggttggaaggacatttttcgaatgaatcagagtgagctcgaggctgagatttgaaaaggtctctcgagattctactcttgatccaaggaggaaggcctatctgatccaaaatctcatgaccagccgttggatagttgctcagcaataatcaccacaaccaagcgtcgaaggacataatggatgtacacgatgacctggatgtgttccttcgtaccgagacccagggaaacaaatatttgggctgtgagcattacaaaagaaactgcaagcttgttgctgcatgctgcaataagctattcacttgcagattctgtcacgataaagtaactcaagaggtccacttattgactcttatgaccatgtaattggtgttaatacaactacattaacatgtaaaggttggtagatctggaaggtcttgatggtctaatacctatctatgagtacggaagaaaaggcgggagaagtcggtctctgcagcatcgcgcgtgaaaaaaaatcagccaattccacgagcattgatgttgtcatgacttcaaaagaggagagaccatgctaagaataatgcattatgacatttgtcaggcttacatatcgactgtttgatatggatagatgtataggtttatgaccaatccagttcaaagcaattggagtatagaagaaataaggagaaacaggaaagctctgtacatcttgcattttgctgttgtttgtcgaagtttcaatgtctgtcgcgtgacaaaatatagttgtaatttatattttggcatgcacgaaacaggtgtatttattcatttttgaacgaaattttatgtcaaatcctctattgcgttatatacgaaattttaacgcggcatgcacggaaactaacactaa

SEQ ID NO: 41637 - DNA, 1493 bp, Zea Mays
ccacctcgtacccagtcaccagatctcaaggcgacgagcacccaccaccggttatgtgcaccctctctccttcggtccttcctccctttcttccgtgctaagccaccgagcacccaagcggtttggcctgatgccacatctctggtaggagaggtggatttggtggacctagattcgatgtgcagagagcgacttggaggtggctgacatcttcaagcactgcatcatgcagttacaactactgttggccatacagggaaatgctgggcctattataccaattgttcaaagcatggaccttgtataattacatgtttttatcatagatagattaatttctgaaatgcccatagattggtatatttgtggaaatttatttgccaactgtaagcccgtcgtgatgcatagaacatttgtggtataagatttttctgttgatgtttgcaggttatttttccagcacttgacattcgagtgaaaaatgtcgcagggacatattctcttgaacataaaggagaaaatgatctcttcgcacatcagacaaggcttctactctttcagaagaaagtcatttttaggagaatcgtgaacaaaatgaccagatgtttaggcctggttggaaggacatttttcgaatgaatcagagtgagctcgaggctgagatttgaaaaggtctctcgagattctactcttgatccaaggaggaaggcctatctgatccaaaatctcatgaccagccgttggatagttgctcagcaataatcaccacaaccaagcgtcgaaggacataatggatgtacacgatgacctggatgtgttccttcgtaccgagacccagggaaacaaatatttgggctgtgagcattacaaaagaaactgcaagcttgttgctgcatgctgcaataagctattcacttgcagattctgtcacgataaagtaactcaagaggtccacttattgactcttatgaccatgtaattggtgttaatacaactacattaacatgtaaaggttggtagatctggaaggtcttgatggtctaatacctatctatgagtacggaagaaaaggcgggagaagtcggtctctgcagcatcgcgcgtgaaaaaaaatcagccaattccacgagcattgatgttgtcatgacttcaaaagaggagagaccatgctaagaataatgcattatgacatttgtcaggcttacatatcgactgtttgatatggatagatgtataggtttatgaccaatccagttcaaagcaattggagtatagaagaaataaggagaaacaggaaagctctgtacatcttgcattttgctgttgtttgtcgaagtttcaatgtctgtcgcgtgacaaaatatagttgtaatttatattttggcatgcacgaaacaggtgtatttattcatttttgaacgaaattttatgtcaaatcctctattgcgttatatacgaaattttaacgcggcatgcacggaaactaacactaa

SEQ ID NO: 41638 - DNA, 1033 bp, Zea Mays
tcgtcccgatgccatatggatttctctatcgacacagttcgcaataatcaactcgtttctctccgattgctcctccgagtccgagactccgttctctcccgcatccaccgccgtctcatccccaatccgagcaacgcctcccctcgcctccaaaaccctacccctcctgtcaccggcgggggcatgaaccggtgatcgcttacctggtctcgtctgtctgcgcacgcgcgagatgacggtggcatatttgaaggagaagccagcaggccagggttccacgccttcaacaccaagtgctggtagtgggatgcggtctgcagctgcgagactgcttggcactgggaatggtagccggacacttagcttcgggagcaatggtaccagcagggctgtctcaggaagcagccgcatgggtggaggtattggtgtgtcaactagtgcaagtggatcgcaaggcatggcgaactacgatggaaagggctcatacatcatattcaatactgcggatacgctcttcatcagtgatctcaactcacatgacaaagatccaataaagtccatccacttcagcagctcaaacccgctttgccatgcatttgacccagaggccaaggatggacatgatctgctcattggggtgttctcaggagatgtctattcaatgtcactgaggcatcagttgcaagatcctggaaagaagcctgtttcataccagcattttgttaataaagacaaagacaaagataaagatccaagtcaagttgatgcccattctctcccggttttagcggttgatgaggtggtagctcctggatctcctgactccactgctcaggacgtggactgggatccagttgacgcccattctctcccgttggtctcggttgatggggtggaggctcctggggttcttgttggcactgttactagtgagcctgttgttcagctggtgtctactgttctatctatgtcagctgcaccgcctggttctgggaatcaggtgactgaggtccttccggtcagagtgatgtga

SEQ ID NO: 41639 - DNA, 2352 bp, Zea Mays
tcgtcccgatgccatatggatttctctatcgacacagttcgcaataatcaactcgtttctctccgattgctcctccgagtccgagactccgttctctcccgcatccaccgccgtctcatccccaatccgagcaacgcctcccctcgcctccaaaaccctacccctcctgtcaccggcgggggcatgaaccggtgatcgcttacctggtctcgtctgtctgcgcacgcgcgaggtcagtgagtgagcattgcggtggtccgatcgcccgcggggggccatggcgtctgtggcgggatcgggcggcggggcaagcgcgggggccggtgggttgaagacttacttcaagacccccgaggggcggcacaagctgcagtacgagaagacgcactcccccgccgtcgtgcactacaaccacaacggcaagaccgtcgcccagatgacggtggcatatttgaaggagaagccagcaggccagggttccacgccttcaacaccaagtgctggtagtgggatgcggtctgcagctgcgagactgcttggcactgggaatggtagccggacacttagcttcgggagcaatggtaccagcagggctgtctcaggaagcagccgcatgggtggaggtattggtgtgtcaactagtgcaagtggatcgcaaggcatggcgaactacgatggaaagggctcatacatcatattcaatactgcggatacgctcttcatcagtgatctcaactcacatgacaaagatccaataaagtccatccacttcagcagctcaaacccgctttgccatgcatttgacccagaggccaaggatggacatgatctgctcattggggtgttctcaggagatgtctattcaatgtcactgaggcatcagttgcaagatcctggaaagaagcctgtttcataccagcattttgttaataaagacaaagacaaagataaagatccaagtcaaggtggcgctgccagcagtcagtgcacctgtgttgcatgggttccggagcgtgaaggaatttttgttgttagtcatgctgatgggaatctgtatgtgtatgacaaattcaaggatggaaatactgattggacatttccaactgttaaggatcaaagccaggtgctaatttcacatgcaaagtcgaggcaatccaattgcaaggtggcacatctgtcaaggtgcaatcaatggcatttccttttcaccggatggtgcttacttggcaactgttgggcgagatggttatttaagagtatttgacttcacgaaagaacaactaatatttggtgggaaaagttactatggtgcactgttgtgttgctcttggagtgcggatggcaaatatttgttatcgggtggtgaagatgatcttgtgcaagtatggagcatggatgacagaaagatagttgcatggggtgaagggcataattcatgggttagcacagtttcttttgatccgtattggtcccaattaatttgcaattatacaggttagtgcagtttcttttgatccgtgttggtcccaaccaaattcagatgaaactgaagaaaatgtcatgtatcgctttgggtcagttggacaggatacccaactgcttctctgggatctggcattggacgagattgctgtccctctacgccatccttccggtgggtcaccgacattcagtagtggaagcccttctgcacactgggataatgcatgccctccaaccggtgttctccaaccctctccacggatgcgagatgtgccgaagctctcacctctcgttgcacaccgggtacatgtagatcccctatctggcttggaattcaccagtgaatcaattgtcactatatgccgtgaggggctaatcaaaatttgggcacgacccatccatagtgaaaacaaccagcagccagattcttctgaacaggttataggcagtgccactgctaaggataagatgttaacatcgtcaaataaagcagagtagcttgggaaggcttgcagtaaaggattgaagaggctttgctagcatttttgttagccatttcttatcctgcttcatcggcaacgtttctagttacagaagtgtcattgttgccatcaatgttggcgaaagaaaataacagaacttgctcctgtacatatacagacattgccataagatgaaatattacaagcttactggtttgatattatttgtttctttggtgcagtcaggtgggcagccgatagattcccgcgtgagaacagtattttttcctcagtcaggcaatatttggtttttgtcggggcacactaactgctgtaaacgctacttaagtttatacgttatacagcaattcagaattcatttcttata

SEQ ID NO: 41640 - DNA, 2071 bp, Zea Mays
tcgtcccgatgccatatggatttctctatcgacacagttcgcaataatcaactcgtttctctccgattgctcctccgagtccgagactccgttctctcccgcatccaccgccgtctcatccccaatccgagcaacgcctcccctcgcctccaaaaccctacccctcctgtcaccggcgggggcatgaaccggtgatcgcttacctggtctcgtctgtctgcgcacgcgcgaggtcagtgagtgagcattgcggtggtccgatcgcccgcggggggccatggcgtctgtggcgggatcgggcggcggggcaagcgcgggggccggtgggttgaagacttacttcaagacccccgaggggcggcacaagctgcagtacgagaagacgcactcccccgccgtcgtgcactacaaccacaacggcaagaccgtcgcccagatgacggtggcatatttgaaggagaagccagcaggccagggttccacgccttcaacaccaagtgctggtagtgggatgcggtctgcagctgcgagactgcttggcactgggaatggtagccggacacttagcttcgggagcaatggtaccagcagggctgtctcaggaagcagccgcatgggtggaggtattggtgtgtcaactagtgcaagtggatcgcaaggcatggcgaactacgatggaaagggctcatacatcatattcaatactgcggatacgctcttcatcagtgatctcaactcacatgacaaagatccaataaagtccatccacttcagcagctcaaacccgctttgccatgcatttgacccagaggccaaggatggacatgatctgctcattggggtgttctcaggagatgtctattcaatgtcactgaggcatcagttgcaagatcctggaaagaagcctgtttcataccagcattttgttaataaagacaaagacaaagataaagatccaagtcaaggtggcgctgccagcagtcagtgcacctgtgttgcatgggttccggagcgtgaaggaatttttgttgttagtcatgctgatgggaatctgtatgtgtatgacaaattcaaggatggaaatactgattggacatttccaactgttaaggatcaaagccaggtgctaatttcacatgcaaagtcgagtaagggcaatccaattgcaaggtggcacatctgtcaaggtgcaatcaatggcatttccttttcaccggatggtgcttacttggcaactgttgggcgagatggttatttaagagtatttgacttcacgaaagaacaactaatatttggtgggaaaagttactatggtgcactgttgtgttgctcttggagtgcggatggcaaatatttgttatcgggtggtgaagatgatcttgtgcaagtatggagcatggatgacagaaagatagttgcatggggtgaagggcataattcatgggttagtgcagtttcttttgatccgtgttggtcccaaccaaattcagatgaaactgaagaaaatgtcatgtatcgctttgggtcagttggacaggatacccaactgcttctctgggatctggcattggacgagattgctgtccctctacgccatccttccggtgggtcaccgacattcagtagtggaagcccttctgcacactgggataatgcatgccctccaaccggtgttctccaaccctctccacggatgcgagatgtgccgaagctctcacctctcgttgcacaccgggtacatgtagatcccctatctggcttggaattcaccagtgaatcaattgtcactatatgccgtgaggggctaatcaaaatttgggcacgacccatccatagtgaaaacaaccagcagccagattcttctgaacaggttataggcagtgccactgctaaggataagatgttaacatcgtcaaataaagcagtcaggtgggcagccgatagattcccgcgtgagaacagtattttttcctcagtcaggcaatatttggtttttgtcggggcacactaactgctgtaaacgctacttaagtttatacgttatacagcaattcagaattcatttcttata

SEQ ID NO: 41641 - DNA, 2336 bp, Zea Mays
tcgtcccgatgccatatggatttctctatcgacacagttcgcaataatcaactcgtttctctccgattgctcctccgagtccgagactccgttctctcccgcatccaccgccgtctcatccccaatccgagcaacgcctcccctcgcctccaaaaccctacccctcctgtcaccggcgggggcatgaaccggtgatcgcttacctggtctcgtctgtctgcgcacgcgcgaggtcagtgagtgagcattgcggtggtccgatcgcccgcggggggccatggcgtctgtggcgggatcgggcggcggggcaagcgcgggggccggtgggttgaagacttacttcaagacccccgaggggcggcacaagctgcagtacgagaagacgcactcccccgccgtcgtgcactacaaccacaacggcaagaccgtcgcccagatgacggtggcatatttgaaggagaagccagcaggccagggttccacgccttcaacaccaagtgctggtagtgggatgcggtctgcagctgcgagactgcttggcactgggaatggtagccggacacttagcttcgggagcaatggtaccagcagggctgtctcaggaagcagccgcatgggtggaggtattggtgtgtcaactagtgcaagtggatcgcaaggcatggcgaactacgatggaaagggctcatacatcatattcaatactgcggatacgctcttcatcagtgatctcaactcacatgacaaagatccaataaagtccatccacttcagcagctcaaacccgctttgccatgcatttgacccagaggccaaggatggacatgatctgctcattggggtgttctcaggagatgtctattcaatgtcactgaggcatcagttgcaagatcctggaaagaagcctgtttcataccagcattttgttaataaagacaaagacaaagataaagatccaagtcaaggtggcgctgccagcagtcagtgcacctgtgttgcatgggttccggagcgtgaaggaatttttgttgttagtcatgctgatgggaatctttcaaggatggaaatactgattggacatttccaactgttaaggatcaaagccaggtgctaatttcacatgcaaagtcgaggcaatccaattgcaaggtggcacatctgtcaaggtgcaatcaatggcatttccttttcaccggatggtgcttacttggcaactgttgggcgagatggttatttaagagtatttgacttcacgaaagaacaactaatatttggtgggaaaagttactatggtgcactgttgtgttgctcttggagtgcggatggcaaatatttgttatcgggtggtgaagatgatcttgtgcaagtatggagcatggatgacagaaagatagttgcatggggtgaagggcataattcatgggttagcacagtttcttttgatccgtattggtcccaattaatttgcaattatacaggttagtgcagtttcttttgatccgtgttggtcccaaccaaattcagatgaaactgaagaaaatgtcatgtatcgctttgggtcagttggacaggatacccaactgcttctctgggatctggcattggacgagattgctgtccctctacgccatccttccggtgggtcaccgacattcagtagtggaagcccttctgcacactgggataatgcatgccctccaaccggtgttctccaaccctctccacggatgcgagatgtgccgaagctctcacctctcgttgcacaccgggtacatgtagatcccctatctggcttggaattcaccagtgaatcaattgtcactatatgccgtgaggggctaatcaaaatttgggcacgacccatccatagtgaaaacaaccagcagccagattcttctgaacaggttataggcagtgccactgctaaggataagatgttaacatcgtcaaataaagcagagtagcttgggaaggcttgcagtaaaggattgaagaggctttgctagcatttttgttagccatttcttatcctgcttcatcggcaacgtttctagttacagaagtgtcattgttgccatcaatgttggcgaaagaaaataacagaacttgctcctgtacatatacagacattgccataagatgaaatattacaagcttactggtttgatattatttgtttctttggtgcagtcaggtgggcagccgatagattcccgcgtgagaacagtattttttcctcagtcaggcaatatttggtttttgtcggggcacactaactgctgtaaacgctacttaagtttatacgttatacagcaattcagaattcatttcttata

SEQ ID NO: 41642 - DNA, 1296 bp, Zea Mays
atggatgcttttctttacatagttatgaaatttcagtgcacctgtgttgcatgggttccggagcgtgaaggaatttttgttgttagtcatgctgatgggaatctgtatgtgtatgacaaattcaaggatggaaatactgattggacatttccaactgttaaggatcaaagccaggtgctaatttcacatgcaaagtcgagtaagggcaatccaattgcaaggtggcacatctgtcaaggtgcaatcaatggcatttccttttcaccggatggtgcttacttggcaactgttgggcgagatggttatttaagagtatttgacttcacgaaagaacaactaatatttggtgggaaaagttactatggtgcactgttgtgttgctcttggagtgcggatggcaaatatttgttatcgggtggtgaagatgatcttgtgcaagttagtgcagtttcttttgatccgtgttggtcccaaccaaattcagatgaaactgaagaaaatgtcatgtatcgctttgggtcagttggacaggatacccaactgcttctctgggatctggcattggacgagattgctgtccctctacgccatccttccggtgggtcaccgacattcagtagtggaagcccttctgcacactgggataatgcatgccctccaaccggtgttctccaaccctctccacggatgcgagatgtgccgaagctctcacctctcgttgcacaccgggtacatgtagatcccctatctggcttggaattcaccagtgaatcaattgtcactatatgccgtgaggggctaatcaaaatttgggcacgacccatccatagtgaaaacaaccagcagccagattcttctgaacaggttataggcagtgccactgctaaggataagatgttaacatcgtcaaataaagcagagtagcttgggaaggcttgcagtaaaggattgaagaggctttgctagcatttttgttagccatttcttatcctgcttcatcggcaacgtttctagttacagaagtgtcattgttgccatcaatgttggcgaaagaaaataacagaacttgctcctgtacatatacagacattgccataagatgaaatattacaagcttactggtttgatattatttgtttctttggtgcagtcaggtgggcagccgatagattcccgcgtgagaacagtattttttcctcagtcaggcaatatttggtttttgtcggggcacactaactgctgtaaacgctacttaagtttatacgttatacagcaattcagaattcatttcttata

SEQ ID NO: 41643 - DNA, 2660 bp, Zea Mays
cccggctgccgcgtgaaggagaacgacggagatggagaacgcgacggggatggaggagaactgacaacccggtttcaaccagactaatactgctctgaatccgttaatggagttgacatgtctattttagagtattgactatgcccagtttttctataatggagaaaccctcgcctgtgcctctatttcgttgaagccgcatccgtcgcgtttcataatgtcaaatctctcgcgagcgaggcagacccacgggccgcggccatctcacggtggaagcagccaagcagccggcctggcgcccctccccttccgtcccgccgctgctgccgtgcctcgtgcctgccagcggcggatgccgccccgccccgctgctgaccaccgccgctgctgagcatggccgccgctcccgcgggcgctcagaaccgctgcgtcttcgttggcaacataccatatgatgcgacggaggagcagctcgtgcagatttgcgaagaagtcggcccagtcgtatccttcagattggtgattgacaaagagaccggcaagccaaaaggttatggcttttgcgagtacaaggatgaggaaactgctttaagtgcacgccggaaccttcagggttacgagattaatggtcgtcagttacgtgttgattttgctgaaagtgggaggaacactgatagaaatagagaaaaggtcgacaatcctcaaaattattgtagaagagcctttcctaccactttggagttctctgttaatatgagaagttgtatagtctttgttcctgtgaataataatagttgtgccttctctgaccaccctgtgtctcctgttgcaatttcttacaagcatgtttgtggtcgtggaggaccagggatggcatctaatgttgatagtcaaaaacggttagctgggacttctgttgttggagagacaaactttcatcagcctgttggtctcccaccggcaatacatgctgcatctgtgatggctggtgtccttggtggagctcagactgcaaatgttcaaaacggtttacctgtccagtatggacttggaaacgaccctcttactcattatttggccagaatgtcaaggcatcagttgcacgaagtcatggctgaattgaagttcctaactactcaaaacaaagaacattccaaaactttgctgcaaggaattccacagctgccaaaggccttatttcaggcacaaataatgcttgggatggtgacaccacagatgatgcagatggcaaagagccaacagccgttgggctccttagcacaatcttcatctcacctcaatgagccatatccacagccagagccagatgctatggttccagtagtctcaagaccatcaagtttgccaactaacgtactaccaaacccagttatcctacaggaacaaacagctgcaatacatagttttcctcagcatcaacatgcatctcagccccaagtcaaaatgtttccacatggacaaccgtctgggatcaccgcacaatctccaatgctacatcagccccttggtggttcttccagtgttcctattcaatctcttgtgacctcagtaggcttaacctcacaggttcagcctccatttgtgccagagcaccctggaccacctgtcatgcctacaagtgtacaacagctacctttgacccaccctcatcttgctctggtagccgccgcacctgagactctaccaaatgaaataagggttgctgatcaagcaagtcatttgacagagtttactcatccttcaaaattgagaaaattggaggatggaacctcggtgcctggaatggtgaacagcagccatgctatttatacagctccactgcaagcagtgggccctagtggaccatcagggagctatagtgctggtgctggtagcttacaacaaccagggaatgaagggcagattacgcctgatgtggagtcagctcttctgcagcaagtcttgcagctgacacccgagcagctgagttcgttgccaccagagcaacagcagcaggtgattgaactccagaagatgctttcagctggtaaatagaagcaaccgagctagtgcagcaatattgccggtcgaggatctggcacgtcacataatggcgagttggcaactagtggaagctggaagtgatcctcagatttgttatcaagtcactaggccgcttcataacctgtcagcattttcttgtgggcatcttgatgccatcagttttgctcagaagtatccatatggctttctttcttcagatcagagataaaagaaatgttacaggagatggtagtttaaagaaagggatacacattatccatcactgctgtatcattatagggagaaaataacaataatctgtatccaaaggagctgtttttttttctgcttctccaaaatgggatatagcatcagatttttgtcctttccatttcgtgcaacagttgcaggtaggaaatgaattttgcgtaagcttgttatgttatcgagtagcatcctttatatttattctttatatcccttctttttctttatatcccttctttaccatttcttctaatgctccgtttggatatcggtattggaggacatgaagttgaattgatttcaataccaaatcagctatgatattaaaatgagatgcaatttcaattcta

SEQ ID NO: 41644 - DNA, 2226 bp, Zea Mays
tttcgttgaagccgcatccgtcgcgtttcataatgtcaaatctctcgcgagcgaggcagacccacgggccgcggccatctcacggtggaagcagccaagcagccggcctggcgcccctccccttccgtcccgccgctgctgccgtgcctcgtgcctgccagcggcggatgccgccccgccccgctgctgaccaccgccgctgctgagcatggccgccgctcccgcgggcgctcagaaccgctgcgtcttcgttggcaacataccatatgatgcgacggaggagcagctcgtgcagatttgcgaagaagtcggcccagtcgtatccttcagattggtgattgacaaagagaccggcaagccaaaaggttatggcttttgcgagtacaaggatgaggaaactgctttaagtgcacgccggaaccttcagggttacgagattaatggtcgtcagttacgtgttgattttgctgaaagtgggaggaacactgatagaaatagagaaaagggtcgtggaggaccagggatggcatctaatgttgatagtcaaaaacggttagctgggacttctgttgttggagagacaaactttcatcagcctgttggtctcccaccggcaatacatgctgcatctgtgatggctggtgtccttggtggagctcagactgcaaatgttcaaaacggtttacctgtccagtatggacttggaaacgaccctcttactcattatttggccagaatgtcaaggcatcagttgcacgaagtcatggctgaattgaagttcctaactactcaaaacaaagaacattccaaaactttgctgcaaggaattccacagctgccaaaggccttatttcaggcacaaataatgcttgggatggtgacaccacagatgatggcaaagagccaacagccgttgggctccttagcacaatcttcatctcacctcaatgagccatatccacagccagagccagatgctatggttccagtagtctcaagaccatcaagtttgccaactaacgtactaccaaacccagttatcctacaggaacaaacagctgcaatacatagttttcctcagcatcaacatgcatctcagccccaagtcaaaatgtttccacatggacaaccgtctgggatcaccgcacaatctccaatgctacatcagccccttgagcaccctggaccacctgtcatgcctacaagtgtacaacagctacctttgacccaccctcatcttgctctggtagccgccgcacctgagactctaccaaatgaaataagggttgctgatcaagcaagtcatttgacagagtttactcatccttcaaaattgagaaaattggaggatggaacctcggtgcctggaatggtgaacagcagccatgctatttatacagctccactgcaagcagtgggccctagtggaccatcagggagctatagtgctggtgctggtagcttacaacaaccagggaatgaagggcagattacgcctgatgtggagtcagctcttctgcagcaagtcttgcagctgacacccgagcagctgagttcgttgccaccagagcaacagcagcaggtgattgaactccagaagatgctttcagctggtaaatagaagcaaccgagctagtgcagcaatattgccggtcgaggatctggcacgtcacataatggcgagttggcaactagtggaagctggaagtgatcctcagatttgttatcaagtcactaggccgcttcataacctgtcagcattttcttgtgggcatcttgatgccatcagttttgctcagaagtatccatatggctttctttcttcagatcagagataaaagaaatgttacaggagatggtagtttaaagaaagggatacacattatccatcactgctgtatcattatagggagaaaataacaataatctgtatccaaaggagctgtttttttttctgcttctccaaaatgggatatagcatcagatttttgtcctttccatttcgtgcaacagttgcaggtaggaaatgaattttgcgtaagcttgttatgttatcgagtagcatcctttatatttattctttatatcccttctttttctttatatcccttctttaccatttcttctaatgctccgtttggatatcggtattggaggacatgaagttgaattgatttcaataccaaatcagctatgatattaaaatgagatgcaatttcaattcta

SEQ ID NO: 41645 - DNA, 2752 bp, Zea Mays
tttcgttgaagccgcatccgtcgcgtttcataatgtcaaatctctcgcgagcgaggcagacccacgggccgcggccatctcacggtggaagcagccaagcagccggcctggcgcccctccccttccgtcccgccgctgctgccgtgcctcgtgcctgccagcggcggatgccgccccgccccgctgctgaccaccgccgctgctgagcatggccgccgctcccgcgggcgctcagaaccgctgcgtcttcgttggcaacataccatatgatgcgacggaggagcagctcgtgcagatttgcgaagaagtcggcccagtcgtatccttcagattggtgattgacaaagagaccggcaagccaaaaggttatggcttttgcgagtacaaggatgaggaaactgctttaagtgcacgccggaaccttcagggttacgagattaatggtcgtcagttacgtgttgattttgctgaaagtgggaggaacactgatagaaatagagaaaaggtcgacaatcctcaaaattattgtagaagagcctttcctaccactttggagttctctgttaatatgagaagttgtatagtctttgttcctgtgaataataatagttgtgccttctctgaccaccctgtgtctcctgttgcaatttcttacaagcatgtttgtggtcgtggaggaccagggatggcatctaatgttgatagtcaaaaacggttagctgggacttctgttgttggagagacaaactttcatcagcctgttggtctcccaccggcaatacatgctgcatctgtgatggctggtgtccttggtggagctcagactgcaaatgttcaaaacggtttacctgtccagtatggacttggaaacgaccctcttactcattatttggccagaatgtcaaggcatcagttgcacgaagtcatggctgaattgaagttcctaactactcaaaacaaagaacattccaaaactttgctgcaaggaattccacagctgccaaaggccttatttcagtaaccagctgccgaactgcggtagatatctcagtcgaagtgaagacaatactttctcttcggcattcactgcattcatcacgctccaccatttctagagaaggataaagaccatgctggacacgtcttcagccatatattgaggatccatttcaccatatcccatggagattgcaggcaaatagtgtcagttagaactactatacgcttcaggttcattttaacagccaagctacagtggatcaggcgccaaacaaattgccttatgctttcaggtggcacaaataatgcttgggatggtgacaccacagatgatgcagatggcaaagagccaacagccgttgggctccttagcacaatcttcatctcacctcaatgagccatatccacagccagagccagatgctatggttccagtagtctcaagaccatcaagtttgccaactaacgtactaccaaacccagttatcctacaggaacaaacagctgcaatacatagttttcctcagcatcaacatgcatctcagccccaagtcaaaatgtttccacatggacaaccgtctgggatcaccgcacaatctccaatgctacatcagccccttggtggttcttccagtgttcctattcaatctcttgtgacctcagtaggcttaacctcacaggttcagcctccatttgtgccagagcaccctggaccacctgtcatgcctacaagtgtacaacagctacctttgacccaccctcatcttgctctggtagccgccgcacctgagactctaccaaatgaaataagggttgctgatcaagcaagtcatttgacagagtttactcatccttcaaaattgagaaaattggaggatggaacctcggtgcctggaatggtgaacagcagccatgctatttatacagctccactgcaagcagtgggccctagtggaccatcagggagctatagtgctggtgctggtagcttacaacaaccagggaatgaagggcagattacgcctgatgtggagtcagctcttctgcagcaagtcttgcagctgacacccgagcagctgagttcgttgccaccagagcaacagcagcaggtgattgaactccagaagatgctttcagctggtaaatagaagcaaccgagctagtgcagcaatattgccggtcgaggatctggcacgtcacataatggcgagttggcaactagtggaagctggaagtgatcctcagatttgttatcaagtcactaggccgcttcataacctgtcagcattttcttgtgggcatcttgatgccatcagttttgctcagaagtatccatatggctttctttcttcagatcagagataaaagaaatgttacaggagatggtagtttaaagaaagggatacacattatccatcactgctgtatcattatagggagaaaataacaataatctgtatccaaaggagctgtttttttttctgcttctccaaaatgggatatagcatcagatttttgtcctttccatttcgtgcaacagttgcaggtaggaaatgaattttgcgtaagcttgttatgttatcgagtagcatcctttatatttattctttatatcccttctttttctttatatcccttctttaccatttcttctaatgctccgtttggatatcggtattggaggacatgaagttgaattgatttcaataccaaatcagctatgatattaaaatgagatgcaatttcaattcta

SEQ ID NO: 41646 - DNA, 1575 bp, Zea Mays
cttatcttcaggagcattctagaccttcatacaaagaactgtttgggaaaaaagacaccgcggcatgcgcctccatccccgcttgctgcgcgcgcgttcgtcttgctgctcgctagaggcacaaataatgcttgggatggtgacaccacagatgatgcagatggcaaagagccaacagccgttgggctccttagcacaatcttcatctcacctcaatgagccatatccacagccagagccagatgctatggttccagtagtctcaagaccatcaagtttgccaactaacgtactaccaaacccagttatcctacaggaacaaacagctgcaatacatagttttcctcagcatcaacatgcatctcagccccaagtcaaaatgtttccacatggacaaccgtctgggatcaccgcacaatctccaatgctacatcagccccttggtggttcttccagtgttcctattcaatctcttgtgacctcagtaggcttaacctcacaggttcagcctccatttgtgccagagcaccctggaccacctgtcatgcctacaagtgtacaacagctacctttgacccaccctcatcttgctctggtagccgccgcacctgagactctaccaaatgaaataagggttgctgatcaagcaagtcatttgacagagtttactcatccttcaaaattgagaaaattggaggatggaacctcggtgcctggaatggtgaacagcagccatgctatttatacagctccactgcaagcagtgggccctagtggaccatcagggagctatagtgctggtgctggtagcttacaacaaccagggaatgaagggcagattacgcctgatgtggagtcagctcttctgcagcaagtcttgcagctgacacccgagcagctgagttcgttgccaccagagcaacagcagcaggtgattgaactccagaagatgctttcagctggtaaatagaagcaaccgagctagtgcagcaatattgccggtcgaggatctggcacgtcacataatggcgagttggcaactagtggaagctggaagtgatcctcagatttgttatcaagtcactaggccgcttcataacctgtcagcattttcttgtgggcatcttgatgccatcagttttgctcagaagtatccatatggctttctttcttcagatcagagataaaagaaatgttacaggagatggtagtttaaagaaagggatacacattatccatcactgctgtatcattatagggagaaaataacaataatctgtatccaaaggagctgtttttttttctgcttctccaaaatgggatatagcatcagatttttgtcctttccatttcgtgcaacagttgcaggtaggaaatgaattttgcgtaagcttgttatgttatcgagtagcatcctttatatttattctttatatcccttctttttctttatatcccttctttaccatttcttctaatgctccgtttggatatcggtattggaggacatgaagttgaattgatttcaataccaaatcagctatgatattaaaatgagatgcaatttcaattcta

SEQ ID NO: 41647 - DNA, 1574 bp, Zea Mays
ccgcgagcgcccgcaactagctgccagccgcgcgcccgccgctacctgctcgcatccagcgccccgccgccacccctcgcggtgatctatgtgggcgacgtccacggctacatcacgaagctggagagcctctgttccaacctctaggccgcactccccgccgacgccttggccaccgcgctggtcatcttcctcggcgactacaacgaccgcggcccgcacacccgcagggttctcaactttctcctcgcgctcccgacgcgctacccagcgcagcgccatgtcttcctctgcggcaaccatgacctcgccttcgtggcgttcgttggggcgctgccgctgccgcccaacggctccctgttctttggccacctgcgcagcgccatctctctgtcctccctctctcgctcatcctcccccaccgccctgcttatttacgcccatttcttaagagaggatttgatagcctgtcagaataaaagagctcgaggaaattgcggcggccggaaattctggtcatggtgccacacaaacacgataatctgcttcatcctcgacggaattgccgtcggggtcgggcgattcttcggaggacaagcgcctctgtttcgttgagctagctaggtccatggggattagtcaggacactcatgagtcgatggcaacagatgcagccaattacctttgccaccagcttcagcatcttcttgggcctatctcttctgcgacgagccaaagtggcccctgggaggagaggtcggcgatggttaggttgactcagaagctgcagaaatctaagagaaataagcggtggcggcagaggagaaggaagcatgttgaagagctttttcagaaggagcgtgcggattatgatagagttgaccaggaagctgatgaatggagggctaagcaaatagccaaggacattgcaaaacagagggtggaaagcatgcagcagattgctagaaagaaaacaaatgtggaaagaaagcgcctagaatctgagctggagcttgccctaatggtcgagaaacttcaggagcttcggtctataagagttcaaaaaatgaagaaacaagatccatacttgaacacagatgcaagtacaatgtccccctttgagcatgcctcgatggtatctacctagcatgtggtatttgtaggttgacttggatttagagaattatgagtgtttcatagatgttactctgacgagggataacaatattaccactagaaatatatactagtctgtcattgagaaggagagaaggggtgattatattggaaagactttatagcttttgcagagagcgggccgggcgctctagctagcgtggcaacacctggaaggccttggagctagccgttgcatgtggaagcgtagctcctgttgtactttgcttttgcacgctgtctgtgcatgggtcggctcatgtcaaatctctgccctagatgcacgttgcaacaacacgctttttcctgtatggactacagctacagcaagcacagacagacagcaccagcagcagtatgcagttcatggtagatttatagacatttttcgtatcatt

SEQ ID NO: 41648 - DNA, 1570 bp, Zea Mays
ccgcgagcgcccgcaactagctgccagccgcgcgcccgccgctacctgctcgcatccagcgccccgccgccacccctcgcggtgatctatgtgggcgacgtccacggctacatcacgaagctggagagcctctgttccaacctctaggccgcactccccgccgacgccttggccaccgcgctggtcatcttcctcggcgactacaacgaccgcggcccgcacacccgcagggttctcaactttctcctcgcgctcccgacgcgctacccagcgcagcgccatgtcttcctctgcggcaaccatgacctcgccttcgtggcgttcgttggggcgctgccgctgccgcccaacggctccctgttctttggccacctgcgcagcgccatctctctgtcctccctctctcgctcatcctcccccaccgccctgcttatttacgcccatttcttaagagaggatttgatagcctgtcagaataaaagagctcgaggaaattgcggcggccggaaattctggtcatggtgccacacaaacacgataatctgcttcatcctcgacggaattgccgtcggggtcgggcgattcttcggaggacaagcgcctctgtttcgttgagctagctaggtccatggggattagtcaggacactcatgagtcgatggcaacagatgcagccaattacctttgccaccagcttcagcatcttcttgggcctatctcttctgcgacgagccaaagtggcccctgggaggagaggtcggcgatggttaggttgactcagaagctgcagaaatctaagagaaataagcggtggcggcagaggagaaggaagcatgttgaagagctttttcagaaggagcgtgcggattatgatagagttgaccaggaagctgatgaatggagggctaagcaaatagccaaggacattgcaaaacagagggtggaaagcatgcagcagattgctagaaagaaaacaaatgtggaaagaaagcgcctagaatctgagctggagcttgccctaatggtcgagaaacttcaggagcttcggtctataagagttcaaaaaatgaagaaacaagatccatacttgaacacagatgcaagtacaatgtccccctttgagcatggtgaggtgtctgttcttgataacggtggataggttgacttggatttagagaattatgagtgtttcatagatgttactctgacgagggataacaatattaccactagaaatatatactagtctgtcattgagaaggagagaaggggtgattatattggaaagactttatagcttttgcagagagcgggccgggcgctctagctagcgtggcaacacctggaaggccttggagctagccgttgcatgtggaagcgtagctcctgttgtactttgcttttgcacgctgtctgtgcatgggtcggctcatgtcaaatctctgccctagatgcacgttgcaacaacacgctttttcctgtatggactacagctacagcaagcacagacagacagcaccagcagcagtatgcagttcatggtagatttatagacatttttcgtatcatt

SEQ ID NO: 41649 - DNA, 4397 bp, Zea Mays
gtgccctccagaataccaaattccccgaccttcgccgagcttctccaacgctccagcggttgatgtccgtcccaccgcggctctccgtcgatttctacgatgacgacctaatgtagaagtccgagagtaccagaagtatatggttgaaaaggctctgtttaccaatacgttaatagctttgccaactggacttggcaaaacttttattgctgcggtagtgatgtacaactactttcgatggtttcccgaaggaaaaataatatttacctgcccttcacgtcctcttgttactcagcaaattgaggcatgtcacaatacagtgggaataccacaggagtggataatagatatgaaaggagatcaatgcccttctattcgatcagttcactggaagtcaaagagagtgttctttgtcactccacaagttcttcagaatgatatacaatctggtatatgcatggtacaacaaatagtttgcttagtgatagatgaggctcatcgagcgtcaggaaattatgcatactgcatggttatccgagagttgttggcagctcgtgtgcctttaaggattttagctctaactgctacaccagggtccaagcattcagatatccaaagtgttatagacaatttaaacatttcggagctgatttattgtgatgaagaagattctagagtgaaccaatatgttaacacacgcaaagttgaacttgtgcaggtcccttttggcagtgatgctactcaagtcgctgatatgcttttggatattatacgcccacatattaatcggttgcgtgatgctggtgtgattgaccatcgggactattcaaattggacccaatttgaactgctgaaatttaaggataaattcaaggaagtacccccaccaaacatccatgaaatcgagagaggggaaattgaaagatcttttgtaattcttggcccactttgtcacacaaggaagttgcttttgagccatggaacccaatttgcacatgggtatcttgacaaacgattgaagggagggtcattgaatttgatgcacaagaacgaattcttttggcgattaaaagaaaagatgaagctttcctcatctcacagtattactccaaaagtacaggaattgaaaaggctgatggttgagcactttaatactgattccaatttgaaggactcaaggattattatattttcccattaccgagaaagtgtcaatgaaatatattgctcactacaggatattgatgataaacttgtcagacctgttgaattcattggtcaaagctcagcaggtaaccaactgaaggggcaaagccaaaaaactcaacaagctattttgaagaaattccgatctggggtatataatgttttggtggcaacatcaattggcgaggaaggacttgatattattgaggttgatctcgtgatctgtttcgatgccaatgtctcaccattaaggatgattcaacggatgggaagaaccgggagaaagaatgaaggtcgagttgtggttttggcttatgaaggtcaggaattgcaggggtacagaaagaaacaaggagattgtcgaaccatgaggaagctattgcataacagtgagagatttgaataccatgctagtcctaggatggttccacatgtctataaaccagaagttaagtatgttaagttgacaatagacaagtatattcctcacgcaaagaaaatgagggttgccgcaaaagaagcctcgccaattccatggaagatgtcggaggcagacggtcaaatgattactaggtactttagtgtgtgcaaagaagaagtttggaggccgtcccttgtggcatttcctagatttcagctttatccaagtgtcgttcacaaagttccacattcatttcggacaacagatatgctaactgatgctatgaagcaacttcaagacccatctcttttcaggacaaagtgtgaaatccctttgcaagaacctgctaatgtttctgctgtggaggagggtctggaacatgaaggtctctatgctgctaatggaaatgaggaaatgcctcaggaatgtgacggtttagaagcttcatcgagtgtagtgtggaatgaaaatgtttctgtgccaggttctccagttaagaagtatccggttcacactttcttcagtggtgattatgtaactgtggatagaagaggcagcgttttgattacttatgtacctgtcctgcctcaaaaaattgcattcagtaaggacataaaaagtgcagtttggaataacaaagatcagaacaaagccaaaccttacagatcagcagcaggcgtctgtaggacaacagttgaatttgtccttggtaccaatacagacaaacatttgtttgtggataatttatcaactgtagccatgcattcccctgagtgctcttggcatggtgacaatgttgatgacaatcatgtgcttactactgtaccatccaaaacactgacaagcccaagggagaaaatggacacaccctgcaatgttaaactgccagagtccacctattcatatcaggaagacatggagcttaattcaaggctaacagtatatatggaagaaggaattgttcctgagtctccagtggttgaagttagccacctacgtctagagatggatgaagctgcagactttggagctgtgccaaagcgtggttctccaaagtcacgtgatgagagggctcatgccaatgtagctggaagtcacaaaggacctttgaactttgagaaaaacgatcaattgctttgtggggaaaacgagtttgatggatcatcaaggttgtatatgctagatcagactcgagccaaaacagaagagccaatgcatccttcaaatgtgaagatggctactactacaagacatactcctgggaatatgctgtgtgatagtttctcaggtgattatcagcttaggtcagggggggatgcatcgggatcagtccagcaagcacctaagtacagaagactatgcaaatatggtgacaagatcaaaagagtctcttccatatctttggatggctgtgatgataggtttgaagaatgcaatattgctaataaagataggccaaaccaaataaaacatgctatggggacaaaaaggaagaccaagaggcgtctagatgcctatattgacgaggaagtcggggtgtctgaagatgcatatgtttcagaggatgaggatgataatcagagtgaagataaatacgaagatagcttcattgatgatcaggcaactccaactgaatttacacaaactgaacaaggtgatcgacacaatggtgacatgatgggtttctacaggcaatcgttgtttactcagtccccagtagttctaccctcaaggtaccttgatgtttcttacaattctgcttctcggaccggaaattcaagctattcttcagaggctaggcacaattacactgagactcccaaagagattcaaacacaacatcataccataaacccaagcccatcgtacagttttgtacaggatcgatgtgaaagagggatcgccaattgtgaatcatcgactaagctggattgcagaaagagaaggctaagcttccagcaacctctggcgatccctgttataaaccttgaaccagaaccagcaccagaaccatctccacacgtcgccagcagagtcgctgatcacctatattttgatgatggtttctttgagaaccttgatcttgatgcaattgaagctcaagcaaccgaacagtggagacagaagaccacacaatcgacgcagaaaccagtggaaattaagaatgcatcagacatgagttttgcacctccgtcattcgatttaggtctctgatagtggtggtaaagttagcatccattcatgatgtcatctagctgcagtacctagccatctcagagcatgctgagaactgcacaagcaatgaggttttctgcagaaggcccgaacctgcatcacatgacaatgccgcaggatctggcatgtctgccgctgtgatatttatcggcgccctggagctggaagatgcgctggcggcagattttgtagagtatttatctcagtacaggctcaatacaccatgtatattctcctgtaaatactgttcgatgtataagggtcttattgtatgcagacatttcagagacttgatgtgttaaacccagtggcaaaggtgacgtcagtgtcggtttttgttgcgcaggattatcctcgctctcgatgctgaaccgactggttttgcatagacgaggcatccgtgcagcatgatggcaacgtggagtttggtcaataggacgagtggttggtacatgatgcctggttgctttccgaaaacaggcaatgttttgtgcagtcttgtcgatttctgtacatctcaattaacgtacgcgtt

SEQ ID NO: 41650 - DNA, 4997 bp, Zea Mays
gtgccctccagaataccaaattccccgaccttcgccgagcttctccaacgctccagcggttgatgtccgtcccaccgcggctctccgtcgatttctacgatgacgacggcttcgactgggaggccgccgtgcaggagatcgacagagcctgcgccttcgcgtcggcctccgcccccgctcccgctcccgcccccgcccccactccggcgccggtgcatcatccgctgccgccgcggccccccgagccatcggcatcggcgccgcttcacaggccaccggcggcgggcggcggcacggcgcggcagtcgacgctcgaccgcttcgtcgactcatttaccaagaggcgactagagaaagagaggcccgctccagcgcccgtgcaggcggcgtcgtggggcgtgggggtggagccagtcggcggcggcctagggcggccgggtgtccgcgcgggcgagggatgttcgggacaggcgaacgagagagctgtggaggaccggttcatcgaatccttcaccaggaggcagcaggagaaggagagggctgcgtcggaggtggcaccggcactggctggtggtcaggggcgccctgcagctcgtgctggcaagggatgctcgggtcggggcaatcgtgctggcaagggatgctctcgtcggcccagtatggagattgagtatggtctctgcgctgtctccctggaccacgaggctgtcaagacatggatctatccaactaatgtagaagtccgagagtaccagaagtatatggttgaaaaggctctgtttaccaatacgttaatagctttgccaactggacttggcaaaacttttattgctgcggtagtgatgtacaactactttcgatggtttcccgaaggaaaaataatatttacctgcccttcacgtcctcttgttactcagcaaattgaggcatgtcacaatacagtgggaataccacaggagtggataatagatatgaaaggagatcaatgcccttctattcgatcagttcactggaagtcaaagagagtgttctttgtcactccacaagttcttcagaatgatatacaatctggtatatgcatggtacaacaaatagtttgcttagtgatagatgaggctcatcgagcgtcaggaaattatgcatactgcatggttatccgagagttgttggcagctcgtgtgcctttaaggattttagctctaactgctacaccagggtccaagcattcagatatccaaagtgttatagacaatttaaacatttcggagctgatttattgtgatgaagaagattctagagtgaaccaatatgttaacacacgcaaagttgaacttgtgcaggtcccttttggcagtgatgctactcaagtcgctgatatgcttttggatattatacgcccacatattaatcggttgcgtgatgctggtgtgattgaccatcgggactattcaaattggacccaatttgaactgctgaaatttaaggataaattcaaggaagtacccccaccaaacatccatgaaatcgagagaggggaaattgaaagatcttttgtaattcttggcccactttgtcacacaaggaagttgcttttgagccatggaacccaatttgcacatgggtatcttgacaaacgattgaagggagggtcattgaatttgatgcacaagaacgaattcttttggcgattaaaagaaaagatgaagctttcctcatctcacagtattactccaaaagtacaggaattgaaaaggctgatggttgagcactttaatactgattccaatttgaaggactcaaggattattatattttcccattaccgagaaagtgtcaagatattgatgataaacttgtcagacctgttgaattcattggtcaaagctcagcaggtaaccaactgaaggggcaaagccaaaaaactcaacaagctattttgaagaaattccgatctggggtatataatgttttggtggcaacatcaattggcgaggaaggacttgatattattgaggttgatctcgtgatctgtttcgatgccaatgtctcaccattaaggatgattcaacggatgggaagaaccgggagaaagaatgaaggtcgagttgtggttttggcttatgaaggtcaggaattgcaggggtacagaaagaaacaaggagattgtcgaaccatgaggaagctattgcataacagtgagagatttgaataccatgctagtcctaggatggttccacatgtctataaaccagaagttaagtatgttaagttgacaatagacaagtatattcctcacgcaaagaaaatgagggttgccgcaaaagaagcctcgccaattccatggaagatgtcggaggcagacggtcaaatgattactaggtactttagtgtgtgcaaagaagaagtttggaggccgtcccttgtggcatttcctagatttcagctttatccaagtgtcgttcacaaagttccacattcatttcggacaacagatatgctaactgatgctatgaagcaacttcaagacccatctcttttcaggacaaagtgtgaaatccctttgcaagaacctgctaatgtttctgctgtggaggagggtctggaacatgaaggtctctatgctgctaatggaaatgaggaaatgcctcaggaatgtgacggtttagaagcttcatcgagtgtagtgtggaatgaaaatgtttctgtgccaggttctccagttaagaagtatccggttcacactttcttcagtggtgattatgtaactgtggatagaagaggcagcgttttgattacttatgtacctgtcctgcctcaaaaaattgcattcagtaaggacataaaaagtgcagtttggaataacaaagatcagaacaaagccaaaccttacagatcagcagcaggcgtctgtaggacaacagttgaatttgtccttggtaccaatacagacaaacatttgtttgtggataatttatcaactgtagccatgcattcccctgagtgctcttggcatggtgacaatgttgatgacaatcatgtgcttactactgtaccatccaaaacactgacaagcccaagggagaaaatggacacaccctgcaatgttaaactgccagagtccacctattcatatcaggaagacatggagcttaattcaaggctaacagtatatatggaagaaggaattgttcctgagtctccagtggttgaagttagccacctacgtctagagatggatgaagctgcagactttggagctgtgccaaagcgtggttctccaaagtcacgtgatgagagggctcatgccaatgtagctggaagtcacaaaggacctttgaactttgagaaaaacgatcaattgctttgtggggaaaacgagtttgatggatcatcaaggttgtatatgctagatcagactcgagccaaaacagaagagccaatgcatccttcaaatgtgaagatggctactactacaagacatactcctgggaatatgctgtgtgatagtttctcaggtgattatcagcttaggtcagggggggatgcatcgggatcagtccagcaagcacctaagtacagaagactatgcaaatatggtgacaagatcaaaagagtctcttccatatctttggatggctgtgatgataggtttgaagaatgcaatattgctaataaagataggccaaaccaaataaaacatgctatggggacaaaaaggaagaccaagaggcgtctagatgcctatattgacgaggaagtcggggtgtctgaagatgcatatgtttcagaggatgaggatgataatcagagtgaagataaatacgaagatagcttcattgatgatcaggcaactccaactgaatttacacaaactgaacaaggtgatcgacacaatggtgacatgatgggtttctacaggcaatcgttgtttactcagtccccagtagttctaccctcaaggtaccttgatgtttcttacaattctgcttctcggaccggaaattcaagctattcttcagaggctaggcacaattacactgagactcccaaagagattcaaacacaacatcataccataaacccaagcccatcgtacagttttgtacaggatcgatgtgaaagagggatcgccaattgtgaatcatcgactaagctggattgcagaaagagaaggctaagcttccagcaacctctggcgatccctgttataaaccttgaaccagaaccagcaccagaaccatctccacacgtcgccagcagagtcgctgatcacctatattttgatgatggtttctttgagaaccttgatcttgatgcaattgaagctcaagcaaccgaacagtggagacagaagaccacacaatcgacgcagaaaccagtggaaattaagaatgcatcagacatgagttttgcacctccgtcattcgatttaggtctctgatagtggtggtaaagttagcatccattcatgatgtcatctagctgcagtacctagccatctcagagcatgctgagaactgcacaagcaatgaggttttctgcagaaggcccgaacctgcatcacatgacaatgccgcaggatctggcatgtctgccgctgtgatatttatcggcgccctggagctggaagatgcgctggcggcagattttgtagagtatttatctcagtacaggctcaatacaccatgtatattctcctgtaaatactgttcgatgtataagggtcttattgtatgcagacatttcagagacttgatgtgttaaacccagtggcaaaggtgacgtcagtgtcggtttttgttgcgcaggattatcctcgctctcgatgctgaaccgactggttttgcatagacgaggcatccgtgcagcatgatggcaacgtggagtttggtcaataggacgagtggttggtacatgatgcctggttgctttccgaaaacaggcaatgttttgtgcagtcttgtcgatttctgtacatctcaattaacgtacgcgtt

SEQ ID NO: 41651 - DNA, 5019 bp, Zea Mays
gtgccctccagaataccaaattccccgaccttcgccgagcttctccaacgctccagcggttgatgtccgtcccaccgcggctctccgtcgatttctacgatgacgacggcttcgactgggaggccgccgtgcaggagatcgacagagcctgcgccttcgcgtcggcctccgcccccgctcccgctcccgcccccgcccccactccggcgccggtgcatcatccgctgccgccgcggccccccgagccatcggcatcggcgccgcttcacaggccaccggcggcgggcggcggcacggcgcggcagtcgacgctcgaccgcttcgtcgactcatttaccaagaggcgactagagaaagagaggcccgctccagcgcccgtgcaggcggcgtcgtggggcgtgggggtggagccagtcggcggcggcctagggcggccgggtgtccgcgcgggcgagggatgttcgggacaggcgaacgagagagctgtggaggaccggttcatcgaatccttcaccaggaggcagcaggagaaggagagggctgcgtcggaggtggcaccggcactggctggtggtcaggggcgccctgcagctcgtgctggcaagggatgctcgggtcggggcaatcgtgctggcaagggatgctctcgtcggcccagtatggagattgagtatggtctctgcgctgtctccctggaccacgaggctgtcaagacatggatctatccaactaatgtagaagtccgagagtaccagaagtatatggttgaaaaggctctgtttaccaatacgttaatagctttgccaactggacttggcaaaacttttattgctgcggtagtgatgtacaactactttcgatggtttcccgaaggaaaaataatatttacctgcccttcacgtcctcttgttactcagcaaattgaggcatgtcacaatacagtgggaataccacaggagtggataatagatatgaaaggagatcaatgcccttctattcgatcagttcactggaagtcaaagagagtgttctttgtcactccacaagttcttcagaatgatatacaatctggtatatgcatggtacaacaaatagtttgcttagtgatagatgaggctcatcgagcgtcaggaaattatgcatactgcatggttatccgagagttgttggcagctcgtgtgcctttaaggattttagctctaactgctacaccagggtccaagcattcagatatccaaagtgttatagacaatttaaacatttcggagctgatttattgtgatgaagaagattctagagtgaaccaatatgttaacacacgcaaagttgaacttgtgcaggtcccttttggcagtgatgctactcaagtcgctgatatgcttttggatattatacgcccacatattaatcggttgcgtgatgctggtgtgattgaccatcgggactattcaaattggacccaatttgaactgctgaaatttaaggataaattcaaggaagtacccccaccaaacatccatgaaatcgagagaggggaaattgaaagatcttttgtaattcttggcccactttgtcacacaaggaagttgcttttgagccatggaacccaatttgcacatgggtatcttgacaaacgattgaagggagggtcattgaatttgatgcacaagaacgaattcttttggcgattaaaagaaaagatgaagctttcctcatctcacagtattactccaaaagtacaggaattgaaaaggctgatggttgagcactttaatactgattccaatttgaaggactcaaggattattatattttcccattaccgagaaagtgtcaatgaaatatattgctcactacaggatattgatgataaacttgtcagacctgttgaattcattggtcaaagctcagcaggtaaccaactgaaggggcaaagccaaaaaactcaacaagctattttgaagaaattccgatctggggtatataatgttttggtggcaacatcaattggcgaggaaggacttgatattattgaggttgatctcgtgatctgtttcgatgccaatgtctcaccattaaggatgattcaacggatgggaagaaccgggagaaagaatgaaggtcgagttgtggttttggcttatgaaggtcaggaattgcaggggtacagaaagaaacaaggagattgtcgaaccatgaggaagctattgcataacagtgagagatttgaataccatgctagtcctaggatggttccacatgtctataaaccagaagttaagtatgttaagttgacaatagacaagtatattcctcacgcaaagaaaatgagggttgccgcaaaagaagcctcgccaattccatggaagatgtcggaggcagacggtcaaatgattactaggtactttagtgtgtgcaaagaagaagtttggaggccgtcccttgtggcatttcctagatttcagctttatccaagtgtcgttcacaaagttccacattcatttcggacaacagatatgctaactgatgctatgaagcaacttcaagacccatctcttttcaggacaaagtgtgaaatccctttgcaagaacctgctaatgtttctgctgtggaggagggtctggaacatgaaggtctctatgctgctaatggaaatgaggaaatgcctcaggaatgtgacggtttagaagcttcatcgagtgtagtgtggaatgaaaatgtttctgtgccaggttctccagttaagaagtatccggttcacactttcttcagtggtgattatgtaactgtggatagaagaggcagcgttttgattacttatgtacctgtcctgcctcaaaaaattgcattcagtaaggacataaaaagtgcagtttggaataacaaagatcagaacaaagccaaaccttacagatcagcagcaggcgtctgtaggacaacagttgaatttgtccttggtaccaatacagacaaacatttgtttgtggataatttatcaactgtagccatgcattcccctgagtgctcttggcatggtgacaatgttgatgacaatcatgtgcttactactgtaccatccaaaacactgacaagcccaagggagaaaatggacacaccctgcaatgttaaactgccagagtccacctattcatatcaggaagacatggagcttaattcaaggctaacagtatatatggaagaaggaattgttcctgagtctccagtggttgaagttagccacctacgtctagagatggatgaagctgcagactttggagctgtgccaaagcgtggttctccaaagtcacgtgatgagagggctcatgccaatgtagctggaagtcacaaaggacctttgaactttgagaaaaacgatcaattgctttgtggggaaaacgagtttgatggatcatcaaggttgtatatgctagatcagactcgagccaaaacagaagagccaatgcatccttcaaatgtgaagatggctactactacaagacatactcctgggaatatgctgtgtgatagtttctcaggtgattatcagcttaggtcagggggggatgcatcgggatcagtccagcaagcacctaagtacagaagactatgcaaatatggtgacaagatcaaaagagtctcttccatatctttggatggctgtgatgataggtttgaagaatgcaatattgctaataaagataggccaaaccaaataaaacatgctatggggacaaaaaggaagaccaagaggcgtctagatgcctatattgacgaggaagtcggggtgtctgaagatgcatatgtttcagaggatgaggatgataatcagagtgaagataaatacgaagatagcttcattgatgatcaggcaactccaactgaatttacacaaactgaacaaggtgatcgacacaatggtgacatgatgggtttctacaggcaatcgttgtttactcagtccccagtagttctaccctcaaggtaccttgatgtttcttacaattctgcttctcggaccggaaattcaagctattcttcagaggctaggcacaattacactgagactcccaaagagattcaaacacaacatcataccataaacccaagcccatcgtacagttttgtacaggatcgatgtgaaagagggatcgccaattgtgaatcatcgactaagctggattgcagaaagagaaggctaagcttccagcaacctctggcgatccctgttataaaccttgaaccagaaccagcaccagaaccatctccacacgtcgccagcagagtcgctgatcacctatattttgatgatggtttctttgagaaccttgatcttgatgcaattgaagctcaagcaaccgaacagtggagacagaagaccacacaatcgacgcagaaaccagtggaaattaagaatgcatcagacatgagttttgcacctccgtcattcgatttaggtctctgatagtggtggtaaagttagcatccattcatgatgtcatctagctgcagtacctagccatctcagagcatgctgagaactgcacaagcaatgaggttttctgcagaaggcccgaacctgcatcacatgacaatgccgcaggatctggcatgtctgccgctgtgatatttatcggcgccctggagctggaagatgcgctggcggcagattttgtagagtatttatctcagtacaggctcaatacaccatgtatattctcctgtaaatactgttcgatgtataagggtcttattgtatgcagacatttcagagacttgatgtgttaaacccagtggcaaaggtgacgtcagtgtcggtttttgttgcgcaggattatcctcgctctcgatgctgaaccgactggttttgcatagacgaggcatccgtgcagcatgatggcaacgtggagtttggtcaataggacgagtggttggtacatgatgcctggttgctttccgaaaacaggcaatgttttgtgcagtcttgtcgatttctgtacatctcaattaacgtacgcgtt

SEQ ID NO: 41652 - DNA, 3203 bp, Zea Mays
cttagatgctaaaggtgcagtcaagatagcagatgctgtccttgtgcagtcaaaactgcagcaaggctgctgtccttggctgccaaaggactgctgtcatacacaaagatgctcaagatttatttcatcatcagatatgcagacagcaagagagctgcacataattgcaataaagataagagtataagaacataagaacactacttgcacacggacacttaacttatattacattaacacttggtgtggacatttctacttttttccagtcagctaattgaacccctttcttacagtacaactgatcttgctctgcctaggttgacatctgtacctttttccagtcagctagaatactgtcatgcaaaaaaaaggaaatttgacatcataattcatcatgcacccatatttcatcttccccatctccgatttgttccgcttccatacaatgatcaatgccctaaactagtctagatgggaaagtgcctagacaaggcacttaggtgccaagtgagctggactcaaggattattatattttcccattaccgagaaagtgtcaatgaaatatattgctcactacaggatattgatgataaacttgtcagacctgttgaattcattggtcaaagctcagcaggtaaccaactgaaggggcaaagccaaaaaactcaacaagctattttgaagaaattccgatctggggtatataatgttttggtggcaacatcaattggcgaggaaggacttgatattattgaggttgatctcgtgatctgtttcgatgccaatgtctcaccattaaggatgattcaacggatgggaagaaccgggagaaagaatgaaggtcgagttgtggttttggcttatgaaggtcaggaattgcaggggtacagaaagaaacaaggagattgtcgaaccatgaggaagctattgcataacagtgagagatttgaataccatgctagtcctaggatggttccacatgtctataaaccagaagttaagtatgttaagttgacaatagacaagtatattcctcacgcaaagaaaatgagggttgccgcaaaagaagcctcgccaattccatggaagatgtcggaggcagacggtcaaatgattactagcaacttcaagacccatctcttttcaggacaaagtgtgaaatccctttgcaagaacctgctaatgtttctgctgtggaggagggtctggaacatgaaggtctctatgctgctaatggaaatgaggaaatgcctcaggaatgtgacggtttagaagcttcatcgagtgtagtgtggaatgaaaatgtttctgtgccaggttctccagttaagaagtatccggttcacactttcttcagtggtgattatgtaactgtggatagaagaggcagcgttttgattacttatgtacctgtcctgcctcaaaaaattgcattcagtaaggacataaaaagtgcagtttggaataacaaagatcagaacaaagccaaaccttacagatcagcagcaggcgtctgtaggacaacagttgaatttgtccttggtaccaatacagacaaacatttgtttgtggataatttatcaactgtagccatgcattcccctgagtgctcttggcatggtgacaatgttgatgacaatcatgtgcttactactgtaccatccaaaacactgacaagcccaagggagaaaatggacacaccctgcaatgttaaactgccagagtccacctattcatatcaggaagacatggagcttaattcaaggctaacagtatatatggaagaaggaattgttcctgagtctccagtggttgaagttagccacctacgtctagagatggatgaagctgcagactttggagctgtgccaaagcgtggttctccaaagtcacgtgatgagagggctcatgccaatgtagctggaagtcacaaaggacctttgaactttgagaaaaacgatcaattgctttgtggggaaaacgagtttgatggatcatcaaggttggtgtctgaagatgcatatgtttcagaggatgaggatgataatcagagtgaagataaatacgaagatagcttcattgatgatcaggcaactccaactgaatttacacaaactgaacaaggtgatcgacacaatggtgacatgatgggtttctacaggtaccttgatgtttcttacaattctgcttctcggaccggaaattcaagctattcttcagaggctaggcacaattacactgagactcccaaagagattcaaacacaacatcataccataaacccaagcccatcgtacagttttgtacaggatcgatgtgaaagagggatcgccaattgtgaatcatcgactaagctggattgcagaaagagaaggctaagcttccagcaacctctggcgatccctgttataaaccttgaaccagaaccagcaccagaaccatctccacacgtcgccagcagagtcgctgatcacctatattttgatgatggtttctttgagaaccttgatcttgatgcaattgaagctcaagcaaccgaacagtggagacagaagaccacacaatcgacgcagaaaccagtggaaattaagaatgcatcagacatgagttttgcacctccgtcattcgatttaggtctctgatagtggtggtaaagttagcatccattcatgatgtcatctagctgcagtacctagccatctcagagcatgctgagaactgcacaagcaatgaggttttctgcagaaggcccgaacctgcatcacatgacaatgccgcaggatctggcatgtctgccgctgtgatatttatcggcgccctggagctggaagatgcgctggcggcagattttgtagagtatttatctcagtacaggctcaatacaccatgtatattctcctgtaaatactgttcgatgtataagggtcttattgtatgcagacatttcagagacttgatgtgttaaacccagtggcaaaggtgacgtcagtgtcggtttttgttgcgcaggattatcctcgctctcgatgctgaaccgactggttttgcatagacgaggcatccgtgcagcatgatggcaacgtggagtttggtcaataggacgagtggttggtacatgatgcctggttgctttccgaaaacaggcaatgttttgtgcagtcttgtcgatttctgtacatctcaattaacgtacgcgtt

SEQ ID NO: 41653 - DNA, 2980 bp, Zea Mays
cttccatacaatgatcaatgccctaaactagtctagatgggaaagtgcctagacaaggcacttaggtgccaagtgagctggactcaaggattattatattttcccattaccgagaaagtgtcaatgaaatatattgctcactacaggatattgatgataaacttgtcagacctgttgaattcattggtcaaagctcagcaggatatactagggaaaagaacatgtggcatgagtgagggattgtgttcagttgatcccatggtttttgaggtgatgtgctgtcctgtggtgctgggggtacacctaggtaaccaactgaaggggcaaagccaaaaaactcaacaagctattttgaagaaattccgatctggggtatataatgttttggtggcaacatcaattggcgaggaaggacttgatattattgaggttgatctcgtgatctgtttcgatgccaatgtctcaccattaaggatgattcaacggatgggaagaaccgggagaaagaatgaaggtcaggaattgcaggggtacagaaagaaacaaggagattgtcgaaccatgaggaagctattgcataacagtgagagatttgaataccatgctagtcctaggatggttccacatgtctataaaccagaagttaagtatgttaagttgacaatagacaagtatattcctcacgcaaagaaaatgagggttgccgcaaaagaagcctcgccaattccatggaagatgtcggaggcagacggtcaaatgattactaggtactttagtgtgtgcaaagaagaagtttggaggccgtcccttgtggcatttcctagatttcagctttatccaagtgtcgttcacaaagttccacattcatttcggacaacagatatgctaactgatgctatgaagcaacttcaagacccatctcttttcaggacaaagtgtgaaatccctttgcaagaacctgctaatgtttctgctgtggaggagggtctggaacatgaaggtctctatgctgctaatggaaatgaggaaatgcctcaggaatgtgacggtttagaagcttcatcgagtgtagtgtggaatgaaaatgtttctgtgccaggttctccagttaagaagtatccggttcacactttcttcagtggtgattatgtaactgtggatagaagaggcagcgttttgattacttatgtacctgtcctgcctcaaaaaattgcattcagtaaggacataaaaagtgcagtttggaataacaaagatcagaacaaagccaaaccttacagatcagcagcaggcgtctgtaggacaacagttgaatttgtccttggtaccaatacagacaaacatttgtttgtggataatttatcaactgtagccatgcattcccctgagtgctcttggcatggtgacaatgttgatgacaatcatgtgcttactactgtaccatccaaaacactgacaagcccaagggagaaaatggacacaccctgcaatgttaaactgccagagtccacctattcatatcaggaagacatggagcttaattcaaggctaacagtatatatggaagaaggaattgttcctgagtctccagtggttgaagttagccacctacgtctagagatggatgaagctgcagactttggagctgtgccaaagcgtggttctccaaagtcacgtgatgagagggctcatgccaatgtagctggaagtcacaaaggacctttgaactttgagaaaaacgatcaattgctttgtggggaaaacgagtttgatggatcatcaaggttggtgtctgaagatgcatatgtttcagaggatgaggatgataatcagagtgaagataaatacgaagatagcttcattgatgatcaggcaactccaactgaatttacacaaactgaacaaggtgatcgacacaatggtgacatgatgggtttctacaggtaccttgatgtttcttacaattctgcttctcggaccggaaattcaagctattcttcagaggctaggcacaattacactgagactcccaaagagattcaaacacaacatcataccataaacccaagcccatcgtacagttttgtacaggatcgatgtgaaagagggatcgccaattgtgaatcatcgactaagctggattgcagaaagagaaggctaagcttccagcaacctctggcgatccctgttataaaccttgaaccagaaccagcaccagaaccatctccacacgtcgccagcagagtcgctgatcacctatattttgatgatggtttctttgagaaccttgatcttgatgcaattgaagctcaagcaaccgaacagtggagacagaagaccacacaatcgacgcagaaaccagtggaaattaagaatgcatcagacatgagttttgcacctccgtcattcgatttaggtctctgatagtggtggtaaagttagcatccattcatgatgtcatctagctgcagtacctagccatctcagagcatgctgagaactgcacaagcaatgaggttttctgcagaaggcccgaacctgcatcacatgacaatgccgcaggatctggcatgtctgccgctgtgatatttatcggcgccctggagctggaagatgcgctggcggcagattttgtagagtatttatctcagtacaggctcaatacaccatgtatattctcctgtaaatactgttcgatgtataagggtcttattgtatgcagacatttcagagacttgatgtgttaaacccagtggcaaaggtgacgtcagtgtcggtttttgttgcgcaggattatcctcgctctcgatgctgaaccgactggttttgcatagacgaggcatccgtgcagcatgatggcaacgtggagtttggtcaataggacgagtggttggtacatgatgcctggttgctttccgaaaacaggcaatgttttgtgcagtcttgtcgatttctgtacatctcaattaacgtacgcgtt

SEQ ID NO: 41654 - DNA, 3243 bp, Zea Mays
atgggaaagtgcctagacaaggcacttaggtgccaagtgagctggactcaaggattattatattttcccattaccgagaaagtgtcaatgaaatatattgctcactacaggatattgatgataaacttgtcagacctgttgaattcattggtcaaagctcagcaggtaaccaactgaaggggcaaagccaaaaaactcaacaagctattttgaagaaattccgatctggggtatataatgttttggtggcaacatcaattggcgaggaaggacttgatattattgaggttgatctcgtgatctgtttcgatgccaatgtctcaccattaaggatgattcaacggatgggaagaaccgggagaaagaatgaaggtcaggaattgcaggggtacagaaagaaacaaggagattgtcgaaccatgaggaagctattgcataacagtgagagatttgaataccatgctagtcctaggatggttccacatgtctataaaccagaagttaagtatgttaagttgacaatagacaagtatattcctcacgcaaagaaaatgagggttgccgcaaaagaagcctcgccaattccatggaagatgtcggaggcagacggtcaaatgattactaggtactttagtgtgtgcaaagaagaagtttggaggccgtcccttgtggcatttcctagatttcagctttatccaagtgtcgttcacaaagttccacattcatttcggacaacagatatgctaactgatgctatgaagcaacttcaagacccatctcttttcaggacaaagtgtgaaatccctttgcaagaacctgctaatgtttctgctgtggaggagggtctggaacatgaaggtctctatgctgctaatggaaatgaggaaatgcctcaggaatgtgacggtttagaagcttcatcgagtgtagtgtggaatgaaaatgtttctgtgccaggttctccagttaagaagtatccggttcacactttcttcagtggtgattatgtaactgtggatagaagaggcagcgttttgattacttatgtacctgtcctgcctcaaaaaattgcattcagtaaggacataaaaagtgcagtttggaataacaaagatcagaacaaagccaaaccttacagatcagcagcaggcgtctgtaggacaacagttgaatttgtccttggtaccaatacagacaaacatttgtttgtggataatttatcaactgtagccatgcattcccctgagtgctcttggcatggtgacaatgttgatgacaatcatgtgcttactactgtaccatccaaaacactgacaagcccaagggagaaaatggacacaccctgcaatgttaaactgccagagtccacctattcatatcaggaagacatggagcttaattcaaggctaacagtatatatggaagaaggaattgttcctgagtctccagtggttgaagttagccacctacgtctagagatggatgaagctgcagactttggagctgtgccaaagcgtggttctccaaagtcacgtgatgagagggctcatgccaatgtagctggaagtcacaaaggacctttgaactttgagaaaaacgatcaattgctttgtggggaaaacgagtttgatggatcatcaaggttgtatatgctagatcagactcgagccaaaacagaagagccaatgcatccttcaaatgtgaagatggctactactacaagacatactcctgggaatatgctgtgtgatagtttctcaggtgattatcagcttaggtcagggggggatgcatcgggatcagtccagcaagcacctaagtacagaagactatgcaaatatggtgacaagatcaaaagagtctcttccatatctttggatggctgtgatgataggtttgaagaatgcaatattgctaataaagataggccaaaccaaataaaacatgctatggggacaaaaaggaagaccaagaggcgtctagatgcctatattgacgaggaagtcggggtgtctgaagatgcatatgtttcagaggatgaggatgataatcagagtgaagataaatacgaagatagcttcattgatgatcaggcaactccaactgaatttacacaaactgaacaaggtgatcgacacaatggtgacatgatgggtttctacaggcaatcgttgtttactcagtccccagtagttctaccctcaaggtaccttgatgtttcttacaattctgcttctcggaccggaaattcaagctattcttcagaggctaggcacaattacactgagactcccaaagagattcaaacacaacatcataccataaacccaagcccatcgtacagttttgtacaggatcgatgtgaaagagggatcgccaattgtgaatcatcgactaagctggattgcagaaagagaaggctaagcttccagcaacctctggcgatccctgttataaaccttgaaccagaaccagcaccagaaccatctccacacgtcgccagcagagtcgctgatcacctatattttgatgatggtttctttgagaaccttgatcttgatgcaattgaagctcaagcaaccgaacagtggagacagaagaccacacaatcgacgcagaaaccagtggaaattaagaatgcatcagacatgagttttgcacctccgtcattcgatttaggtctctgatagtggtggtaaagttagcatccattcatgatgtcatctagctgcagtacctagccatctcagagcatgctgagaactgcacaagcaatgaggttttctgcagaaggcccgaacctgcatcacatgacaatgccgcaggatctggcatgtctgccgctgtgatatttatcggcgccctggagctggaagatgcgctggcggcagattttgtagagtatttatctcagtacaggctcaatacaccatgtatattctcctgtaaatactgttcgatgtataagggtcttattgtatgcagacatttcagagacttgatgtgttaaacccagtggcaaaggtgacgtcagtgtcggtttttgttgcgcaggattatcctcgctctcgatgctgaaccgactggttttgcatagacgaggcatccgtgcagcatgatggcaacgtggagtttggtcaataggacgagtggttggtacatgatgcctggttgctttccgaaaacaggcaatgttttgtgcagtcttgtcgatttctgtacatctcaattaacgtacgcgtt

SEQ ID NO: 41655 - DNA, 2986 bp, Zea Mays
atgggaaagtgcctagacaaggcacttaggtgccaagtgagctggactcaaggattattatattttcccattaccgagaaagtgtcaatgaaatatattgctcactacaggatattgatgataaacttgtcagacctgttgaattcattggtcaaagctcagcaggatatactagggaaaagaacatgtggcatgagtgagggattgtgttcagttgatcccatggtttttgaggtgatgtgctgtcctgtggtgctgggggtacacctaggtaaccaactgaaggggcaaagccaaaaaactcaacaagctattttgaagaaattccgatctggggtatataatgttttggtggcaacatcaattggcgaggaaggacttgatattattgaggttgatctcgtgatctgtttcgatgccaatgtctcaccattaaggatgattcaacggatgggaagaaccgggagaaagaatgaaggtcaggaattgcaggggtacagaaagaaacaaggagattgtcgaaccatgaggaagctattgcataacagtgagagatttgaataccatgctagtcctaggatggttccacatgtctataaaccagaagttaagtatgttaagttgacaatagacaagtatattcctcacgcaaagaaaatgagggttgccgcaaaagaagcctcgccaattccatggaagatgtcggaggcagacggtcaaatgattactaggtactttagtgtgtgcaaagaagaagtttggaggccgtcccttgtggcatttcctagatttcagctttatccaagtgtcgttcacaaagttccacattcatttcggacaacagatatgctaactgatgctatgaagcaacttcaagacccatctcttttcaggacaaagtgtgaaatccctttgcaagaacctgctaatgtttctgctgtggaggagggtctggaacatgaaggtctctatgctgctaatggaaatgaggaaatgcctcaggaatgtgacggtttagaagcttcatcgagtgtagtgtggaatgaaaatgtttctgtgccaggttctccagttaagaagtatccggttcacactttcttcagtggtgattatgtaactgtggatagaagaggcagcgttttgattacttatgtacctgtcctgcctcaaaaaattgcattcagtaaggacataaaaagtgcagtttggaataacaaagatcagaacaaagccaaaccttacagatcagcagcaggcgtctgtaggacaacagttgaatttgtccttggtaccaatacagacaaacatttgtttgtggataatttatcaactgtagccatgcattcccctgagtgctcttggcatggtgacaatgttgatgacaatcatgtgcttactactgtaccatccaaaacactgacaagcccaagggagaaaatggacacaccctgcaatgttaaactgccagagtccacctattcatatcaggaagacatggagcttaattcaaggctaacagtatatatggaagaaggaattgttcctgagtctccagtggttgaagttagccacctacgtctagagatggatgaagctgcagactttggagctgtgccaaagcgtggttctccaaagtcacgtgatgagagggctcatgccaatgtagctggaagtcacaaaggacctttgaactttgagaaaaacgatcaattgctttgtggggaaaacgagtttgatggatcatcaaggttggtgtctgaagatgcatatgtttcagaggatgaggatgataatcagagtgaagataaatacgaagatagcttcattgatgatcaggcaactccaactgaatttacacaaactgaacaaggtgatcgacacaatggtgacatgatgggtttctacaggcaatcgttgtttactcagtccccagtagttctaccctcaaggtaccttgatgtttcttacaattctgcttctcggaccggaaattcaagctattcttcagaggctaggcacaattacactgagactcccaaagagattcaaacacaacatcataccataaacccaagcccatcgtacagttttgtacaggatcgatgtgaaagagggatcgccaattgtgaatcatcgactaagctggattgcagaaagagaaggctaagcttccagcaacctctggcgatccctgttataaaccttgaaccagaaccagcaccagaaccatctccacacgtcgccagcagagtcgctgatcacctatattttgatgatggtttctttgagaaccttgatcttgatgcaattgaagctcaagcaaccgaacagtggagacagaagaccacacaatcgacgcagaaaccagtggaaattaagaatgcatcagacatgagttttgcacctccgtcattcgatttaggtctctgatagtggtggtaaagttagcatccattcatgatgtcatctagctgcagtacctagccatctcagagcatgctgagaactgcacaagcaatgaggttttctgcagaaggcccgaacctgcatcacatgacaatgccgcaggatctggcatgtctgccgctgtgatatttatcggcgccctggagctggaagatgcgctggcggcagattttgtagagtatttatctcagtacaggctcaatacaccatgtatattctcctgtaaatactgttcgatgtataagggtcttattgtatgcagacatttcagagacttgatgtgttaaacccagtggcaaaggtgacgtcagtgtcggtttttgttgcgcaggattatcctcgctctcgatgctgaaccgactggttttgcatagacgaggcatccgtgcagcatgatggcaacgtggagtttggtcaataggacgagtggttggtacatgatgcctggttgctttccgaaaacaggcaatgttttgtgcagtcttgtcgatttctgtacatctcaattaacgtacgcgtt

SEQ ID NO: 41656 - DNA, 3270 bp, Zea Mays
atgggaaagtgcctagacaaggcacttaggtgccaagtgagctggactcaaggattattatattttcccattaccgagaaagtgtcaatgaaatatattgctcactacaggatattgatgataaacttgtcagacctgttgaattcattggtcaaagctcagcaggtaaccaactgaaggggcaaagccaaaaaactcaacaagctattttgaagaaattccgatctggggtatataatgttttggtggcaacatcaattggcgaggaaggacttgatattattgaggttgatctcgtgatctgtttcgatgccaatgtctcaccattaaggatgattcaacggatgggaagaaccgggagaaagaatgaaggtcgagttgtggttttggcttatgaaggtcaggaattgcaggggtacagaaagaaacaaggagattgtcgaaccatgaggaagctattgcataacagtgagagatttgaataccatgctagtcctaggatggttccacatgtctataaaccagaagttaagtatgttaagttgacaatagacaagtatattcctcacgcaaagaaaatgagggttgccgcaaaagaagcctcgccaattccatggaagatgtcggaggcagacggtcaaatgattactaggtactttagtgtgtgcaaagaagaagtttggaggccgtcccttgtggcatttcctagatttcagctttatccaagtgtcgttcacaaagttccacattcatttcggacaacagatatgctaactgatgctatgaagcaacttcaagacccatctcttttcaggacaaagtgtgaaatccctttgcaagaacctgctaatgtttctgctgtggaggagggtctggaacatgaaggtctctatgctgctaatggaaatgaggaaatgcctcaggaatgtgacggtttagaagcttcatcgagtgtagtgtggaatgaaaatgtttctgtgccaggttctccagttaagaagtatccggttcacactttcttcagtggtgattatgtaactgtggatagaagaggcagcgttttgattacttatgtacctgtcctgcctcaaaaaattgcattcagtaaggacataaaaagtgcagtttggaataacaaagatcagaacaaagccaaaccttacagatcagcagcaggcgtctgtaggacaacagttgaatttgtccttggtaccaatacagacaaacatttgtttgtggataatttatcaactgtagccatgcattcccctgagtgctcttggcatggtgacaatgttgatgacaatcatgtgcttactactgtaccatccaaaacactgacaagcccaagggagaaaatggacacaccctgcaatgttaaactgccagagtccacctattcatatcaggaagacatggagcttaattcaaggctaacagtatatatggaagaaggaattgttcctgagtctccagtggttgaagttagccacctacgtctagagatggatgaagctgcagactttggagctgtgccaaagcgtggttctccaaagtcacgtgatgagagggctcatgccaatgtagctggaagtcacaaaggacctttgaactttgagaaaaacgatcaattgctttgtggggaaaacgagtttgatggatcatcaaggttgtatatgctagatcagactcgagccaaaacagaagagccaatgcatccttcaaatgtgaagatggctactactacaagacatactcctgggaatatgctgtgtgatagtttctcaggtgattatcagcttaggtcagggggggatgcatcgggatcagtccagcaagcacctaagtacagaagactatgcaaatatggtgacaagatcaaaagagtctcttccatatctttggatggctgtgatgataggtttgaagaatgcaatattgctaataaagataggccaaaccaaataaaacatgctatggggacaaaaaggaagaccaagaggcgtctagatgcctatattgacgaggaagtcggggtgtctgaagatgcatatgtttcagaggatgaggatgataatcagagtgaagataaatacgaagatagcttcattgatgatcaggcaactccaactgaatttacacaaactgaacaaggtgatcgacacaatggtgacatgatgggtttctacaggcaatcgttgtttactcagtccccagtagttctaccctcaaggtaccttgatgtttcttacaattctgcttctcggaccggaaattcaagctattcttcagaggctaggcacaattacactgagactcccaaagagattcaaacacaacatcataccataaacccaagcccatcgtacagttttgtacaggatcgatgtgaaagagggatcgccaattgtgaatcatcgactaagctggattgcagaaagagaaggctaagcttccagcaacctctggcgatccctgttataaaccttgaaccagaaccagcaccagaaccatctccacacgtcgccagcagagtcgctgatcacctatattttgatgatggtttctttgagaaccttgatcttgatgcaattgaagctcaagcaaccgaacagtggagacagaagaccacacaatcgacgcagaaaccagtggaaattaagaatgcatcagacatgagttttgcacctccgtcattcgatttaggtctctgatagtggtggtaaagttagcatccattcatgatgtcatctagctgcagtacctagccatctcagagcatgctgagaactgcacaagcaatgaggttttctgcagaaggcccgaacctgcatcacatgacaatgccgcaggatctggcatgtctgccgctgtgatatttatcggcgccctggagctggaagatgcgctggcggcagattttgtagagtatttatctcagtacaggctcaatacaccatgtatattctcctgtaaatactgttcgatgtataagggtcttattgtatgcagacatttcagagacttgatgtgttaaacccagtggcaaaggtgacgtcagtgtcggtttttgttgcgcaggattatcctcgctctcgatgctgaaccgactggttttgcatagacgaggcatccgtgcagcatgatggcaacgtggagtttggtcaataggacgagtggttggtacatgatgcctggttgctttccgaaaacaggcaatgttttgtgcagtcttgtcgatttctgtacatctcaattaacgtacgcgtt

SEQ ID NO: 41657 - DNA, 677 bp, Zea Mays
agtcttctccgatccgagtccgacgatctgtctcttctgtgttggtcgccccggacacaggctaatcaagttcaagttcgaccgcgcgcaggctagctccacgcggccatgccatcgctaatgtcgctgacgccgtggcggaggaagaagagggtgcctggtgggccggtgacggtgcgcacgcggcggcgcacctcgctgggtgctctgtggcggcgcctggtgcggacgctcacctgcgcgcgccgcccctactactgaccgaccgatagacgatatcggttgccagctgatgagagaggtgctgtgctaacagatgagggatcgatgcaatacaatgcaagcaagcttgtccgtgatgtgtttgttcatagtcgtatcatgtgagacggttctagctaatgtatcgtgtcgactacttttttataccacctacgtatatatatgtataatttctatatctaataacatgtgcccttcctcttgaaaagtttgggctctgcttgcctgaaatttagattgttgctacttcagatgtctgaaatatagattgtgttcagtgacgtttcacattgtattagatctgcatccaaaaccaagagtctagatttgtttatagtgaattatatatagtagatccagaaattatttgttatacaacactatcttagcagatc

SEQ ID NO: 41658 - DNA, 2450 bp, Zea Mays
ggccgctgctgcctctgcaggctctgcaaggctgctagctgaccaaactccccctcctccgaccttcccgaatttctgatgctgttgccacttgaatgctctcctctcgcgcggtgcctgccgttgctgctctgatgccgatggatcccgcgccgacccaaccgcatccgcatgccacccacctcccctccgcctcgatccgcattaattactccgacctcaccacttcctcgccgcttccaaatcccaataataccatcgcgtaaatccagatatcagggcagctggaactgaaggtggcgggagccgagtgatccggcggtgagctgagcggggcgggatggcggcggagcaggggcggtcgctggcggagacgcccacctggtccgtggcaaccgtcaccacgctcatggtcgctgcctgcttcctcgtcgagcgctccctctcgcgcttcgccaagtggctgcgcaagaccaagcggaaggccatgctcgccgcgctcgagaagatccgcgaagagctgatgctgctcggagtcatctcgctgctgctcagccagacggcgcgcttcatatcggagatctgcgtgccgtcctcgctcttcaccagccgcttctacatctgctccgagagcgactaccaggacctgctgcgcaacacggacgccaaccagacggcgctcgacaagaacatgttcggtggccaacggctgcacgtctgtggcgagggccatgaaccttttgtttcgtacgagggccttgagcagctgcaccggtttctcttcatccttggtatcactcatgtgttgtacagttttgtaacagtggttctgtccatgatcaagatctatagctggaggaagtgggaaaccttagcaggtccaattgctgctgaggaattgaaagctaggagaaccaaggtgatgagaaggcagtcaacctttgtttttaacaatgcttctcatccatggagcaaaaataaaatacttatttggatgctttgctttttgcgtcaattcaagggctccataataaggtcagactatttggcactgaggttgggctttgtcacatatcacaagctaccacattcatatgacttccataaatacatggtacggagcatggaagatgattacaatgggactattggtatcagttggccactttgggcatatgcgattgtctgcatattaatcaatgttcatggtatcaatatatatttctggttgtcctttgttcctgttattttggctttggaagtcgctgaggcaacagcgccttatgttggctcacaacttaaactgcgtgatgatctattttggtttggaaagcctcgggtactctggtggcttatacagttcatttcatttcagaatgcttttgagctggcaacattcttatggtctctgtgggaactcagtgcacaaacatgtttcatgaagcactactacatggttgccattcggttgatttctgggctcctagttcagttttggtgcagctacagcacactgccgctgaatgtgattatttctcagatgggttccaagttcaagaaatcactggtctcggagaacgtgagggagtcgctgcacagctggtgcaagagggttaaggacaggagccgacacaatccgctcttctcgcggaacgggaccctcacgaccagatccgtgtgctccctagacaccacctacgagacggatcacgagacgaacacggtgtgcacgctgtcgaggacggcgtcggcgacgtcgctggacgaccagttgaccgtggtcaccgtcgatgacgagccgtcctgcattgagaaggatgtctgacgcagttgctgattcgccaaaactacatactgcaccgacctgtgtgttaggaggtactctaggactgaaatgaatgtatatgtgcagtggttgcccctatcgtggcagtgaccatgtgtatatatagaactaaaaaaactataatgtctcttagctgagagtgagaggctgtacatggaaatacttgaggcagcttggaccaaatacaaaactgcatcttttcgagataagccgtccgttgcaactgcacgtaaccatgtaactcctttccctacttctactttgaagcacgactttcaactgtcgtgcatcatgcgtgtcgcgcatatgtttattctctctcgagatcttatctcactaagggttagtttaagaacccattttttctaaggcctcgtttatttcgttggaattgaattctattctaataattataatttagacaaaactaattgagttaatatatttatttatgtaatgtatttgtatgttatcctaaatcatatcagatagatagttatacattatatttatgttatagagaaataagtaaaagagtgtgctataaattgtatattagaaaagtaacatgtaaatctataaaattaattacaattctaaaaaa

SEQ ID NO: 41659 - DNA, 2758 bp, Zea Mays
ctgctgcctctgcaggctctgcaaggctgctagctgaccaaactccccctcctccgaccttcccgaatttctgatgctgttgccacttgaatgctctcctctcgcgcggtgcctgccgttgctgctctgatgccgatggatcccgcgccgacccaaccgcatccgcatgccacccacctcccctccgcctcgatccgcattaattactccgacctcaccacttcctcgccgcttccaaatcccaataataccatcgcgtaaatccagatatcagggcagctggaactgaaggtggcgggagccgagtgatccggcggtgagctgagcggggcgggatggcggcggagcaggggcggtcgctggcggagacgcccacctggtccgtggcaaccgtcaccacgctcatggtcgctgcctgcttcctcgtcgagcgctccctctcgcgcttcgccaagtggctgcgcaagaccaagcggaaggccatgctcgccgcgctcgagaagatccgcgaagagctgatgctgctcggagtcatctcgctgctgctcagccagacggcgcgcttcatatcggagatctgcgtgccgtcctcgctcttcaccagccgcttctacatctgctccgagagcgactaccaggacctgctgcgcaacacggacgccaaccagacggcgctcgacaagaacatgttcggtggccaacggctgcacgtctgtggcgagggccatgaaccttttgtttcgtacgagggccttgagcagctgcaccggtttctcttcatccttggtatcactcatgtgttgtacagttttgtaacagtggttctgtccatgatcaagatctatagctggaggaagtgggaaaccttagcaggtccaattgctgctgaggaattgaaagctaggagaaccaaggtgatgagaaggcagtcaacctttgtttttaacaatgcttctcatccatggagcaaaaataaaatacttatttggatgctttgctttttgcgtcaattcaagggctccataataaggtcagactatttggcactgaggttgggctttgtcacatatcacaagctaccacattcatatgacttccataaatacatggtacggagcatggaagatgattacaatgggactattggtatcagttggccactttgggcatatgcgattgtctgcatattaatcaatgttcatggtatcaatatatatttctggttgtcctttgttcctgttattctggtgcttctagtgggtactgaacttcagcacgtcattgctcagttggctttggaagtcgctgaggcaacagcgccttatgttggctcacaacttaaactgcgtgatgatctattttggtttggaaagcctcgggtactctggtggcttatacagttcatttcatttcagaatgcttttgagctggcaacattcttatggtctctggtgagaatcttcttaatccgtatgatcgggattaaattatttggacaaacagccaatagtacaagaatataggatgagaacatgtccagcactctgtctgtagggtgctgggtttatgtattttttttaaattgcttgctagtccataaggtgcgaataaccacttccctagctcaagggagaagaaaagaactgcagagttgtcatcctccaatgatccgtatagctcgatttgttatttatacttattggcacacatcttgtgcagtgggaactcagtgcacaaacatgtttcatgaagcactactacatggttgccattcggttgatttctgggctcctagttcagttttggtgcagctacagcacactgccgctgaatgtgattatttctcagatgggttccaagttcaagaaatcactggtctcggagaacgtgagggagtcgctgcacagctggtgcaagagggttaaggacaggagccgacacaatccgctcttctcgcggaacgggaccctcacgaccagatccgtgtgctccctagacaccacctacgagacggatcacgagacgaacacggtgtgcacgctgtcgaggacggcgtcggcgacgtcgctggacgaccagttgaccgtggtcaccgtcgatgacgagccgtcctgcattgagaaggatgtctgacgcagttgctgattcgccaaaactacatactgcaccgacctgtgtgttaggaggtactctaggactgaaatgaatgtatatgtgcagtggttgcccctatcgtggcagtgaccatgtgtatatatagaactaaaaaaactataatgtctcttagctgagagtgagaggctgtacatggaaatacttgaggcagcttggaccaaatacaaaactgcatcttttcgagataagccgtccgttgcaactgcacgtaaccatgtaactcctttccctacttctactttgaagcacgactttcaactgtcgtgcatcatgcgtgtcgcgcatatgtttattctctctcgagatcttatctcactaagggttagtttaagaacccattttttctaaggcctcgtttatttcgttggaattgaattctattctaataattataatttagacaaaactaattgagttaatatatttatttatgtaatgtatttgtatgttatcctaaatcatatcagatagatagttatacattatatttatgttatagagaaataagtaaaagagtgtgctataaattgtatattagaaaagtaacatgtaaatctataaaattaattacaattctaaaaaa

SEQ ID NO: 41660 - DNA, 1756 bp, Zea Mays
cggcagaacatccgtcgacgtcgccgacaggcgacacgaggctcacggctcacggctcaccagtcacctctaggtcttttccaaaaaaaaaagaagcccctcctatccatccctatccctacccctacgagtatccaagtccaaccagcaagaggggaggcgctgcacgcaggtcacgcggcgatggacatatgcgatgtttgagcaggcggtggcagatttctgctggcatgcgagggaagtagtgtcgtcagggatggggctctggggttggccgtgggggcgacgtgggccgtcgggcttcggctccgcgtccaccgccgaggaggtcaccgccggcgtcgacgcaagcaacatcactgccatcgtcacaggagcgacgaatggcattggaaaggagacagccagagttctagcactgaggggagccaaggtaatcataccagctaggacactggagagtggcctcaagttgaaggagagcctcgcagatgaggtcccaagctccaaggtacacgttatggagatggacctgagctgtctcagctccgtccgcgacttcgcacggtccttcaattcatcccacaagcatctgaacctcctcatggatcatggcctgcccttaccagctgtccaaggatggaattgagctgcaattcgcaacgaatcatgttggccatttcttgctgacaagtctcctgctagacaagatgaaatcaactgctgcagagacaggtgtgcagggaaggatcataaacgtatcatcggtcgcgcataaaagaagtgatggtacatgctttgagctgaacaagctaaacgataaggctaggtacaaaccgttcattgcatacgcgcattcgaagttagccaatattctccacacaaatgagttgtccaggcgttttcaggaagaaggatgcaacctgacagcgaattccctgcatcctggagtgatcatcaccaatatcattcgctatgttgctggaaacagtgcgctgatttcggctctctcccctgtagcaaatcttgttctgaagagcgtgccccggggggctgcaactacttgttacttggcattgcaccctaatgtcaaaggtgtatctggtaaatacttcgctgattgcaatgaagcaacaccgactgctgtcgcgagagactcagagctggcgaagaggctatggtcgttcagcgaagaacttgtcaagatctatgctgatatgtcacagacgacacaggcaagcgaagaggaggaaaccacggttacgaaagacgttttccaagacaagtagcgtaatatatgttgctgcgttttctactttttgtacatgtcctctgggcccgaatggccagtgactgtaatagcacctaagtgcccgagactggtaaggggtattcagacaatcaatcaagaaaccacggtgcggctgaggcctgaggcagtcctctccgtcgttcacccaaatctgagatcactcgtgtgctcacgtcgacggtgattagccggtggccccgggtgttgcaagatagaagaccaaaattatacgatcatatggaaacaagatgtgcctgcaatcatatgatatgagagtactagtgttggataatttttattcttcggaaagcgccaaaatcataaacgtttgatagttttagcattaagagcagccttggttgtttatttgtttccatgcttcttgaattgtcaggaagatcatgacttgtgacgacattaacagctgttacactattggactgg

SEQ ID NO: 41661 - DNA, 1598 bp, Zea Mays
cggcagaacatccgtcgacgtcgccgacaggcgacacgaggctcacggctcacggctcaccagtcacctctaggtcttttccaaaaaaaaaagaagcccctcctatccatccctatccctacccctacgagtatccaagtccaaccagcaagaggggaggtcaccgccggcgtcgacgcaagcaacatcactgccatcgtcacaggagcgacgaatggcattggaaaggagacagccagagttctagcactgaggggagccaaggtaatcataccagctaggacactggagagtggcctcaagttgaaggagagcctcgcagatgaggtcccaagctccaaggtacacgttatggagatggacctgagctgtctcagctccgtccgcgacttcgcacggtccttcaattcatcccacaagcatctgaacctcctcataaacaatgcagggatcatggcctgcccttaccagctgtccaaggatggaattgagctgcaattcgcaacgaatcatgttggccatttcttgctgacaagtctcctgctagacaagatgaaatcaactgctgcagagacaggtgtgcagggaaggatcataaacgtatcatcggtcgcgcataaaagaagtgatggtacatgctttgagctgaacaagctaaacgataaggctaggtacaaaccgttcattgcatacgcgcattcgaagttagccaatattctccacacaaatgagttgtccaggcgttttcaggaagaaggatgcaacctgacagcgaattccctgcatcctggagtgatcatcaccaatatcattcgctatgttgctggaaacagtgcgctgatttcggctctctcccctgtagcaaatcttgttctgaagagcgtgccccggggggctgcaactacttgttacttggcattgcaccctaatgtcaaaggtgtatctggtaaatacttcgctgattgcaatgaagcaacaccgactgctgtcgcgagagactcagagctggcgaagaggctatggtcgttcagcgaagaacttgtcaagatctatgctgatatgtcacagacgacacaggcaagcgaagaggaggaaaccacggttacgaaagacgttttccaagacaagtagcgtaatatatgttgctgcgttttctactttttgtacatgtcctctgggcccgaatggccagtgactgtaatagcacctaagtgcccgagactggtaaggggtattcagacaatcaatcaagaaaccacggtgcggctgaggcctgaggcagtcctctccgtcgttcacccaaatctgagatcactcgtgtgctcacgtcgacggtgattagccggtggccccgggtgttgcaagatagaagaccaaaattatacgatcatatggaaacaagatgtgcctgcaatcatatgatatgagagtactagtgttggataatttttattcttcggaaagcgccaaaatcataaacgtttgatagttttagcattaagagcagccttggttgtttatttgtttccatgcttcttgaattgtcaggaagatcatgacttgtgacgacattaacagctgttacactattggactgg

SEQ ID NO: 41662 - DNA, 1702 bp, Zea Mays
cttctgacaagggggcagggctgctgttgtgaattgggaaaagctgggtagtcagtttcttatgaacacgccctcaactcaactggccagctgctgtggggactctgcaaaggatatcacttacaaagtcgtcgtgcaagtttgcgctcaaggggctcaagaactggatgaagcccgagaaggtacctgcggccataactacattcccgtcctccgcccaaatcgtgccggagcccctcggcgtcgtgctcatcatctcagcctggaactaccctttcatactctctatcgacccagtcattggagcaatcgctgctggaaatgctgttgttctgaagccatcagaaatagcgccagctacctcgtcactgttagcaaagctgctacccgagtatgttgacaactcctgtattaaagttgtggagggaagcgttccagaaacaaccgcactcttggaacagagatgggataagatcttctacacaggtaatggaactgtaggacgtatagtgatggcagcagccgcaaagcatctgaccccggtagctctggagcttggtgggaaatcccctgttatcgtggattcaaatgttgatctccatgttgctgctaagaggattgttgttggcaaatggggatgcaacaacggccaagcatgcattgctccagattacatcataacgacaaaatcatttgcaccggagctggtggcctctttcaaaagagttttggaaaggttctatggggaggatcctctggaatcagcagacttgtctcgtattgtgaattcgaagcagttcaaaagattgacaaatttgatagaagaaaaaagagttgctgacaagattgtgtacggcggcaaggctgatgagaagcaactaaaaatttctcctacactattgttagatgttcctgaagattcagaaattatgacaggcgaaatatttgggcccttgcttcctattgtgacggtcgaaaagattgaggaaagcttcgacttgatcaatgccaagcctaagccactagccgcctaccttttcaccaagaataggaagctgcaagaggagtttgtggcaagcgtccctgcaggagggatgcttgtaaacgacactgcgctacatctcaccaacccgtacatgcccttcggcggcgtcggcgacagcgggatggggtgctaccacggcaagttcggcttcgactgcttcagccacaagaagggagtcctgatccgcggctttggcggggaggcgaacgccaggtacccgccctacacgacggagaagcagaagatcctgaggggcctcatcaacggcagcttcatcgccctcatccttgccctcctgggcttccccagggagaagcgttagatgctccggcctcttgtcggtttcgtatgtcatgccgctgaaagaggaattgaaggcggcagtggaacttcagttgccaaacaccatggccccagctgctacattggcctgtgcaagagagtgtgctggctagattgcagaggtctacgactaaagtatctgtatcgagcacagttcataggtcatacgagcttcaaccataacgtcctgatctggaaacccttgggaccttctaagtgtaagtttttcgcatggctcatcattcacaaccggctttggacggcacacggcagatagtttagctaagcgggactggccgcatgacctggtatgtt

SEQ ID NO: 41663 - DNA, 1847 bp, Zea Mays
gtcagtttcttatgaacacgccctcaactcaactggccagctgctgtggggactctgcaaagggtagcgttgcgtgtaaattggtttcttggtggtgtttgcttccacggtctccccgatatcacttacaaagtcgtcgtgcaagtttgcgctcaaggggctcaagaactggatgaagcccgagaaggtacctgcggccataactacattcccgtcctccgcccaaatcgtgccggagcccctcggcgtcgtgctcatcatctcagcctggaactaccctttcatactctctatcgacccagtcattggagcaatcgctgctggaaatgctgttgttctgaagccatcagaaatagcgccagctacctcgtcactgttagcaaagctgctacccgagtatgttgacaactcctgtattaaagttgtggagggaagcgttccagaaacaaccgcactcttggaacagagatgggataagatcttctacacaggtaatggaactgtaggacgtatagtgatggcagcagccgcaaagcatctgaccccggtagctctggagcttggtgggaaatcccctgttatcgtggattcaaatgttgatctccatgttgctgctaagaggattgttgttggcaaatggggatgcaacaacggccaagcatgcattgctccagattacatcataacgacaaaatcatttgcaccggagctggtggcctctttcaaaagagttttggaaaggttctatggggaggatcctctggaatcagcagacttgtctcgtattgtgaattcgaagcagttcaaaagattgacaaatttgatagaagaaaaaagagttgctgacaagattgtgtacggcggcaaggctgatgagaagcaactaaaaatttctcctacactattgttagatgttcctgaagattcagaaattatgacaggcgaaatatttgggcccttgcttcctattgtgacggtcgaaaagattgaggaaagcttcgacttgatcaatgccaagcctaagccactagccgcctaccttttcaccaagaataggaagctgcaagaggagtttgtggcaagcgtccctgcaggagggatgcttgtaaacgacactgcgctacatctcaccaacccgtacatgcccttcggcggcgtcggcgacagcgggatggggtgctaccacggcaagttcggcttcgactgcttcagccacaagaagggagtcctgatccgcggctttggcggggaggcgaacgccaggtacccgccctacacgacggagaagcagaagatcctgaggggcctcatcaacggcagcttcatcgccctcatccttgccctcctgggcttccccagggagaagcgttagatgctccggcctcttgtcggtttcggtacagcctttttagtccctgttcgtcgtcaggtgcacagtatacaccgtcatattctgtcaaatagatgcaatgcaacgactgcgcgccgtgcttgtgttgcaagcgtggataatgcatatatattgtagcattgacatgatgtgcgttattgcattacgtaagggagttggataaataagtgtgatttgtttgtcaattattcagtgttgagaatggatgatacttgcatacagtttacttcacgatttaggggactaaagtttagtctgtttagttttagtgactaaaagtactcgaaacgcatcaaatgacacttataagaagactaaaatatcttttaacatggtgaaattaatatagtttaaaggtgaaattaatatagtttagtgttttttagttatcctttgagacactaggaattaaaacagggaagtgtaaatgaaataa

SEQ ID NO: 41664 - DNA, 3579 bp, Zea Mays
ctcaaacctcatccgtttagcaaccgtccaagaacgtcaatttcagaaaaagaagatctcatggttccattttcacctcttttctccgtctcccctttttccagccatatttgtttccgaacctttttcgtgtaccgtgtttattgtgttttccatttcaccccttgttttcgacatgccattgctcctccctcaaacgccacggcttttttcacgaaccaactgtgacaatccagtcaattctgatctctaggccctcgcttccccttcctgtggatgccatcggggcgctcaccgggacaacatactcctcgacagcgacgccgccgcgcttccttgaggaaagctcgtagctgcccccgcgcaaagctccggtctttcttggccctgacccctcctccccgccgccggcgccgcgtgagcacgccgcgcttggcttgatgctcgacttctgcgcgccccacgggcccgccaagctcccggttgcgtctgtcgctggggtgcgagtcgccggcaggtggttgtggcgatcggcggcggttggggcggtgcgccatggcgtctccgcgcgggcctcatccttcggttcccggatcgggctcgattctcagaattttcacacaagggacctctcccagttgttgtggatcggtccggtgccaggtgacatcgcagagattgaggcctactgccgcatattccgtgctgccgagcagctccatactgcagtcatgtcagcactctgtgatccagagacaggagagtgccctgtacgctatgatgttgaatcagaggatctgccggtgctggaagacaaggttgctgccgtccttggctgcatgctggcgttgctgaaccggggaaggaatgaggtgctctcagggagatcaggtgttgcaagtgccttccagggatctgaggacagcactgctgataggatcccaccgctcgccttgttccgtggagacatgaagcgttgctgtgagagtatgcaggtggcgcttgcaagctaccttgtgccaagtgaacctagggggttggacatatggaggaagctgcagagattaaagaacacttgttatgatgcaggtttcccgagggctgatggttatccatgtccgacattgtttgcaaattggtttccagtgtacctttcgattgtgtcagatgattcaggaatggatgagctagaggttgcattttggaggggaggacaagtcagtgaggagggactggcatggctacttggaaagggattcaaaactattgttgatctccgggaagaagatgttaaagatgatttgtacctttcagcagttcaggaagctgtctcatctgggaagatagaggtggtgaatatgccagttgagattggaactgcaccatcagctgaacaggttcagcaatttgcagctcttgtgtcagatggcgcaaagaagcccatttatctctacagcaaagaaggtgtttctaggacgtctgcaatggtctcaagatggaaacagtatgttactcgttcagagagattggctgtccaaaatcactctctaaatgggaatggtaacatcctgacaaatcacaagaccatgcagcacactggcataccaagttcctctccgaatggagctgaaaatggtatgataacagaatctgataggaccatgaacaatggggaatcaagtgagatagacatagatacagctcgtcataatctggaggtcactaatgccctttgtaatgatcaaagcactcaacaaggtgaaatgcctgacaccgtggcagaactcttgtcaaactttaaactggagagtaacccccttaaagcacaatttcctacttgcgatgttttctctagaaaagagatgaccaagttttttagaagcaaaacagtttatccaaaatctgttctgaactctaggagacgatcaagtagcttggttataaggagaaaacaaaatctctgcacggagcgtagtggaaccaatgactatgaagcagcagagtttgcagttctcagaagttcaaatggaaaatcatttgacagtgattatattctatcagttgcttcaggtatcactgatggaaaaccttcaaacaatgaagcctcattaattgaggaaaaggaaagggaagtttcagttgccactattgacactagagcatctgccaacagttctaatagaaaggttcaggttggatcacaagaatctgctgaaaagaatagtaccccttatcttgagagaaacaaatcagataatgttgatagaaatatgtgtgcatctgcaactggtgttgttagactccagtcaagaagaaaagcagagatgtttctagtacgtactgatggattttcttgtactagagaaaaagtaacagaatcatctctggcttttacgcatcctagtacccagcaacagatgcttatgtggaaatcacctccaaagactgtcttacttttgaagaaattaggagatgagctcatggaagaagctaaagaggttgcttcatttctgcatcatcaagaaaagatgaatgttcttgtggaacctgatgttcatgatacatttgctagaattccaggttatggttttgtgcaaaccttctatactcaagataccagtgaccttcatgagcgaattgattttgttacatgcttgggtggtgatggactcattttgcatgcatcaaacttatttagaacttctgtaccacctgttgtctccttcaatctcggatctcttgggttcttaacttcacataatttcgaaggtttcagacaagatttgagagatttaatccatgggaacaacacacttggaatttatataactcttagaatgcgtctaagatgtgagatctttcgcaaaggaaaatcaatgcctggtaaagtgtttgatgtgctgaatgaagttgttgttgatcgaggttccaatccatacctatcaaaaattgagtgttatgagcataaccaccttatcactaaggtgcaagctgacggggtgatagttgcaacaccaactggcagcacagcatattctactgcagcagggggatcaatggttcatccaaacgtcccatgcatgctgtttactccaatctgccctcactcactgtcatttagacctgtcatccttccggattctgcccggcttgaattaaagataccagatgaggcaagaagcaatgcatgggtttcgtttgatggcaaaaggaggcagcaactgtcaagaggagattctgttcgtatatccatgagtcagcacccactcccaactgttaataaatctgaccaaacgggtgattggttccgcagcctgatcaggtgtctcaactggaacgagagattggaccagaaggcattataggcactagaaaattttttattgtttctgtacatatgtaaatttatacacatatagttttgtttttctgccaacatgtacaacgtgtaacatcaaagaatcttgcacgtaaggagctccgtagcttactttatccatgtattcacgtgcttcacaaatcaacttatatattatatgcccgtacgttgctacgagagcttaaaattagtataaaata

SEQ ID NO: 41665 - DNA, 2966 bp, Zea Mays
ttttcgtgtaccgtgtttattgtgttttccatttcaccccttgttttcgacatgccattgctcctccctcaaacgccacggcttttttcacgaaccaactgtgacaatccagtcaattctgatctctaggccctcgcttccccttcctgtggatgccatcggggcgctcaccgggacaacatactcctcgacagcgacgccgccgcgcttccttgaggaaagctcgtagctgcccccgcgcaaagctccggtctttcttggccctgacccctcctccccgccgccggcgccgcgtgagcacgccgcgcttggcttgatgctcgacttctgcgcgccccacgggcccgccaagctcccggttgcgtctgtcgctggggtgcgagtcgccggcaggtggttgtggcgatcggcggcggttggggcggtgcgccatggcgtctccgcgcgggcctcatccttcggttcccggatcgggctcgattctcagaattttcacacaagggacctctcccagttgttgtggatcggtccggtgccaggtgacatcgcagagattgaggcctactgccgcatattccgtgctgccgagcagctccatactgcagtcatgtcagcactctgtgatccagagacaggagagtgccctgtacgctatgatgttgaatcagaggatctgccggtgctggaagacaaggttgctgccgtccttggctgcatgctggcgttgctgaaccggggaaggaatgaggtgctctcagggagatcaggtgttgcaagtgccttccagggatctgaggacagcactgctgataggatcccaccgctcgccttgttccgtggagacatgaagcgttgctgtgagagtatgcaggtggcgcttgcaagctaccttgtgccaagtgaacctagggggttggacatatggaggaagctgcagagattaaagaacacttgttatgatgcaggtttcccgagggctgatggttatccatgtccgacattgtttgcaaattggtttccagtgtacctttcgattgtgtcagatgattcaggaatggatgagctagaggttgcattttggaggggaggacaagtcagtgaggagggactggcatggctacttggaaagggattcaaaactattgttgatctccgggaagaagatgttaaagatgatttgtacctttcagcagttcaggaagctgtctcatctgggaagatagaggtggtgaatatgccagttgagattggaactgcaccatcagctgaacaggttcagcaatttgcagctcttgtgtcagatggcgcaaagaagcccatttatctctacagcaaagaaggtgtttctaggacgtctgcaatggtctcaagatggaaacagtatgttactcgttcagagagattggctgtccaaaatcactctctaaatgggaatggtaacatcctgacaaatcacaagaccatgcagcacactggcataccaagttcctctccgaatggagctgaaaatggtatgataacagaatctgataggaccatgaacaatggggaatcaagtgagatagacatagatacagctcgtcataatctggaggtcactaatgccctttgtaatgatcaaagcactcaacaaggtgaaatgcctgacaccgtggcagaactcttgtcaaactttaaactggagagtaacccccttaaagcacaatttcctacttgcgatgttttctctagaaaagagatgaccaagttttttagaagcaaaacagtttatccaaaatctgttctgaactctaggagacgatcaagtagcttggttataaggagaaaacaaaatctctgcacggagcgtagtggaaccaatgactatgaagcagcagagtttgcagttctcagaagttcaaatggaaaatcatttgacagtgattatattctatcagttgcttcaggtatcactgatggaaaaccttcaaacaatgaagcctcattaattgaggaaaaggaaagggaagtttcagttgccactattgacactagagcatctgccaacagttctaatagaaaggttcaggttggatcacaagaatctgctgaaaagaatagtaccccttatcttgagagaaacaaatcagataatgttgatagaaatatgtgtgcatctgcaactggtgttgttagactccagtcaagaagaaaagcagagatgtttctagtacgtactgatggattttcttgtactagagaaaaagtaacagaatcatctctggcttttacgcatcctagtacccagcaacagatgcttatgtggaaatcacctccaaagactgtcttacttttgaagaaattaggagatgagctcatggaagaagctaaagaggttgcttcatttctgcatcatcaagaaaagatgaatgttcttgtggaacctgatgttcatgatacatttgctagaattccaggttatggttttgtgcaaaccttctatactcaagataccagtgaccttcatgagcgaattgattttgttacatgcttgggtggtgatggactcattttgcatgcatcaaacttatttagaacttctgtaccacctgttgtctccttcaatctcggatctcttgggttcttaacttcacataatttcgaaggtttcagacaagatttgagagatttaatccatgggaacaacacacttggaatttatataactcttagaatgcgtctaagatgtgagatctttcgcaaaggaaaatcaatgcctggtaaagtgtttgatgtgctgaatgaagttgttgttgatcgaggttccaatccatacctatcaaaaattgagtgttatgagcataaccaccttatcactaaggtgcaagctgacggggtgatagttgcaacaccaactggcagcacagcatattctactgcagcagggggatcaatggattgttataactagtggacctgagggctga

SEQ ID NO: 41666 - DNA, 3623 bp, Zea Mays
tttcaccccttgttttcgacatgccattgctcctccctcaaacgccacggcttttttcacgaaccaactgtgacaatccagtcaattctgatctctaggccctcgcttccccttcctgtggatgccatcggggcgctcaccgggacaacatactcctcgacagcgacgccgccgcgcttccttgaggaaagctcgtagctgcccccgcgcaaagctccggtctttcttggccctgacccctcctccccgccgccggcgccgcgtgagcacgccgcgcttggcttgatgctcgacttctgcgcgccccacgggcccgccaagctcccggttgcgtctgtcgctggggtgcgagtcgccggcaggtggttgtggcgatcggcggcggttggggcggtgcgccatggcgtctccgcgcgggcctcatccttcggttcccggatcgggctcgattctcagaattttcacacaagggacctctcccagttgttgtggatcggtccggtgccaggtgacatcgcagagattgaggcctactgccgcatattccgtgctgccgagcagctccatactgcagtcatgtcagcactctgtgatccagagacaggagagtgccctgtacgctatgatgttgaatcagaggatctgccggtgctggaagacaaggttgctgccgtccttggctgcatgctggcgttgctgaaccggggaaggaatgaggtgctctcagggagatcaggtgttgcaagtgccttccagggatctgaggacagcactgctgataggatcccaccgctcgccttgttccgtggagacatgaagcgttgctgtgagagtatgcaggtggcgcttgcaagctaccttgtgccaagtgaacctagggggttggacatatggaggaagctgcagagattaaagaacacttgttatgatgcaggtttcccgagggctgatggttatccatgtccgacattgtttgcaaattggtttccagtgtacctttcgattgtgtcagatgattcaggaatggatgagctagaggttgcattttggaggggaggacaagtcagtgaggagggactggcatggctacttggaaagggattcaaaactattgttgatctccgggaagaagatgttaaagatgatttgtacctttcagcagttcaggaagctgtctcatctgggaagatagaggtggtgaatatgccagttgagattggaactgcaccatcagctgaacaggttcagcaatttgcagctcttgtgtcagatggcgcaaagaagcccatttatctctacagcaaagaaggtgtttctaggacgtctgcaatggtctcaagatggaaacagtatgttactcgttcagagagattggctgtccaaaatcactctctaaatgggaatggtaacatcctgacaaatcacaagaccatgcagcacactggcataccaagttcctctccgaatggagctgaaaatggtatgataacagaatctgataggaccatgaacaatggggaatcaagtgagatagacatagatacagctcgtcataatctggaggtcactaatgccctttgtaatgatcaaagcactcaacaaggtgaaatgcctgacaccgtggcagaactcttgtcaaactttaaactggagagtaacccccttaaagcacaatttcctacttgcgatgttttctctagaaaagagatgaccaagttttttagaagcaaaacagtttatccaaaatctgttctgaactctaggagacgatcaagtagcttggttataaggagaaaacaaaatctctgcacggagcgtagtggaaccaatgactatgaagcagcagagtttgcagttctcagaagttcaaatggaaaatcatttgacagtgattatattctatcagttgcttcaggtatcactgatggaaaaccttcaaacaatgaagcctcattaattgaggaaaaggaaagggaagtttcagttgccactattgacactagagcatctgccaacagttctaatagaaaggttcaggttggatcacaagaatctgctgaaaagaatagtaccccttatcttgagagaaacaaatcagataatgttgatagaaatatgtgtgcatctgcaactggtgttgttagactccagtcaagaagaaaagcagagatgtttctagtacgtactgatggattttcttgtactagagaaaaagtaacagaatcatctctggcttttacgcatcctagtacccagcaacagatgcttatgtggaaatcacctccaaagactgtcttacttttgaagaaattaggagatgagctcatggaagaagctaaagaggtgaatgccaaatttccatttagagcatatatattgtttttctttccttgattcttcagaaacccacacaggttgtattcatttcttgtatctggtatcaatggattactcatctcaaggaagctttagggtctttgacatatataatgaatatgctacttgagaaattcgtatgtgaaaatggtctcatgttctggaggttgcttcatttctgcatcatcaagaaaagatgaatgttcttgtggaacctgatgttcatgatacatttgctagaattccaggttatggttttgtgcaaaccttctatactcaagataccagtgaccttcatgagcgaattgattttgttacatgcttgggtggtgatggactcattttgcatgcatcaaacttatttagaacttctgtaccacctgttgtctccttcaatctcggatctcttgggttcttaacttcacataatttcgaaggtttcagacaagatttgagagatttaatccatgggaacaacacacttggaatttatataactcttagaatgcgtctaagatgtgagatctttcgcaaaggaaaatcaatgcctggtaaagtgtttgatgtgctgaatgaagttgttgttgatcgaggttccaatccatacctatcaaaaattgagtgttatgagcataaccaccttatcactaaggtgcaagctgacggggtgatagttgcaacaccaactggcagcacagcatattctactgcagcagggggatcaatggttcatccaaacgtcccatgcatgctgtttactccaatctgccctcactcactgtcatttagacctgtcatccttccggattctgcccggcttgaattaaagataccagatgaggcaagaagcaatgcatgggtttcgtttgatggcaaaaggaggcagcaactgtcaagaggagattctgttcgtatatccatgagtcagcacccactcccaactgttaataaatctgaccaaacgggtgattggttccgcagcctgatcaggtgtctcaactggaacgagagattggaccagaaggcattataggcactagaaaattttttattgtttctgtacatatgtaaatttatacacatatagttttgtttttctgccaacatgtacaacgtgtaacatcaaagaatcttgcacgtaaggagctccgtagcttactttatccatgtattcacgtgcttcacaaatcaacttatatattatatgcccgtacgttgctacgagagcttaaaattagtataaaata

SEQ ID NO: 41667 - DNA, 557 bp, Zea Mays
tgccacatggcgcaaaggtgcctcggggactgaaactgttcatccaaacgtcccatgcatgctgtttactccaatctgccctcactcactgtcatttagacctgtcatccttccggattctgcccggcttgaattaaagataccagatgaggcaagaagcaatgcatgggtttcgtttgatggcaaaaggaggcagcaactgtcaagaggagattctgttcgtatatccatgagtcagcacccactcccaactgttaataaatctgaccaaacgggtgattggttccgcagcctgatcaggtgtctcaactggaacgagagattggaccagaaggcattataggcactagaaaattttttattgtttctgtacatatgtaaatttatacacatatagttttgtttttctgccaacatgtacaacgtgtaacatcaaagaatcttgcacgtaaggagctccgtagcttactttatccatgtattcacgtgcttcacaaatcaacttatatattatatgcccgtacgttgctacgagagcttaaaattagtataaaata

SEQ ID NO: 41668 - DNA, 2499 bp, Zea Mays
gtttttgggataaaattcttaacatccttttagagttgctctgagcccttcaatcttcttccaaacaaacccttagctatattttcttatcctcacgatccaccgaacaaaattttccagtaaaaaaaatacagacctcttaaatccattttgtactggtgttggtcaaaccactacaaggcatctttattctagtggagcctacttgcctgctgggccatcatattcatacgccgcctccatacagctcggaaagatatccctccgatccagttccggcatgcttaatcttcgggtcaacggtttcgatggaaacccagtgagacactgcggccttcgcccttccatcttcatccagctggggaagataaccctccgatccggcgcaggcatgcttaatctgtccaggagcatgagcgaaaagatatgattcttcatttctccttctggctataagttttagtttctttatgatgggaaataaaactggtaagcctgtcttcagtgagctcaaatccacagagtttagtttattggagagcactctagtacaggatcattgtgcaatcccgacttgtgtaccattggattttctgaaggccatcacgagtgatttctctaaggagcaagagctaggaagagggccttcttaaaaatgggaaggcgatagctgtgaagaagctttctgaaatgaacctagatgacgatcagttccataatgaagttacttatcttttcgggttgaagcacaaaaatattgtccagctaaaagcttattgtgctgaatcacggtgggaagcaatcgaattgcgcagaaaatatgtcatggctgaatctcggaaaaggctgctgtgctttgagtgtataaataataagagccttgataagcacctttctgctgaatctcatggggttgagtggcatatcagatatgagataatcaaaggaatttgccatggtttgcattaccttcacacagattgccaaattgttcatttggacctaaagcctgagaatatattgctagatgacaacatggagccaaaaattacagattttggtatgtccaggctctttggtctacaacaatccaaaatcatcaccaaaacttgtggaggaacacttggatacatggcaccagaatacttactaaaagggttgatttcagtgaaggccgacatattcagtttgggcgttataatcatagaggtgatgaccggaggccggaattatcccacttgtgaaaaatcttgcgagcaattcgctgttgatgtggttggacgttggaggaagaggttattggaggaggcaggaaggtacacacccttggaaaaatacgttgagcaagtagagacatgcatcttgataggattgatgtgtgtcgatgatgatcctaacaaaaggcccacgacattggacattatcgaaaggcttaccaaagtagatgtcacgaacacggacagagggccacccaaaactctggaggccgcgacagggcttacaggccaccccaacctcgcaactagatcatttcttgacaggttccgccgaaccatcgtgatagggatgctgaagaaggccctgaaaatccaggacgtatcgcagttggagcagctcctggccaaggaggtgctgctggagctccacaaaatcggcacgaatgcaactggaaacagatcgttcctggagaggctccacgcaagcatcaccatggctacgctggttcaggcgctgcattccttggacttggatccatcggcggcgctgcgtatggaggtgctgttcttggcgctggagaatatgcgtggaaaaaacaactcaaggcgaagaagcgaggacgtccttgagctggaggagcggccagagcagatccggtcggtgctggaggctggcaccagggccaggctcagtgatgaggaacacatgccgtcggtgtctgtgcaggctgaagaccaggcctttcccaaaccgaagttggccaaagtacgcgccaccgccccggtgtgcgtgtcagcagtgtggttggcggccggcataggattcctgtgtggattcaccctaggagagatgaggggattaaggcggacgagggtccacgaacgcacgtgatgccaatgtgcccacatgacatggccagaaaatgtcactgcggtggaccatgcatgcacgaattaaggagcaccagttagaatacgtattctagattcattttacaaattctgtatttaaaaggaacttgtgcattgtgacagaggcggcggactggatcaggttgtattgtttctgctggtgtcctgtcgtatgtataagccacggagtgtatcggatgaaattgaacagagaaatgtgcaatatagaaccgtgttgagggcagcctttcatgcttctgctaccgtttctatattgtatcctgattgcttcaaacctcccggcgattctcctgggtgtattggtttgtgtgcggcggcgaataatgatatcacggtgtttttgtgtgtg

SEQ ID NO: 41669 - DNA, 2595 bp, Zea Mays
gtttttgggataaaattcttaacatccttttagagttgctctgagcccttcaatcttcttccaaacaaacccttagctatattttcttatcctcacgatccaccgaacaaaattttccagtaaaaaaaatacagacctcttaaatccattttgtactggtgttggtcaaaccactacaaggcatctttattctagtggagcctacttgcctgctgggccatcatattcatacgccgcctccatacagctcggaaagatatccctccgatccagttccggcatgcttaatcttcgggtcaacggtttcgatggaaacccagtgagacactgcggccttcgcccttccatcttcatccagctggggaagataaccctccgatccggcgcaggcatgcttaatctgtccaggtataaagcacaaaaaagtgatcctctcatctaattgagactgttgagtatctcacatattcttgtgcttgcttgctgggatcggctttggctcaggagcatgagcgaaaagatatgattcttcatttctccttctggctataagttttagtttctttatgatgggaaataaaactggtaagcctgtcttcagtgagctcaaatccacagagtttagtttattggagagcactctagtacaggatcattgtgcaatcccgacttgtgtaccattggattttctgaaggccatcacgagtgatttctctaaggagcaagagctaggaagagggccttcttaaaaatgggaaggcgatagctgtgaagaagctttctgaaatgaacctagatgacgatcagttccataatgaagttacttatcttttcgggttgaagcacaaaaatattgtccagctaaaagcttattgtgctgaatcacggtgggaagcaatcgaattgcgcagaaaatatgtcatggctgaatctcggaaaaggctgctgtgctttgagtgtataaataataagagccttgataagcacctttctgctgaatctcatggggttgagtggcatatcagatatgagataatcaaaggaatttgccatggtttgcattaccttcacacagattgccaaattgttcatttggacctaaagcctgagaatatattgctagatgacaacatggagccaaaaattacagattttggtatgtccaggctctttggtctacaacaatccaaaatcatcaccaaaacttgtggaggaacacttggatacatggcaccagaatacttactaaaagggttgatttcagtgaaggccgacatattcagtttgggcgttataatcatagaggtgatgaccggaggccggaattatcccacttgtgaaaaatcttgcgagcaattcgctgttgatgtggttggacgttggaggaagaggttattggaggaggcaggaaggtacacacccttggaaaaatacgttgagcaagtagagacatgcatcttgataggattgatgtgtgtcgatgatgatcctaacaaaaggcccacgacattggacattatcgaaaggcttaccaaagtagatgtcacgaacacggacagagggccacccaaaactctggaggccgcgacagggcttacaggccaccccaacctcgcaactagatcatttcttgacaggttccgccgaaccatcgtgatagggatgctgaagaaggccctgaaaatccaggacgtatcgcagttggagcagctcctggccaaggaggtgctgctggagctccacaaaatcggcacgaatgcaactggaaacagatcgttcctggagaggctccacgcaagcatcaccatggctacgctggttcaggcgctgcattccttggacttggatccatcggcggcgctgcgtatggaggtgctgttcttggcgctggagaatatgcgtggaaaaaacaactcaaggcgaagaagcgaggacgtccttgagctggaggagcggccagagcagatccggtcggtgctggaggctggcaccagggccaggctcagtgatgaggaacacatgccgtcggtgtctgtgcaggctgaagaccaggcctttcccaaaccgaagttggccaaagtacgcgccaccgccccggtgtgcgtgtcagcagtgtggttggcggccggcataggattcctgtgtggattcaccctaggagagatgaggggattaaggcggacgagggtccacgaacgcacgtgatgccaatgtgcccacatgacatggccagaaaatgtcactgcggtggaccatgcatgcacgaattaaggagcaccagttagaatacgtattctagattcattttacaaattctgtatttaaaaggaacttgtgcattgtgacagaggcggcggactggatcaggttgtattgtttctgctggtgtcctgtcgtatgtataagccacggagtgtatcggatgaaattgaacagagaaatgtgcaatatagaaccgtgttgagggcagcctttcatgcttctgctaccgtttctatattgtatcctgattgcttcaaacctcccggcgattctcctgggtgtattggtttgtgtgcggcggcgaataatgatatcacggtgtttttgtgtgtg

SEQ ID NO: 41670 - DNA, 2430 bp, Zea Mays
ctgtatgttctggatgccgtgtcagtcatcctcgacgagttcccagtttggtgcacgacgatctcgccggcgtcgacactatctctgtccgagagccccgacgatagcccggtgcacttgcactcgggagcgctatgtcaagctagggtataaagcacaaaaaagtgatcctctcatctaattgagactgttgagtatctcacatattcttgtgcttgcttgctgggatcggctttggctcaggagcatgagcgaaaagatatgattcttcatttctccttctggctataagttttagtttctttatgatgggaaataaaactggtaagcctgtcttcagtgagctcaaatccacagagtttagtttattggagagcactctagtacaggatcattgtgcaatcccgacttgtgtaccattggattttctgaaggccatcacgagtgatttctctaaggagcaagagctaggaagaggtgggtttggagttgtttataagggccttcttaaaaatgggaaggcgatagctgtgaagaagctttctgaaatgaacctagatgacgatcagttccataatgaagttacttatcttttcgggttgaagcacaaaaatattgtccagctaaaagcttattgtgctgaatcacggtgggaagcaatcgaattgcgcagaaaatatgtcatggctgaatctcggaaaaggctgctgtgctttgagtgtataaataataagagccttgataagcacctttctgatatggctgcagcagttccagaaccacaagtgggtgatctcaccaatttgttcatttaaatgttcctatacagctgaatctcatggggttgagtggcatatcagatatgagataatcaaaggaatttgccatggtttgcattaccttcacacagattgccaaattgttcatttggacctaaagcctgagaatatattgctagatgacaacatggagccaaaaattacagattttggtatgtccaggctctttggtctacaacaatccaaaatcatcaccaaaacttgtggaggaacacttggatacatggcaccagaatacttactaaaagggttgatttcagtgaaggccgacatattcagtttgggcgttataatcatagaggtgatgaccggaggccggaattatcccacttgtgaaaaatcttgcgagcaattcgctgttgatgtggttggacgttggaggaagaggttattggaggaggcaggaaggtacacacccttggaaaaatacgttgagcaagtagagacatgcatcttgataggattgatgtgtgtcgatgatgatcctaacaaaaggcccacgacattggacattatcgaaaggcttaccaaagtagatgtcacgaacacggacagagggccacccaaaactctggaggccgcgacagggcttacaggccaccccaacctcgcaactagatcatttcttgacaggttccgccgaaccatcgtgatagggatgctgaagaaggccctgaaaatccaggacgtatcgcagttggagcagctcctggccaaggaggtgctgctggagctccacaaaatcggcacgaatgcaactggaaacagatcgttcctggagaggctccacgcaagcatcaccatggctacgctggttcaggcgctgcattccttggacttggatccatcggcggcgctgcgtatggaggtgctgttcttggcgctggagaatatgcgtggaaaaaacaactcaaggcgaagaagcgaggacgtccttgagctggaggagcggccagagcagatccggtcggtgctggaggctggcaccagggccaggctcagtgatgaggaacacatgccgtcggtgtctgtgcaggctgaagaccaggcctttcccaaaccgaagttggccaaagtacgcgccaccgccccggtgtgcgtgtcagcagtgtggttggcggccggcataggattcctgtgtggattcaccctaggagagatgaggggattaaggcggacgagggtccacgaacgcacgtgatgccaatgtgcccacatgacatggccagaaaatgtcactgcggtggaccatgcatgcacgaattaaggagcaccagttagaatacgtattctagattcattttacaaattctgtatttaaaaggaacttgtgcattgtgacagaggcggcggactggatcaggttgtattgtttctgctggtgtcctgtcgtatgtataagccacggagtgtatcggatgaaattgaacagagaaatgtgcaatatagaaccgtgttgagggcagcctttcatgcttctgctaccgtttctatattgtatcctgattgcttcaaacctcccggcgattctcctgggtgtattggtttgtgtgcggcggcgaataatgatatcacggtgtttttgtgtgtg

SEQ ID NO: 41671 - DNA, 688 bp, Zea Mays
gaagcccttattttttgttgatatatatttgcttcagagatttcctatactttaaagcaggaaggaatctggctcccccgtgcgtccacgtcgccaaaaaattcctttgccgttccatcgagtggtggcagcgttcctccctgtgtccgtcgtttgtagatggttctaggtctctcctcgtaccagcgtctccaaatctcacgctctctcctcctccccatctccaatctcgcactctcctctcccaaaaaacctcatcttccccgctcgtctgcattctcggccatcggcggcgctccagagttccaggccaggagaagctagagttacaaatcgtagtccgtgagaaccagttgaatttcatcaatcttatcaggtcatctcaagttcagtgactctcaaccaggttcaaaacgtgaaacgttccaagttgctacattattagtatataaaaattaatatcgctgatccagaatggaacatgttattccaagcaccacaaagaagagaaaacaaatcagtacatgttgcgccccatcgtctgtacctcctgtggaagctcgtcgcatacgtagacaattgttgaatgagcgaaggttaacatcctcaggtgcatttacatcctctcaacgggcctcaacattacaatgtggtcacttcgacccaaattttattaaagcactcaaag

SEQ ID NO: 41672 - DNA, 2473 bp, Zea Mays
gaagcccttattttttgttgatatatatttgcttcagagatttcctatactttaaagcaggaaggaatctggctcccccgtgcgtccacgtcgccaaaaaattcctttgccgttccatcgagtggtggcagcgttcctccctgtgtccgtcgtttgtagatggttctaggtctctcctcgtaccagcgtctccaaatctcacgctctctcctcctccccatctccaatctcgcactctcctctcccaaaaaacctcatcttccccgctcgtctgcattctcggccatcggcggcgctccagagttccaggccaggagaagctagagttacaaatcgtagtccgtgagaaccagttgaatttcatcaatcttatcaggtcatctcaagttcagtgactctcaaccaggttcaaaacgtgaaacgttccaagttgctacattattagtatataaaaattaatatcgctgatccagaatggaacatgttattccaagcaccacaaagaagagaaaacaaatcagtacatgttgcgccccatcgtctgtacctcctgtggaagctcgtcgcatacgtagacaattgttgaatgagcgaaggttaacatcctcagaatgaagcacacctaggttagcaaaggcatgccagattctacatgttccaagaatgacaacatttagtccatcctgaaatacatcaagagaccttccttcctgatataggaaggcagggttcatgagcggcggcacgcctgcagcaagcagtagcctgcgggcagcactctcatactgcgtgaggcaagtccgcgcctatgactaccaccactacctctgccttctccacctggccccggccgtgcgcaaggccgcgttcaccttccgcgccttcaacatccagacagcaagggccatggatgtggtgtccgacccccggaccggcctcatgcgcctcctctggtggaaggaggcggtcgacaaggtctttggcaacaagctggtcgagcacctagttgcccacgcgctctcttcggtcatcgcagaccataaggttagcaagcactggctgaagcggtccgtggaggcgaggatcaacgacaccaaccgtgaggaaggcaccattcctgggacgagcgcggagttggagaggtatgcagaggacacccagtccaccatcctttacatgaccctgcaggctggcggaatacagtctaccgtggctgaccacgccgcctctcacatcggcaaggccagcgggcttctgttactgctcaaggcgctgccgcaccatgtaaataagcaagggacggtacattatatcccagctagtgtggccgaggaatgcggcctgctcatcacacgggagggtggcaggtcggaggtcagggcgggcgtgaggctgccagacgtagttttcaaggtcacatctgttgcagaggctcacctgcacaaggcgcgggagttggcatcgtccgtgcccaaagaggcgatccctgtgctcctcccagccttgccggcctaggtcctcctagataccctgcgaaggtgtgagttcaacgtgtttgatcctcggctgtcgaggggagtccacgaggtctctcctctgtggtaacagctgaagcttaactggaacgcgtggcgaagcaggtactaatgaggaggaggaactttttgccctcaaccatgggagctgctgttgttccttgtagcaaaaagctttttattggggggtttttgacatagcagagattgaataagatgagtagggtctgctacttgcagcagatttgaagctgttgaatatgtgtcgtgctttctgttgtgtttgtgggttgggctcatttacattgcacaattgcaacactgacaatgcctattttatttttgttttggaacatacaatgcctgtttgtattcatacagcagaaagcagacactatttttttgataaactcaattagttactctatagtttataaaattcctgttttcggttcagatgtcaaacttgtatgggcaactgaaacttgtatggggaagtcgagcgtgtagacgagacgtccttcactcctgccagcctcataaaacacaataccatggaaaagtccagttttgtgttgactgctgatacgagaataatcatccaagagcactataggtttctaaacttattcagcctgtcatctaggtcttcgaactctcaaaacaaatttttagatttttattgggaggggttttgcctcccaggttatgtaataatattacttctgcactcctatatttactctgttctgtaataatactacactttcttactttaaaataaagtacgttattgtaactgcttccgcattcgcgtacctctgatgtaatgtctgcgtgacgggtgaaacgctcttggaaaaggtaaggaatacagataccgaacagtaaaaagtttttcttaaaggaggacacttcctcccgcagcttcagtcttg

SEQ ID NO: 41673 - DNA, 2062 bp, Zea Mays
aacaaatcagtacatgttgcgccccatcgtctgtacctcctgtggaagctcgtcgcatacgtagacaattgttgaatgagcgaaggttaacatcctcagaatgaagcacacctaggttagcaaaggcatgccagattctacatgttccaagaatgacaacatttagtccatcctgaaatacatcaagatccatgcccttcgcggtgcgcctccgatggccagccgtcgtcaccgcgctctaactctccggtgcgcggtaatggcctccctagcaatcaccacatcagagaccttccttcctgatataggaaggcagggttcatgagcggcggcacgcctgcagcaagcagtagcctgcgggcagcactctcatactgcgtgaggcaagtccgcgcctatgactaccaccactacctctgccttctccacctggccccggccgtgcgcaaggccgcgttcaccttccgcgccttcaacatccagacagcaagggccatggatgtggtgtccgacccccggaccggcctcatgcgcctcctctggtggaaggaggcggtcgacaaggtctttggcaacaagctggtcgagcacctagttgcccacgcgctctcttcggtcatcgcagaccataaggttagcaagcactggctgaagcggtccgtggaggcgaggatcaacgacaccaaccgtgaggaaggcaccattcctgggacgagcgcggagttggagaggtatgcagaggacacccagtccaccatcctttacatgaccctgcaggctggcggaatacagtctaccgtggctgaccacgccgcctctcacatcggcaaggccagcgggcttctgttactgctcaaggcgctgccgcaccatgtaaataagcaagggacggtacattatatcccagctagtgtggccgaggaatgcggcctgctcatcacacgggagggtggcaggtcggaggtcagggcgggcgtgaggctgccagacgtagttttcaaggtcacatctgttgcagaggctcacctgcacaaggcgcgggagttggcatcgtccgtgcccaaagaggcgatccctgtgctcctcccagccttgccggcctaggtcctcctagataccctgcgaaggtgtgagttcaacgtgtttgatcctcggctgtcgaggggagtccacgaggtctctcctctgtggtaacagctgaagcttaactggaacgcgtggcgaagcaggtactaatgaggaggaggaactttttgccctcaaccatgggagctgctgttgttccttgtagcaaaaagctttttattggggggtttttgacatagcagagattgaataagatgagtagggtctgctacttgcagcagatttgaagctgttgaatatgtgtcgtgctttctgttgtgtttgtgggttgggctcatttacattgcacaattgcaacactgacaatgcctattttatttttgttttggaacatacaatgcctgtttgtattcatacagcagaaagcagacactatttttttgataaactcaattagttactctatagtttataaaattcctgttttcggttcagatgtcaaacttgtatgggcaactgaaacttgtatggggaagtcgagcgtgtagacgagacgtccttcactcctgccagcctcataaaacacaataccatggaaaagtccagttttgtgttgactgctgatacgagaataatcatccaagagcactataggtttctaaacttattcagcctgtcatctaggtcttcgaactctcaaaacaaatttttagatttttattgggaggggttttgcctcccaggttatgtaataatattacttctgcactcctatatttactctgttctgtaataatactacactttcttactttaaaataaagtacgttattgtaactgcttccgcattcgcgtacctctgatgtaatgtctgcgtgacgggtgaaacgctcttggaaaaggtaaggaatacagataccgaacagtaaaaagtttttcttaaaggaggacacttcctcccgcagcttcagtcttg

SEQ ID NO: 41674 - DNA, 1021 bp, Zea Mays
aaatcagtacatgttgcgccccatcgtctgtacctcctgtggaagctcgtcgcatacgtagacaattgttgaatgagcgaaggttaacatcctcagagaccttccttcctgatataggaaggcagggttcatgagcggcggcacgcctgcagcaagcagtagcctgcgggcagcactctcatactgcgtgaggcaagtccgcgcctatgactaccaccactacctctgccttctccacctggccccggccgtgcgcaaggccgcgttcaccttccgcgccttcaacatccagacagcaagggccatggatgtggtgtccgacccccggaccggcctcatgcgcctcctctggtggaaggaggcggtcgacaaggtctttggcaacaagctggtcgagcacctagttgcccacgcgctctcttcggtcatcgcagaccataaggttagcaagcactggctgaagcggtccgtggaggcgaggatcaacgacaccaaccgtgaggaaggcaccattcctgggacgagcgcggagttggagagatgtcaaacttgtatgggcaactgaaacttgtatggggaagtcgagcgtgtagacgagacgtccttcactcctgccagcctcataaaacacaataccatggaaaagtccagttttgtgttgactgctgatacgagaataatcatccaagagcactataggtttctaaacttattcagcctgtcatctaggtcttcgaactctcaaaacaaatttttagatttttattgggaggggttttgcctcccaggttatgtaataatattacttctgcactcctatatttactctgttctgtaataatactacactttcttactttaaaataaagtacgttattgtaactgcttccgcattcgcgtacctctgatgtaatgtctgcgtgacgggtgaaacgctcttggaaaaggtaaggaatacagataccgaacagtaaaaagtttttcttaaaggaggacacttcctcccgcagcttcagtcttg

SEQ ID NO: 41675 - DNA, 1107 bp, Zea Mays
atcagtacatgttgcgccccatcgtctgtacctcctgtggaagctcgtcgcatacgtagacaattgttgaatgagcgaaggttaacatcctcagaatgaagcacacctaggttagcaaaggcatgccagattctacatgttccaagaatgacaacatttagtccatcctgaaatacatcaagagaccttccttcctgatataggaaggcagggttcatgagcggcggcacgcctgcagcaagcagtagcctgcgggcagcactctcatactgcgtgaggcaagtccgcgcctatgactaccaccactacctctgccttctccacctggccccggccgtgcgcaaggccgcgttcaccttccgcgccttcaacatccagacagcaagggccatggatgtggtgtccgacccccggaccggcctcatgcgcctcctctggtggaaggaggcggtcgacaaggtctttggcaacaagctggtcgagcacctagttgcccacgcgctctcttcggtcatcgcagaccataaggttagcaagcactggctgaagcggtccgtggaggcgaggatcaacgacaccaaccgtgaggaaggcaccattcctgggacgagcgcggagttggagagatgtcaaacttgtatgggcaactgaaacttgtatggggaagtcgagcgtgtagacgagacgtccttcactcctgccagcctcataaaacacaataccatggaaaagtccagttttgtgttgactgctgatacgagaataatcatccaagagcactataggtttctaaacttattcagcctgtcatctaggtcttcgaactctcaaaacaaatttttagatttttattgggaggggttttgcctcccaggttatgtaataatattacttctgcactcctatatttactctgttctgtaataatactacactttcttactttaaaataaagtacgttattgtaactgcttccgcattcgcgtacctctgatgtaatgtctgcgtgacgggtgaaacgctcttggaaaaggtaaggaatacagataccgaacagtaaaaagtttttcttaaaggaggacacttcctcccgcagcttcagtcttg

SEQ ID NO: 41676 - DNA, 811 bp, Zea Mays
atcgtctgtacctcctgtggaagctcgtcgcatacgtagacaattgttgaatgagcgaaggttaacatcctcagaatgaagcacacctaggttagcaaaggcatgccagattctacatgttccaagaatgacaacatttagtccatcctgaaatacatcaaggtatgacaccattttacttagctaattagttaagtgtctatgttcttcaaacttttttcagtatttagggtttccatggttttagcttttcaacctatttcttagtttctatgctccattctaaaacttgtatactacacatatttcatttggccaccaaacattgaagttctaagatgccactattttactttgcacatagactgaatgtctctgttcttcaaaatttggggtagctgtacgtaaagctgtacgtaaagctgcaatgtattcagtagttgcagtgtgttaaccataaatgatttttcggggtagctatatgtaaagctgcaatttcaaggaatacagacgcaactattgaatttaaacttgcaccttaagccacaatcgtctcatataacctaggtgattcacacacagctgtcaatattcaagtcgtatttatatctgtaatacttgcaaaatccaaaataatattgcacatatgtactctggaaaaacagatggacaagagattgtcaaatagagctgaccttgtgacacattccagtgcaaatagcaactaaatcagcacaatttcattgttagcatcacaaaagagttatgcaaagggtgcatgttggggcgaaggcaaagacgccacccttcg

SEQ ID NO: 41677 - DNA, 621 bp, Zea Mays
gctcgtcgcatacgtagacaattgttgaatgagcgaaggttaacatcctcagaatgaagcacacctaggttagcaaaggcatgccagattctacatgttccaagaatgacaacatttagtccatcctgaaatacatcaagatgtcaaacttgtatgggcaactgaaacttgtatggggaagtcgagcgtgtagacgagacgtccttcactcctgccagcctcataaaacacaataccatggaaaagtccagttttgtgttgactgctgatacgagaataatcatccaagagcactataggtttctaaacttattcagcctgtcatctaggtcttcgaactctcaaaacaaatttttagatttttattgggaggggttttgcctcccaggttatgtaataatattacttctgcactcctatatttactctgttctgtaataatactacactttcttactttaaaataaagtacgttattgtaactgcttccgcattcgcgtacctctgatgtaatgtctgcgtgacgggtgaaacgctcttggaaaaggtaaggaatacagataccgaacagtaaaaagtttttcttaaaggaggacacttcctcccgcagcttcagtcttg

SEQ ID NO: 41678 - DNA, 1684 bp, Zea Mays
attttcctaaggggttttcattttccaaagggaaattagttcatttttctttgggaaaaataagaatcccttggaaaatgatgtttccaaactagccctcaggttcatattttgctgagatggacacaatatgctacttgttcgcttatgtgaacttgatctgcttactatgagcacatttttttctgttacaaaacaaaggaaaacatacgatgcataatttctttgcatatctttgatgtcatcgacacctactctctttttactaaggttattaacacgataaaacgctgaaacgctcatgggtgaaattttgacttttaaatgtttaaacaaagtttaaatgtaggtttaaacaacataggaaaaatatcaatacatcataatttcagacaataacatgaagttaaatattaagatagagaggttagtggcttaccaaaacttcacccatgagctggattggacccccaaaagtaactaatagactgggcccaaaagtagctaatggtctaaaattcataaaactttgcgttttacagtttagaatgccaaaatgctaaaacatggtctcaacctctaattagagttttgacgtttaaatgtagtttaaacgtcgtttaaacttagttttaataacactgcgcttgagcatgcagatccatgcccttcgcggtgcgcctccgatggccagccgtcgtcaccgcgctctaactctccggtgcgcggtaatggcctccctagcaatcaccacatcagagaccttccttcctgatataggaaggcagggttcatgagcggcggcacgcctgcagcaagcagtagcctgcgggcagcactctcatactgcgtgaggcaagtccgcgcctatgactaccaccactacctctgccttctccacctggccccggccgtgcgcaaggccgcgttcaccttccgcgccttcaacatccagacagcaagggccatggatgtggtgtccgacccccggaccggcctcatgcgcctcctctggtggaaggaggcggtcgacaaggtctttggcaacaagctggtcgagcacctagttgcccacgcgctctcttcggtcatcgcagaccataaggttagcaagcactggctgaagcggtccgtggaggcgaggatcaacgacaccaaccgtgaggaaggcaccattcctgggacgagcgcggagttggagagatgtcaaacttgtatgggcaactgaaacttgtatggggaagtcgagcgtgtagacgagacgtccttcactcctgccagcctcataaaacacaataccatggaaaagtccagttttgtgttgactgctgatacgagaataatcatccaagagcactataggtttctaaacttattcagcctgtcatctaggtcttcgaactctcaaaacaaatttttagatttttattgggaggggttttgcctcccaggttatgtaataatattacttctgcactcctatatttactctgttctgtaataatactacactttcttactttaaaataaagtacgttattgtaactgcttccgcattcgcgtacctctgatgtaatgtctgcgtgacgggtgaaacgctcttggaaaaggtaaggaatacagataccgaacagtaaaaagtttttcttaaaggaggacacttcctcccgcagcttcagtcttg

SEQ ID NO: 41679 - DNA, 2461 bp, Zea Mays
cttaattgctaagactaacatgggttggctctggcatcgccgactagcccatgttgggatgaagaatcttcataagcttctaaagggagagcacattttgggactaaccaatgttcattttgagaaagacagggtttgtagcgcatgtcaagcaggaaagcaagttggtgttcatcatccacacaagaacatcatgatgatcgataggccgcttgaactactccacatggacttattcgacccgattgcttacataagcatcagcgggagtaagtattgtctcgtaattgtggatgattattctcgcttcacttgggtgttctttttgcaggaataatctcaaacccaagagactttaaagggattcttgaaatgggctcaaaatgaattcggtttgaggatcaagaaaataagaagcgacaatgggacggagttcaagaactctcaaatagaaggcttccttgaggaggagggcatcaagcattagttctcttctacctacacgccacaacaaaatggtgtagtggagaggaagaatagaactctattggacatggcaaggaccatgcttgatgagtacaagactttggatcggttttgggctgaggcggttaacaccgcttgctacgccatcaaccggttatatctacaccgaatcctcaagaagacatcgtatgaactcaccgagaccttccttcctgatataggaaggcagggttcatgagcggcggcacgcctgcagcaagcagtagcctgcgggcagcactctcatactgcgtgaggcaagtccgcgcctatgactaccaccactacctctgccttctccacctggccccggccgtgcgcaaggccgcgttcaccttccgcgccttcaacatccagacagcaagggccatggatgtggtgtccgacccccggaccggcctcatgcgcctcctctggtggaaggaggcggtcgacaaggtctttggcaacaagctggtcgagcacctagttgcccacgcgctctcttcggtcatcgcagaccataaggttagcaagcactggctgaagcggtccgtggaggcgaggatcaacgacaccaaccgtgaggaaggcaccattcctgggacgagcgcggagttggagaggtatgcagaggacacccagtccaccatcctttacatgaccctgcaggctggcggaatacagtctaccgtggctgaccacgccgcctctcacatcggcaaggccagcgggcttctgttactgctcaaggcgctgccgcaccatgtaaataagcaagggacggtacattatatcccagctagtgtggccgaggaatgcggcctgctcatcacacgggagggtggcaggtcggaggtcagggcgggcgtgaggctgccagacgtagttttcaaggtcacatctgttgcagaggctcacctgcacaaggcgcgggagttggcatcgtccgtgcccaaagaggcgatccctgtgctcctcccagccttgccggcctaggtcctcctagataccctgcgaaggtgtgagttcaacgtgtttgatcctcggctgtcgaggggagtccacgaggtctctcctctgtggtaacagctgaagcttaactggaacgcgtggcgaagcaggtactaatgaggaggaggaactttttgccctcaaccatgggagctgctgttgttccttgtagcaaaaagctttttattggggggtttttgacatagcagagattgaataagatgagtagggtctgctacttgcagcagatttgaagctgttgaatatgtgtcgtgctttctgttgtgtttgtgggttgggctcatttacattgcacaattgcaacactgacaatgcctattttatttttgttttggaacatacaatgcctgtttgtattcatacagcagaaagcagacactatttttttgataaactcaattagttactctatagtttataaaattcctgttttcggttcagatgtcaaacttgtatgggcaactgaaacttgtatggggaagtcgagcgtgtagacgagacgtccttcactcctgccagcctcataaaacacaataccatggaaaagtccagttttgtgttgactgctgatacgagaataatcatccaagagcactataggtttctaaacttattcagcctgtcatctaggtcttcgaactctcaaaacaaatttttagatttttattgggaggggttttgcctcccaggttatgtaataatattacttctgcactcctatatttactctgttctgtaataatactacactttcttactttaaaataaagtacgttattgtaactgcttccgcattcgcgtacctctgatgtaatgtctgcgtgacgggtgaaacgctcttggaaaaggtaaggaatacagataccgaacagtaaaaagtttttcttaaaggaggacacttcctcccgcagcttcagtcttg

SEQ ID NO: 41680 - DNA, 1513 bp, Zea Mays
tgggactaaccaatgttcattttgagaaagacagggtttgtagcgcatgtcaagcaggaaagcaagttggtgttcatcatccacacaagaacatcatgatgatcgataggccgcttgaactactccacatggacttattcgacccgattgcttacataagcatcagcgggagtaagtattgtctcgtaattgtggatgattattctcgcttcacttgggtgttctttttgcaggaataatctcaaacccaagagactttaaagggattcttgaaatgggctcaaaatgaattcggtttgaggatcaagaaaataagaagcgacaatgggacggagttcaagaactctcaaatagaaggcttccttgaggaggagggcatcaagcattagttctcttctacctacacgccacaacaaaatggtgtagtggagaggaagaatagaactctattggacatggcaaggaccatgcttgatgagtacaagactttggatcggttttgggctgaggcggttaacaccgcttgctacgccatcaaccggttatatctacaccgaatcctcaagaagacatcgtatgaactcaccgagaccttccttcctgatataggaaggcagggttcatgagcggcggcacgcctgcagcaagcagtagcctgcgggcagcactctcatactgcgtgaggcaagtccgcgcctatgactaccaccactacctctgccttctccacctggccccggccgtgcgcaaggccgcgttcaccttccgcgccttcaacatccagacagcaagggccatggatgtggtgtccgacccccggaccggcctcatgcgcctcctctggtggaaggaggcggtcgacaaggtctttggcaacaagctggtcgagcacctagttgcccacgcgctctcttcggtcatcgcagaccataaggttagcaagcactggctgaagcggtccgtggaggcgaggatcaacgacaccaaccgtgaggaaggcaccattcctgggacgagcgcggagttggagagatgtcaaacttgtatgggcaactgaaacttgtatggggaagtcgagcgtgtagacgagacgtccttcactcctgccagcctcataaaacacaataccatggaaaagtccagttttgtgttgactgctgatacgagaataatcatccaagagcactataggtttctaaacttattcagcctgtcatctaggtcttcgaactctcaaaacaaatttttagatttttattgggaggggttttgcctcccaggttatgtaataatattacttctgcactcctatatttactctgttctgtaataatactacactttcttactttaaaataaagtacgttattgtaactgcttccgcattcgcgtacctctgatgtaatgtctgcgtgacgggtgaaacgctcttggaaaaggtaaggaatacagataccgaacagtaaaaagtttttcttaaaggaggacacttcctcccgcagcttcagtcttg

SEQ ID NO: 41681 - DNA, 961 bp, Zea Mays
ctttactctatttatgtgcttcacgaccggatattatgctttccgtatgcatgtgtgcaagattccaagccgatcctaaggaagttcatcttagggccgtgaaatgaatcttgagatatttagtttatactcctaagtttggcctttggtaccccaggggatccacatttgatttaattggttattccgatgctgattgggcaaggtgtaaaattaatagaaagaccacatcagggacttgccagttcttggaaagatctctggtgtcttgggcttcaaagaagcaaaattctgtggctctttctactgcagaagccgagtatattgccgcaggtcattgttgcgcgcaattgctttggatgaggcaaacccttatggactacggttacaaattaaccaaagttcctcttctatgtgataatgagagtgcaatccgcatggtagataatcccgttgagcatagccgcactaaacacatagccattcggtatcatttcttaagggatcaccaacaaaggggatatcgagattgcatatgttaacaccaaagaacaattagccgatatctttaccaagccattagatgagcaaacttttaccaaacttaggcatgagctaaatattcttgattctaggaattttgattgatgttttgcacacatagctcatttatatacctttgatcatatctctttctttgctatgactaatgtggctttcaagtgtatttcaagctcagtcatagattgaaaggggaaatggagtcttcggcgaagacaaggcttccactccactccatcgaattattcatccttcgccgtcgctccgcaccgctctccaactttggtataatcttcactcatattttatttaccatagggggagaaagtagtttaaaaagggctctaatgactccgtttttggtgattcatgccaaaggggagagagtattagcccaaag

SEQ ID NO: 41682 - DNA, 1469 bp, Zea Mays
aatgtttgttggatgcttagctaagcaattcaaaggtatgttttcaaatagttcaaagcaatgtctacattatttacatagacaaacaatctaacaagtgtgttatttgttacataggccaatcatatctaagcggcactgcagcaactacatggtacttcaatccagacattcctgaggcacaggaatactacatcaagttacaaagaagtgatctccaaatgattaaacccacagtagcagaagaagaatttgaggtttctcaaaaaccgaatatcgaagacaagactatccaagaactacttgagatggatctagatatgttccctccacagggctttaagtgcaccgccactatatcacgactcatacaagatagcaaatggtggtttccatcttgcaccaaatgcaaaaagtcttcacctcaaacctccactggataccgctgtacatcatgtggttgtacagatgtaaagtttagctacaaactcagcttcgttgccactgatggaacatgtgaagctgagttcttctgtttcgataccatagctaagcgaatagtagggaaaccatgtgacactcttattacaacacctatagcttctcagggtttcccaccagatctagctgccattgtatctttgaaatttacctttgtagtcaccctttatatgtcagcattctcagtgacaaacaaagtttctctatcctatatgtgctaacaaatcatggaagacaaacctcggtaccatctgcaatgctcaactatcctcaagggcagctacttacacaagatgatgtgtttgaatctacggccacacaggattctccagcaacatcatttgctaaacgatccacttcagctagacaggaaaatatggttcgacgcatcttagagtattacgatgcatccaagaatttagagaatgttgacgagtatacagaccaaccaaccaataatgaattgtcatcaccacccaaaaggtatgaggcttcatcacttttggtcatgagacttatgtacatactaggtagatgcccgtgcgttgcaacggtatacaaaatattcaacaaaatattagtgcataaaaaagaacaccgcatatttcagttgcagcaaaaacgatacattccccacttgcagggtcagggctgcattttcttcctactttacacctcagcgaacaacaaaaaccaaagaaccatacagtccatagacacacttgcacacttgaagagcaaccaagtgatggtagtctacttactgttgcgcgcattgcacatctcgttatcctcctcatacacctcctaagcagttatgttttaatataaatacaaatggactctaatcaatgtgattatcaaggtactaaattcgtataattgtttagtttttgcatataattgttgttttgtgtgcttctccaccattcgcggatacgtccagattttccactaaccccaccagt

SEQ ID NO: 41683 - DNA, 2048 bp, Zea Mays
caccaccacacagacacaccaataatgggagcgaggagtagtagcacttggacgcagcacctcctgctgctgttcttcctcgtcctcggcgtcgctaccaacagcagccattcttccaccatcaacatcaccaaccgatgctcctacacagtgtggccggccgccacaccagtgggcggcggcatgcagctggagcctgggaagacctgggtgcttcaagtgcctggcaacacgcaaagtggccgcgtgtgggcgcgcacgggctgttcgttcgacggccccggaaagaaatcctgccagacgggtgactgcggcggcgtgctggcatgcactaccagcggccaaccgccgatgacgatggcagagttcaccctgagtgactccaacaacatggacgactacttcgacatcaccgtcgtcgacggctttaacttgcccatggactttctgccggtgccgtcgtccaaggggtcgtcggggtgcagcaggggtccacgctgcgccgccgacatcacgtcgcagtgccccgatgagctcaaggtgccagggggttgccgcagcgcgtgcaacggatcttcctgcgacgccagcacgattaccagatcattttctgtccccccgtcgatcttgtgtcattgtctccacctccaacttcaccattgtctccgcctccaacttcacctactgcaacaaatggaacaagcagcatcacatcctcatcaaaatccaagaggccaagaatatttggttatgttctaggtggttcaataggtggcttcattttgatcgcatccttggtctttttcttcgtcctgcatagacgacgattgcatcgacgccaagagatgcaggaagaggaggaagcagagtttgggaggctaccagggatgcccagacggttcacatttgagcagctacaggaagcaactgatcagttcagagagaagctgggggaaggaggattcggctccgttttcaaaggacgttttggtgagcaagcaattgcggtgaaacgcttggatagagctggtcagggaaagagggaatttctggcggaggtccagaccatcggtagcattcaccatatcaatctggtgagggtaatcggtttctgcgcagagaaaactcacaggctcttggtttatgagtacatgcccaatggatccctggaccagtggatcttttgccggcaggggcagggcgatgacgacgctcctcgcctgcattggcaaacgcgacacaagattattgctcatgtagcaaagggcctcgcctatcttcacgaggagtgcatgaagagagttgctcacttggacgtgaaaccacagaacatcctcttagatgacaacttcgacgctaagctctctgattttggactctgcaagctcatcgaccgggataagagccaagtggttactagaatgagaggcacgcctggatatctagctccagaatggttgacgtcgcacatcactgaaaaggctgatgtatatagctttggcgtggttgtgatggagatcatcagtggaaggaagaacctggacacttctcggtctgaaaagagctttcaccttattaccttgctagaggagaagttgaggagtgatcgcttggtagatttgattgatatgtgcattactagtgacagtcaggcacaggagcaagaagcaattcagatgatgaagctcgcaatgtggtgtttgcagattgattgcaaacgaaggcccaaaatgtccgaggtcgtaaaagtcttggaaggctctatcagtgtcgaaactgacatagatcataactttgtcgtgacaaatccaccaagctttagcgctcctagaattgtggtcatgtcagctccacctctagcttcagaagtgtcaggcccaaggtgaaattccttgaggcagtttatttgtgtagagaatttagcagtcctctctaaaacaatatgttcagtgattggaattgtggatatcacaccattgtaaattgtctctagtgtacaacagaaattatgttgctcattcttatatagaaaaccaatagcatgtcct

SEQ ID NO: 41684 - DNA, 715 bp, Zea Mays
gtagatcttcctccatgtttcctcgtggcggtaacaacccgcccgagctactcgccgaccttcgcgccagctgggttccaaaacccccttccttaccctgcgcctataaaacccgagccattgttctccttcttcccccagtacgccccatcaatcacgtcacctctggtgcacatcgatttggagaaagccgggaggaagcaccaccgttgcggatctcccacgccgtgaatcctcatctcagaagtgtaccagggtcaccgcagaagcctcgcggaccgattccgagactaggctgcgtgagtactcccgtgggcgcctcaaaatttctcgccgatcctggttgtcaccgctggagccgctctgcaccgtggatcggcttcaactcacggtctgagatgacgaacaagtgaccgaggacccaggtgttcagcagaaggaaattgctgagcaggagctcgttgaaggagaagaacaggtggtacaggagcaaccctacaacgaagagtacgagcttatctatgtggcgtctcccagtcagctttatggcaccgaggaataatatttagtttgctttattgttatcatttatttttgtaagacttccgctatgtaataatgatatttaatacatttatctctatacactttgtcattatatgtgatgttcttctttggcgcacatatgagatgcatccgactttatcccttaaat

SEQ ID NO: 41685 - DNA, 1670 bp, Zea Mays
gtagatcttcctccatgtttcctcgtggcggtaacaacccgcccgagctactcgccgaccttcgcgccagctgggttccaaaacccccttccttaccctgcgcctataaaacccgagccattgttctccttcttcccccagtacgccccatcaatcacgtcacctctggtgcacatcgatttggagaaagccgggaggaagcaccaccgttgcggatctcccacgccgtgaatcctcatctcagaagtgtaccagggtcaccgcagaagcctcgcggaccgattccgagactaggctgcgtgagtactcccgtgggcgcctcaaaatttctcgccgatcctggttgtcaccgctggagccgctctgcaccgtggatcggcttcaactcacggtctgagatgacgaacaagtgaccgaggacccaggtgttcagcagaaggaaattgctgagcaggagctcgttgaaggcaagttgttcccttgatcacttctatttacccaataatattcctattaatcattatgatctgcataggttaattttgatgggacccaataggtcaccccaatttagctatctttataccttgtttaccactgaacttttggatagtagctattgctttatgtggttttgggtgttaaaatacacattattcatgatcatgcttttattatcaatttgttatttattgttcatgataagatcattatgttaattggaacatggagaaccacccggtaaaacagtactaccacaatggtggaatgggacgcccttggttgactaattaggaaagctagtggatgactaccttacccgaaaggggcaagggcagtatgggagtggtcggtatagtgaggttctcgagttgattttgctgcgatggcggtcagatggggattcctgcattgcgctccctagaaactgtagcgggttttctgaagctagtggaactttgtaaaggcctcgtagtgttaccctgtctcgcttccttggtagaggtgtatgggattcatgaccccttggcagatggtaacatgacttgtgggtaaagatgtgcaacctctgcagagtgtaaaactggtatatcagccatgctcacggtcatgagcggctcggaccctcacatgagtaatttatggaattaaatttgactggtcatttgcatcgcattgtggattattattaattttgatctattattactcgggtttggtatatacttacatttaggaactgttaataaaatttgaccaacttattaaaagcaatgctcacctttaaccattatttgttgatcagccatacacttcacatgaactcctacctttggtgagttcattcacattattccccacaacctgttgagctatgatattttgtgagctcactcttgtgatatataaacccccccacaggagaagaacaggtggtacaggagcaaccctacaacgaagagtacgagcttatctatgtggcgtctcccagtcagctttatggcaccgaggaataatatttagtttgctttattgttatcatttatttttgtaagacttccgctatgtaataatgatatttaatacatttatctctatacactttgtcattatatgtgatgttcttctttggcgcacatatgagatgcatccgactttatcccttaaat

SEQ ID NO: 41686 - DNA, 946 bp, Zea Mays
gccacaacactgcccacacaccctccccctccgcaccgaaccccctggcgcgcgctgcgctcccttgaccggcacgtcatcccactgccatgcgggccccgcaccccgcgcgcccgggggccgcgccctcctcaaatgcccccacccctcgcctcccctgccctcccctcctccgcacaaacgcgtcgcatccgctccacaggatcctctgcgccaccgcaaccgtgtgaccgcccgtgccgccggcgatcccgatccgccgacccgtcccagccccgctcgcagccatgtcgccgtcggagccgacgcgggaggagagcgtgtacatggccaagcttgcggagcaggcggagcggtacgaggagatggtcgagttcatggagcgcgtcgcgcgctacgccgggggcgccggcggcggggacgagctctcggtggaggagcgcaacctgctgtccgtcgcctacaagaacgtcatcggcgcccgcagggcctcgtggcggatcatctcctccatcgagcagaaggaggaaggccgcgggaacgaggcgcacgccgcatccatccgcgcctaccgctccaagatcgaggccgagcttgcccgcatctgcgacggcatcctcgcgctcctcgactcccacctcgtcccatccgccggcggcgccgagtccaaggtcttctacctcaagatgaagggtgactaccacaggtaccttgctgagttcaagtcaggtgcagagaggaaggatgctgcggagagcaccatgaatgcctacaaagctgctcaggatattgctcttgctgatctggccccaacccaccccatcaggctcgggcttgctctcaacttctcagtgttctactacgagatcctcaactcccctgaccgtgcttgcaaccttgcaaagcagggtatgggttgttaaataaaagctgatgcaaagggaac

SEQ ID NO: 41687 - DNA, 2737 bp, Zea Mays
cacaagtgttgtagtgatcctcgcccgcgcgcttcgcacgtccccgccgtcgcgctcgcctccctcctctttgttgcctccgcgtcgacctccaccccgctctccgacgcgcttaccgtcgtctcggatttctggtgcactctcttctctacgacgcgagcaagggcggcgcttgccatggcatcgacgggaaccaggaggggagctgtttgagcggatgcccaccaggaacaatgtttcctagatcacgatgtttgggccacttttggaagaggtcagggatgacatgttttcaagcttggaggacatcaccaacgcaccatatgcagatctgctctctattaattcaatgaggaaaggaaaggggtcatagaaattagtcttggcagatggaggggaacgtctcaatgactgaggcacattttttcttgttagttagctcatggatttttatggtccaagaggagttgctgctatatgaatatgacaacacccattaatcaacataactatatgaatacaatctgaaaggaaggtcggtttggtcagaaacacatggaggtactgatggaggctatgaaacatataagagacatgccagtgaggagcaggagtagtttagtcggttcttgctttatgaagtggatgcaattagaaagacgtacgagcaggccaacatctcgcggtggctcgccctgggcaaccggacctgcccgaccacgatgcaggagctctgggacgacgccctcacccccaacgccactctctgacagctcatcgtcacctggttctcccgcctggttctgcattttgttttcttatctgtcaatcatgtttttccatattactgcaggcgggtctgattaattatttaaatgtagtttatcttagatactgtttgaacgtatgggatgttggaggacagaagacaatcatgtcttactggagaaaattctttgagcagactaatgggttagtttggtttgctgatagttcacacataaggaggcttgatgattgccgtgctgaactccacaatctcttgaaagaagagagactagttggagcttcattgttgatttttgcaaataagcaagacatgcaaggagctctaaaaccaactggaatcgcgaagagtcactctccgacagctcatcgccgcttggttctcccgccggtacacaaggtttaagaagcgctccgcggacttccacggccgcgctgccgatctcgtccacagcctccggggcacggcgatgcccaggagacaggccctcgaggaagagcaatgtagagaagagaaaggtatctcgactgttccaaagcacaagtatgcatccaaagcctgttccccaaaaggtgcgtgaactttgttcttgattttgtcagactaaatgtgggtgaactttgtactgcagtttttgtttaaataaactttggactgtttaaattactgatgcatccaaccactgtttttctttactgtttgttgatacacgaccagatgcccagttgagttcacccaaaaggtttattacaccacgaaaaaatctgagatgaaatgatttttatttaaatgaactttgtactgcaatttttgtttaaatgaactttgtactgtttaaattattgatgcatagttttgaagacttaaacaatatgctgcatgaaaatctttactttattcacaacacacctgagatggactgggcttgggcagctaaccggttaattgagaaggatgaggcataaactccagacgatgctcctttaaattatttgccgcagaagaggctaattttgacaagccagttgatccagcaacttctccctgctataccagcgaccattttgagaggacaagctgtgtctacttacggaagtgcgacatacactctatcaatgttgacactaagggatgcatgcagcatggtagcatcattatcatcatcatataactcttgctcacctgtggaggatgaaaataacccatctgaacaaacaagtgctaagaaaatggaagacagagtatcaaaggttgtggaagtcttcgctggaagaatccagaagatggaaaatgactttataagtgattccctcacggttgtgtccttcacaaaggaaggatgtgaagccacactattatcaagcaacaaagccaaagttgtgtgacacaattataacaaaggaatcatcacccattagcacactaaaattggcgcatacagataacgcacctgcaaagtgggatcatttgaacatagttcagcaaagggccgacgcacttgagtcactcctcaagctctacgcaaagcttctggaggagaggctcgatgagctcgccgacgtttttcgaccatttggtgagagagctgtgtcatccggagagatgagcatacaatgatgtctgaccataagcctgatgactccaccgaagttttgagagtccccaacaatgcttttgtagcagcgattcgtttcaacatttttttgtttttcaaataccatttcgagagtgtaaataacttcaacggaattcaaaattgatgtacttaggtaggcctgagccctgtttatttttgatgtatatggtttgcatgtcaccaactgttgtgagcgatgattgattatttatcgtcttgttttatctgtctgtactcctttaatgcagcaccttcgtttgtcatgtgtcgtctcccctgtaagatgttgattaatattcattatatcattgttt

SEQ ID NO: 41688 - DNA, 2897 bp, Zea Mays
cacaagtgttgtagtgatcctcgcccgcgcgcttcgcacgtccccgccgtcgcgctcgcctccctcctctttgttgcctccgcgtcgacctccaccccgctctccgacgcgcttaccgtcgtctcggatttctggtgcactctcttctctacgacgcgagcaagggcggcgcttgccatggcatcgacgggaaccaggaggggagctgtttgagcggatgcccaccaggaacaatgtttcctagatcacgatgtttgggccacttttggaagaggtcagggatgacatgttttcaagcttggaggacatcaccaacgcaccatatgcagatctgctctctattaattcaatgaggaaaggaaaggggtcatagaaattagtcttggcagatggaggggaacgtctcaatgactgaggcacattttttcttgttagttagctcatggatttttatggtccaagaggagttgctgctatatgaatatgacaacacccattaatcaacataactatatgaatacaatctgaaaggaaggtcggtttggtcagaaacacatggaggtactgatggaggctatgaaacatataagagacatgccagtgaggagcaggagtagtttagtcggttcttgctttatgaagtggatgcaattagaaagacgtacgagcaggccaacatctcgcggtggctcgccctgggcaaccggacctgcccgaccacgatgcaggagctctgggacgacgccctcacccccaacgccactctctgacagctcatcgtcacctggttctcccgcctgtttatcttagatactgtttgaacgtatgggatgttggaggacagaagacaatcatgtcttactggagaaaattctttgagcagactaatgggttagtttggtttgctgatagttcacacataaggaggcttgatgattgccgtgctgaactccacaatctcttgaaagaagagagactagttggagcttcattgttgatttttgcaaataagcaagacatgcaaggagctctaaaaccaactggaatcgcgaagagtcactctccgacagctcatcgccgcttggttctcccgccggtacacaaggtttaagaagcgctccgcggacttccacggccgcgctgccgatctcgtccacagcctccggggcacggcgatgcccaggagacaggccctcgaggaagagcaatgtagagaagagaaaggtatctcgactgttccaaagcacaagtatgcatccaaagcctgttccccaaaaggtgcgtgaactttgttcttgattttgtcagactaaatgtgggtgaactttgtactgcagtttttgtttaaataaactttggactgtttaaattactgatgcatccaaccactgtttttctttactgtttgttgatacacgaccagatgcccagttgagttcacccaaaaggtttattacaccacgaaaaaatctgagatgaaatgatttttatttaaatgaactttgtactgcagtatttacagacatattttggcacccgatcgattactgtttttgttttactaatagctgctgctattactatcttttgggtgaagtgaatcagatttttgtttaaatgaactttgtactgtttaaattattgatgcatagttttgaagacttaaacaatatgctgcatgaaaatctttactttattcacaacacacctgagatggactgggcttgggcagctaaccggttaattgagaaggatgaggcataaactccagacgatgctcctttaaattatttgccgcagaagaggctaattttgacaagccagttgatccagcaacttctccctgctataccagcgaccattttgagaggacaagctgtgtctacttacggaagtgcgacatacactctatcaatgttgacactaagggatgcatgcagcatggtagcatcattatcatcatcatataactcttgctcacctgtggaggatgaaaataacccatctgaacaaacaagtgctaagaaaatggaagacagagtatcaaaggttgtggaagtcttcgctggaagaatccagaagatggaaaatgactttataagtttgaacaagagggcctcgactaatcggacgactggacgattagtcgacctaatcgggtcggatgccctggtcgttccactaaaaccgactagaccgactaatcgcgattaatcgcgattagtcggacgacttgaaatcattgatcagtgattccctcacggttgtgtccttcacaaaggaaggatgtgaagccacactattatcaagcaacaaagccaaagttgtgtgacacaattataacaaaggaatcatcacccattagcacactaaaattggcgcatacagataacgcacctgcaaagtgggatcatttgaacatagttcagcaaagggccgacgcacttgagtcactcctcaagctctacgcaaagcttctggaggagaggctcgatgagctcgccgacgtttttcgaccatttggtgagagagctgtgtcatccggagagatgagcatacaatgatgtctgaccataagcctgatgactccaccgaagttttgagagtccccaacaatgcttttgtagcagcgattcgtttcaacatttttttgtttttcaaataccatttcgagagtgtaaataacttcaacggaattcaaaattgatgtacttaggtaggcctgagccctgtttatttttgatgtatatggtttgcatgtcaccaactgttgtgagcgatgattgattatttatcgtcttgttttatctgtctgtactcctttaatgcagcaccttcgtttgtcatgtgtcgtctcccctgtaagatgttgattaatattcattatatcattgttt

SEQ ID NO: 41689 - DNA, 2530 bp, Zea Mays
gttgtagtgatcctcgcccgcgcgcttcgcacgtccccgccgtcgcgctcgcctccctcctctttgttgcctccgcgtcgacctccaccccgctctccgacgcgcttaccgtcgtctcggatttctggtgcactctcttctctacgacgcgagcaagggcggcgcttgccatggcatcgacgggaaccaggaggggagctgtttgagcggatgcccaccaggaacaatgtttcctagatcacgatgtttgggccacttttggaagaggtcagggatgacatgttttcaagcttggaggacatcaccaacgcaccatatgcagatctgctctctattaattcaatgaggaaaggaaaggggtcatagaaattagtcttggcagatggaggggaacgtctcaatgactgaggcacattttttcttgttagttagctcatggatttttatggtccaagaggagttgctgctatatgaatatgacaacacccattaatcaacataactatatgaatacaatctgaaaggaaggtcggtttggtcagaaacacatggaggtactgatggaggctatgaaacatataagagacatgccagtgaggagcaggagtagtttagtcggttcttgctttatgaagtggatgcaattagaaagacgtacgagcaggccaacatctcgcggtggctcgccctgggcaaccggacctgcccgaccacgatgcaggagctctgggacgacgccctcacccccaacgccactctctgacagctcatcgtcacctggttctcccgcctggttctgcattttgttttcttatctgtcaatcatgtttttccatattactgcaggcgggtctgattaattatttaaatgtagtttatcttagatactgtttgaacgtatgggatgttggaggacagaagacaatcatgtcttactggagaaaattctttgagcagactaatgggttagtttggtttgctgatagttcacacataaggaggcttgatgattgccgtgctgaactccacaatctcttgaaagaagagagactagttggagcttcattgttgatttttgcaaataagcaagacatgcaaggagctctaaaaccaactggaatcgcgaagagtcactctccgacagctcatcgccgcttggttctcccgccggtacacaaggtttaagaagcgctccgcggacttccacggccgcgctgccgatctcgtccacagcctccggggcacggcgatgcccaggagacaggccctcgaggaagagcaatgtagagaagagaaaggtatctcgactgttccaaagcacaagtatgcatccaaagcctgttccccaaaagacttaaacaatatgctgcatgaaaatctttactttattcacaacacacctgagatggactgggcttgggcagctaaccggttaattgagaaggttagccaactttgcgattctgctattttagttcttgtccatattggtccaagggatttatcttgatgctaaactaaattctggaataggatgaggcataaactccagacgatgctcctttaaattatttgccgcagaagaggctaattttgacaagccagttgatccagcaacttctccctgctataccagcgaccattttgagaggacaagctgtgtctacttacggaagtgcgacatacactctatcaatgttgacactaagggatgcatgcagcatggtagcatcattatcatcatcatataactcttgctcacctgtggaggatgaaaataacccatctgaacaaacaagtgctaagaaaatggaagacagagtatcaaaggttgtggaagtcttcgctggaagaatccagaagatggaaaatgactttataagtgattccctcacggttgtgtccttcacaaaggaaggatgtgaagccacactattatcaagcaacaaagccaaagttgtgtgacacaattataacaaaggaatcatcacccattagcacactaaaattggcgcatacagataacgcacctgcaaagtgggatcatttgaacatagttcagcaaagggccgacgcacttgagtcactcctcaagctctacgcaaagcttctggaggagaggctcgatgagctcgccgacgtttttcgaccatttggtgagagagctgtgtcatccggagagatgagcatacaatgatgtctgaccataagcctgatgactccaccgaagttttgagagtccccaacaatgcttttgtagcagcgattcgtttcaacatttttttgtttttcaaataccatttcgagagtgtaaataacttcaacggaattcaaaattgatgtacttaggtaggcctgagccctgtttatttttgatgtatatggtttgcatgtcaccaactgttgtgagcgatgattgattatttatcgtcttgttttatctgtctgtactcctttaatgcagcaccttcgtttgtcatgtgtcgtctcccctgtaagatgttgattaatattcattatatcattgttt

SEQ ID NO: 41690 - DNA, 2516 bp, Zea Mays
gttgtagtgatcctcgcccgcgcgcttcgcacgtccccgccgtcgcgctcgcctccctcctctttgttgcctccgcgtcgacctccaccccgctctccgacgcgcttaccgtcgtctcggatttctggtgcactctcttctctacgacgcgagcaagggcggcgcttgccatggcatcgacgggaaccaggaggggagctgtttgagcggatgcccaccaggaacaatgtttcctagatcacgatgtttgggccacttttggaagaggtcagggatgacatgttttcaagcttggaggacatcaccaacgcaccatatgcagatctgctctctattaattcaatgaggaaaggaaaggggtcatagaaattagtcttggcagatggaggggaacgtctcaatgactgaggcacattttttcttgttagttagctcatggatttttatggtccaagaggagttgctgctatatgaatatgacaacacccattaatcaacataactatatgaatacaatctgaaaggaaggtcggtttggtcagaaacacatggaggtactgatggaggctatgaaacatataagagacatgccagtgaggagcaggagtagtttagtcggttcttgctttatgaagtggatgcaattagaaagacgtacgagcaggccaacatctcgcggtggctcgccctgggcaaccggacctgcccgaccacgatgcaggagctctgggacgacgccctcacccccaacgccactctctgacagctcatcgtcacctggttctcccgcctgtttatcttagatactgtttgaacgtatgggatgttggaggacagaagacaatcatgtcttactggagaaaattctttgagcagactaatgggttagtttggtttgctgatagttcacacataaggaggcttgatgattgccgtgctgaactccacaatctcttgaaagaagagagactagttggagcttcattgttgatttttgcaaataagcaagacatgcaaggagctctaaaaccaactggaatcgcgaagagtcactctccgacagctcatcgccgcttggttctcccgccggtacacaaggtttaagaagcgctccgcggacttccacggccgcgctgccgatctcgtccacagcctccggggcacggcgatgcccaggagacaggccctcgaggaagagcaatgtagagaagagaaaggtatctcgactgttccaaagcacaagtatgcatccaaagcctgttccccaaaagttttgaagacttaaacaatatgctgcatgaaaatctttactttattcacaacacacctgagatggactgggcttgggcagctaaccggttaattgagaaggatgaggcataaactccagacgatgctcctttaaattatttgccgcagaagaggctaattttgacaagccagttgatccagcaacttctccctgctataccagcgaccattttgagaggacaagctgtgtctacttacggaagtgcgacatacactctatcaatgttgacactaagggatgcatgcagcatggtagcatcattatcatcatcatataactcttgctcacctgtggaggatgaaaataacccatctgaacaaacaagtgctaagaaaatggaagacagagtatcaaaggttgtggaagtcttcgctggaagaatccagaagatggaaaatgactttataagtttgaacaagagggcctcgactaatcggacgactggacgattagtcgacctaatcgggtcggatgccctggtcgttccactaaaaccgactagaccgactaatcgcgattaatcgcgattagtcggacgacttgaaatcattgatcagtgattccctcacggttgtgtccttcacaaaggaaggatgtgaagccacactattatcaagcaacaaagccaaagttgtgtgacacaattataacaaaggaatcatcacccattagcacactaaaattggcgcatacagataacgcacctgcaaagtgggatcatttgaacatagttcagcaaagggccgacgcacttgagtcactcctcaagctctacgcaaagcttctggaggagaggctcgatgagctcgccgacgtttttcgaccatttggtgagagagctgtgtcatccggagagatgagcatacaatgatgtctgaccataagcctgatgactccaccgaagttttgagagtccccaacaatgcttttgtagcagcgattcgtttcaacatttttttgtttttcaaataccatttcgagagtgtaaataacttcaacggaattcaaaattgatgtacttaggtaggcctgagccctgtttatttttgatgtatatggtttgcatgtcaccaactgttgtgagcgatgattgattatttatcgtcttgttttatctgtctgtactcctttaatgcagcaccttcgtttgtcatgtgtcgtctcccctgtaagatgttgattaatattcattatatcattgttt

SEQ ID NO: 41691 - DNA, 2354 bp, Zea Mays
cgcccgcgcgcttcgcacgtccccgccgtcgcgctcgcctccctcctctttgttgcctccgcgtcgacctccaccccgctctccgacgcgcttaccgtcgtctcggatttctggtgcactctcttctctacgacgcgagcaagggcggcgcttgccatggcatcgacgggaaccaggaggggagctgtttgagcggatgcccaccaggaacaatgtttcctagatcacgatgtttgggccacttttggaagaggtcagggatgacatgttttcaagcttggaggacatcaccaacgcaccatatgcagatctgctctctattaattcaatgaggaaaggaaaggggtcatagaaattagtcttggcagatggaggggaacgtctcaatgactgaggcacattttttcttgttagttagctcatggatttttatggtccaagaggagttgctgctatatgaatatgacaacacccattaatcaacataactatatgaatacaatctgaaaggaaggtcggtttggtcagaaacacatggaggtactgatggaggctatgaaacatataagagacatgccagtgaggagcaggagtagtttagtcggttcttgctttatgaagtggatgcaattagaaagacgtacgagcaggccaacatctcgcggtggctcgccctgggcaaccggacctgcccgaccacgatgcaggagctctgggacgacgccctcacccccaacgccactctctgacagctcatcgtcacctggttctcccgcctgtttatcttagatactgtttgaacgtatgggatgttggaggacagaagacaatcatgtcttactggagaaaattctttgagcagactaatgggttagtttggtttgctgatagttcacacataaggaggcttgatgattgccgtgctgaactccacaatctcttgaaagaagagagactagttggagcttcattgttgatttttgcaaataagcaagacatgcaaggagctctaaaaccaactggaatcgcgaagagtcactctccgacagctcatcgccgcttggttctcccgccggtacacaaggtttaagaagcgctccgcggacttccacggccgcgctgccgatctcgtccacagcctccggggcacggcgatgcccaggagacaggccctcgaggaagagcaatgtagagaagagaaaggtatctcgactgttccaaagcacaagtatgcatccaaagcctgttccccaaaagttttgaagacttaaacaatatgctgcatgaaaatctttactttattcacaacacacctgagatggactgggcttgggcagctaaccggttaattgagaaggatgaggcataaactccagacgatgctcctttaaattatttgccgcagaagaggctaattttgacaagccagttgatccagcaacttctccctgctataccagcgaccattttgagaggacaagctgtgtctacttacggaagtgcgacatacactctatcaatgttgacactaagggatgcatgcagcatggtagcatcattatcatcatcatataactcttgctcacctgtggaggatgaaaataacccatctgaacaaacaagtgctaagaaaatggaagacagagtatcaaaggttgtggaagtcttcgctggaagaatccagaagatggaaaatgactttataagtgattccctcacggttgtgtccttcacaaaggaaggatgtgaagccacactattatcaagcaacaaagccaaagttgtgtgacacaattataacaaaggaatcatcacccattagcacactaaaattggcgcatacagataacgcacctgcaaagtgggatcatttgaacatagttcagcaaagggccgacgcacttgagtcactcctcaagctctacgcaaagcttctggaggagaggctcgatgagctcgccgacgtttttcgaccatttggtgagagagctgtgtcatccggagagatgagcatacaatgatgtctgaccataagcctgatgactccaccgaagttttgagagtccccaacaatgcttttgtagcagcgattcgtttcaacatttttttgtttttcaaataccatttcgagagtgtaaataacttcaacggaattcaaaattgatgtacttaggtaggcctgagccctgtttatttttgatgtatatggtttgcatgtcaccaactgttgtgagcgatgattgattatttatcgtcttgttttatctgtctgtactcctttaatgcagcaccttcgtttgtcatgtgtcgtctcccctgtaagatgttgattaatattcattatatcattgttt

SEQ ID NO: 41692 - DNA, 2341 bp, Zea Mays
cgcccgcgcgcttcgcacgtccccgccgtcgcgctcgcctccctcctctttgttgcctccgcgtcgacctccaccccgctctccgacgcgcttaccgtcgtctcggatttctggtgcactctcttctctacgacgcgagcaagggcggcgcttgccatggcatcgacgggaaccaggaggggagctgtttgagcggatgcccaccaggaacaatgtttcctagatcacgatgtttgggccacttttggaagaggtcagggatgacatgttttcaagcttggaggacatcaccaacgcaccatatgcagatctgctctctattaattcaatgaggaaaggaaaggggtcatagaaattagtcttggcagatggaggggaacgtctcaatgactgaggcacattttttcttgttagttagctcatggatttttatggtccaagaggagttgctgctatatgaatatgacaacacccattaatcaacataactatatgaatacaatctgaaaggaaggtcggtttggtcagaaacacatggaggtactgatggaggctatgaaacatataagagacatgccagtgaggagcaggagtagtttagtcggttcttgctttatgaagtggatgcaattagaaagacgtacgagcaggccaacatctcgcggtggctcgccctgggcaaccggacctgcccgaccacgatgcaggagctctgggacgacgccctcacccccaacgccactctctgacagctcatcgtcacctgtttatcttagatactgtttgaacgtatgggatgttggaggacagaagacaatcatgtcttactggagaaaattctttgagcagactaatgggttagtttggtttgctgatagttcacacataaggaggcttgatgattgccgtgctgaactccacaatctcttgaaagaagagagactagttggagcttcattgttgatttttgcaaataagcaagacatgcaaggagctctaaaaccaactggaatcgcgaagagtcactctccgacagctcatcgccgcttggttctcccgccggtacacaaggtttaagaagcgctccgcggacttccacggccgcgctgccgatctcgtccacagcctccggggcacggcgatgcccaggagacaggccctcgaggaagagcaatgtagagaagagaaaggtatctcgactgttccaaagcacaagtatgcatccaaagcctgttccccaaaagttttgaagacttaaacaatatgctgcatgaaaatctttactttattcacaacacacctgagatggactgggcttgggcagctaaccggttaattgagaaggatgaggcataaactccagacgatgctcctttaaattatttgccgcagaagaggctaattttgacaagccagttgatccagcaacttctccctgctataccagcgaccattttgagaggacaagctgtgtctacttacggaagtgcgacatacactctatcaatgttgacactaagggatgcatgcagcatggtagcatcattatcatcatcatataactcttgctcacctgtggaggatgaaaataacccatctgaacaaacaagtgctaagaaaatggaagacagagtatcaaaggttgtggaagtcttcgctggaagaatccagaagatggaaaatgactttataagtgattccctcacggttgtgtccttcacaaaggaaggatgtgaagccacactattatcaagcaacaaagccaaagttgtgtgacacaattataacaaaggaatcatcacccattagcacactaaaattggcgcatacagataacgcacctgcaaagtgggatcatttgaacatagttcagcaaagggccgacgcacttgagtcactcctcaagctctacgcaaagcttctggaggagaggctcgatgagctcgccgacgtttttcgaccatttggtgagagagctgtgtcatccggagagatgagcatacaatgatgtctgaccataagcctgatgactccaccgaagttttgagagtccccaacaatgcttttgtagcagcgattcgtttcaacatttttttgtttttcaaataccatttcgagagtgtaaataacttcaacggaattcaaaattgatgtacttaggtaggcctgagccctgtttatttttgatgtatatggtttgcatgtcaccaactgttgtgagcgatgattgattatttatcgtcttgttttatctgtctgtactcctttaatgcagcaccttcgtttgtcatgtgtcgtctcccctgtaagatgttgattaatattcattatatcattgttt

SEQ ID NO: 41693 - DNA, 2547 bp, Zea Mays
cgcttcgcacgtccccgccgtcgcgctcgcctccctcctctttgttgcctccgcgtcgacctccaccccgctctccgacgcgcttaccgtcgtctcggatttctggtgcactctcttctctacgacgcgagcaagggcggcgcttgccatggcatcgacgggaaccaggcatcactctccctatctctcgggaggggagctgtttgagcggatgcccaccaggaacaatgtttcctagatcacgatgtttgggccacttttggaagaggtcagggatgacatgttttcaagcttggaggacatcaccaacgcaccatatgcagatctgctctctattaattcaatgaggaaaggaaaggggtcatagaaattagtcttggcagatggaggggaacgtctcaatgactgaggcacattttttcttgttagttagctcatggatttttatggtccaagaggagttgctgctatatgaatatgacaacacccattaatcaacataactatatgaatacaatctgaaaggaaggtcggtttggtcagaaacacatggaggtactgatggaggctatgaaacatataagagacatgccagtgaggagcaggagtagtttagtcggttcttgctttatgaagtggatgcaattagaaagacgtacgagcaggccaacatctcgcggtggctcgccctgggcaaccggacctgcccgaccacgatgcaggagctctgggacgacgccctcacccccaacgccactctctgacagctcatcgtcacctggttctcccgcctggttctgcattttgttttcttatctgtcaatcatgtttttccatattactgcaggcgggtctgattaattatttaaatgtagtttatcttagatactgtttgaacgtatgggatgttggaggacagaagacaatcatgtcttactggagaaaattctttgagcagactaatgggttagtttggtttgctgatagttcacacataaggaggcttgatgattgccgtgctgaactccacaatctcttgaaagaagagagactagttggagcttcattgttgatttttgcaaataagcaagacatgcaaggagctctaaaaccaactggaatcgcgaaggtttaagaagcgctccgcggacttccacggccgcgctgccgatctcgtccacagcctccggggcacggcgatgcccaggagacaggccctcgaggaagagcaatgtagagaagagaaaggtatctcgactgttccaaagcacaagtatgcatccaaagcctgttccccaaaagttttgaagacttaaacaatatgctgcatgaaaatctttactttattcacaacacacctgagatggactgggcttgggcagctaaccggttaattgagaaggatgaggcataaactccagacgatgctcctttaaattatttgccgcagaagaggctaattttgacaagccagttgatccagcaacttctccctgctataccagcgaccattttgagaggacaagctgtgtctacttacggaagtgcgacatacactctatcaatgttgacactaagggatgcatgcagcatggtagcatcattatcatcatcatataactcttgctcacctgtggaggatgaaaataacccatctgaacaaacaagtgctaagaaaatggaagacagagtatcaaaggttgtggaagtcttcgctggaagaatccagaagatggaaaatgactttataagtttgaacaagagggcctcgactaatcggacgactggacgattagtcgacctaatcgggtcggatgccctggtcgttccactaaaaccgactagaccgactaatcgcgattaatcgcgattagtcggacgacttgaaatcattgatcagtgattccctcacggttgtgtccttcacaaaggaaggatgtgaagccacactattatcaagcaacaaagccaaagttgtgtgacacaattataacaaaggaatcatcacccattagcacactaaaattggcgcatacagataacgcacctgcaaagtgggatcatttgaacatagttcagcaaagggccgacgcacttgagtcactcctcaagctctacgcaaagcttctggaggagaggctcgatgagctcgccgacgtttttcgaccatttggtgagagagctgtgtcatccggagagatgagcatacaatgatgtctgaccataagcctgatgactccaccgaagttttgagagtccccaacaatgcttttgtagcagcgattcgtttcaacatttttttgtttttcaaataccatttcgagagtgtaaataacttcaacggaattcaaaattgatgtacttaggtaggcctgagccctgtttatttttgatgtatatggtttgcatgtcaccaactgttgtgagcgatgattgattatttatcgtcttgttttatctgtctgtactcctttaatgcagcaccttcgtttgtcatgtgtcgtctcccctgtaagatgttgattaatattcattatatcattgttt

SEQ ID NO: 41694 - DNA, 2632 bp, Zea Mays
cgcttcgcacgtccccgccgtcgcgctcgcctccctcctctttgttgcctccgcgtcgacctccaccccgctctccgacgcgcttaccgtcgtctcggatttctggtgcactctcttctctacgacgcgagcaagggcggcgcttgccatggcatcgacgggaaccaggcatcactctccctatctctcgggaggggagctgtttgagcggatgcccaccaggaacaatgtttcctagatcacgatgtttgggccacttttggaagaggtcagggatgacatgttttcaagcttggaggacatcaccaacgcaccatatgcagatctgctctctattaattcaatgaggaaaggaaaggggtcatagaaattagtcttggcagatggaggggaacgtctcaatgactgaggcacattttttcttgttagttagctcatggatttttatggtccaagaggagttgctgctatatgaatatgacaacacccattaatcaacataactatatgaatacaatctgaaaggaaggtcggtttggtcagaaacacatggaggtactgatggaggctatgaaacatataagagacatgccagtgaggagcaggagtagtttagtcggttcttgctttatgaagtggatgcaattagaaagacgtacgagcaggccaacatctcgcggtggctcgccctgggcaaccggacctgcccgaccacgatgcaggagctctgggacgacgccctcacccccaacgccactctctgacagctcatcgtcacctggttctcccgcctggttctgcattttgttttcttatctgtcaatcatgtttttccatattactgcaggcgggtctgattaattatttaaatgtagtttatcttagatactgtttgaacgtatgggatgttggaggacagaagacaatcatgtcttactggagaaaattctttgagcagactaatgggttagtttggtttgctgatagttcacacataaggaggcttgatgattgccgtgctgaactccacaatctcttgaaagaagaggataaaggtttacctatctagggagtgttctattgttgatccttactgtattgattttaacagagactagttggagcttcattgttgatttttgcaaataagcaagacatgcaaggagctctaaaaccaactggaatcgcgaagattttacttagttcaatgtgggagcaaaaggatatgccaaattgaatgtagtttcatcagttatgctctattatggatgttcagaggcatccaatttcagtgtgtactgcaatacttgggtccacctagtcactctccgacagctcatcgccgcttggttctcccgccggtacacaaggtttaagaagcgctccgcggacttccacggccgcgctgccgatctcgtccacagcctccggggcacggcgatgcccaggagacaggccctcgaggaagagcaatgtagagaagagaaaggtatctcgactgttccaaagcacaagtatgcatccaaagcctgttccccaaaagacttaaacaatatgctgcatgaaaatctttactttattcacaacacacctgagatggactgggcttgggcagctaaccggttaattgagaaggatgaggcataaactccagacgatgctcctttaaattatttgccgcagaagaggctaattttgacaagccagttgatccagcaacttctccctgctataccagcgaccattttgagaggacaagctgtgtctacttacggaagtgcgacatacactctatcaatgttgacactaagggatgcatgcagcatggtagcatcattatcatcatcatataactcttgctcacctgtggaggatgaaaataacccatctgaacaaacaagtgctaagaaaatggaagacagagtatcaaaggttgtggaagtcttcgctggaagaatccagaagatggaaaatgactttataagtgattccctcacggttgtgtccttcacaaaggaaggatgtgaagccacactattatcaagcaacaaagccaaagttgtgtgacacaattataacaaaggaatcatcacccattagcacactaaaattggcgcatacagataacgcacctgcaaagtgggatcatttgaacatagttcagcaaagggccgacgcacttgagtcactcctcaagctctacgcaaagcttctggaggagaggctcgatgagctcgccgacgtttttcgaccatttggtgagagagctgtgtcatccggagagatgagcatacaatgatgtctgaccataagcctgatgactccaccgaagttttgagagtccccaacaatgcttttgtagcagcgattcgtttcaacatttttttgtttttcaaataccatttcgagagtgtaaataacttcaacggaattcaaaattgatgtacttaggtaggcctgagccctgtttatttttgatgtatatggtttgcatgtcaccaactgttgtgagcgatgattgattatttatcgtcttgttttatctgtctgtactcctttaatgcagcaccttcgtttgtcatgtgtcgtctcccctgtaagatgttgattaatattcattatatcattgttt

SEQ ID NO: 41695 - DNA, 2454 bp, Zea Mays
cgcttcgcacgtccccgccgtcgcgctcgcctccctcctctttgttgcctccgcgtcgacctccaccccgctctccgacgcgcttaccgtcgtctcggatttctggtgcactctcttctctacgacgcgagcaagggcggcgcttgccatggcatcgacgggaaccaggaggggagctgtttgagcggatgcccaccaggaacaatgtttcctagatcacgatgtttgggccacttttggaagaggtcagggatgacatgttttcaagcttggaggacatcaccaacgcaccatatgcagatctgctctctattaattcaatgaggaaaggaaaggggtcatagaaattagtcttggcagatggaggggaacgtctcaatgactgaggcacattttttcttgttagttagctcatggatttttatggtccaagaggagttgctgctatatgaatatgacaacacccattaatcaacataactatatgaatacaatctgaaaggaaggtcggtttggtcagaaacacatggaggtactgatggaggctatgaaacatataagagacatgccagtgaggagcaggagtagtttagtcggttcttgctttatgaagtggatgcaattagaaagacgtacgagcaggccaacatctcgcggtggctcgccctgggcaaccggacctgcccgaccacgatgcaggagctctgggacgacgccctcacccccaacgccactctctgacagctcatcgtcacctggttctcccgcctggttctgcattttgttttcttatctgtcaatcatgtttttccatattactgcaggcgggtctgattaattatttaaatgtagtttatcttagatactgtttgaacgtatgggatgttggaggacagaagacaatcatgtcttactggagaaaattctttgagcagactaatgggttagtttggtttgctgatagttcacacataaggaggcttgatgattgccgtgctgaactccacaatctcttgaaagaagagagactagttggagcttcattgttgatttttgcaaataagcaagacatgcaaggagctctaaaaccaactggaatcgcgaagattttacttagttcaatgtgggagcaaaaggatatgccaaattgaatgtagtttcatcagttatgctctattatggatgttcagaggcatccaatttcagtgtgtactgcaatacttgggtccacctagtcactctccgacagctcatcgccgcttggttctcccgccggtacacaaggtttaagaagcgctccgcggacttccacggccgcgctgccgatctcgtccacagcctccggggcacggcgatgcccaggagacaggccctcgaggaagagcaatgtagagaagagaaaggtatctcgactgttccaaagcacaagtatgcatccaaagcctgttccccaaaaggatgaggcataaactccagacgatgctcctttaaattatttgccgcagaagaggctaattttgacaagccagttgatccagcaacttctccctgctataccagcgaccattttgagaggacaagctgtgtctacttacggaagtgcgacatacactctatcaatgttgacactaagggatgcatgcagcatggtagcatcattatcatcatcatataactcttgctcacctgtggaggatgaaaataacccatctgaacaaacaagtgctaagaaaatggaagacagagtatcaaaggttgtggaagtcttcgctggaagaatccagaagatggaaaatgactttataagtgattccctcacggttgtgtccttcacaaaggaaggatgtgaagccacactattatcaagcaacaaagccaaagttgtgtgacacaattataacaaaggaatcatcacccattagcacactaaaattggcgcatacagataacgcacctgcaaagtgggatcatttgaacatagttcagcaaagggccgacgcacttgagtcactcctcaagctctacgcaaagcttctggaggagaggctcgatgagctcgccgacgtttttcgaccatttggtgagagagctgtgtcatccggagagatgagcatacaatgatgtctgaccataagcctgatgactccaccgaagttttgagagtccccaacaatgcttttgtagcagcgattcgtttcaacatttttttgtttttcaaataccatttcgagagtgtaaataacttcaacggaattcaaaattgatgtacttaggtaggcctgagccctgtttatttttgatgtatatggtttgcatgtcaccaactgttgtgagcgatgattgattatttatcgtcttgttttatctgtctgtactcctttaatgcagcaccttcgtttgtcatgtgtcgtctcccctgtaagatgttgattaatattcattatatcattgttt

SEQ ID NO: 41696 - DNA, 2731 bp, Zea Mays
cgcttcgcacgtccccgccgtcgcgctcgcctccctcctctttgttgcctccgcgtcgacctccaccccgctctccgacgcgcttaccgtcgtctcggatttctggtgcactctcttctctacgacgcgagcaagggcggcgcttgccatggcatcgacgggaaccaggcatcactctccctatctctcgggaggggagctgtttgagcggatgcccaccaggaacaatgtttcctagatcacgatgtttgggccacttttggaagaggtcagggatgacatgttttcaagcttggaggacatcaccaacgcaccatatgcagatctgctctctattaattcaatgaggaaaggaaaggggtcatagaaattagtcttggcagatggaggggaacgtctcaatgactgaggcacattttttcttgttagttagctcatggatttttatggtccaagaggagttgctgctatatgaatatgacaacacccattaatcaacataactatatgaatacaatctgaaaggaaggtcggtttggtcagaaacacatggaggtactgatggaggctatgaaacatataagagacatgccagtgaggagcaggagtagtttagtcggttcttgctttatgaagtggatgcaattagaaagacgtacgagcaggccaacatctcgcggtggctcgccctgggcaaccggacctgcccgaccacgatgcaggagctctgggacgacgccctcacccccaacgccactctctgacagctcatcgtcacctggttctcccgcctggttctgcattttgttttcttatctgtcaatcatgtttttccatattactgcaggcgggtctgattaattatttaaatgtagtttatcttagatactgtttgaacgtatgggatgttggaggacagaagacaatcatgtcttactggagaaaattctttgagcagactaatgggttagtttggtttgctgatagttcacacataaggaggcttgatgattgccgtgctgaactccacaatctcttgaaagaagagagactagttggagcttcattgttgatttttgcaaataagcaagacatgcaaggagctctaaaaccaactggaatcgcgaagagtcactctccgacagctcatcgccgcttggttctcccgccggtacacaaggtttaagaagcgctccgcggacttccacggccgcgctgccgatctcgtccacagcctccggggcacggcgatgcccaggagacaggccctcgaggaagagcaatgtagagaagagaaaggtatctcgactgttccaaagcacaagtatgcatccaaagcctgttccccaaaaggtgcgtgaactttgttcttgattttgtcagactaaatgtgggtgaactttgtactgcagtttttgtttaaataaactttggactgtttaaattactgatgcatccaaccactgtttttctttactgtttgttgatacacgaccagatgcccagttgagttcacccaaaaggtttattacaccacgaaaaaatctgagatgaaatgatttttatttaaatgaactttgtactgcaatttttgtttaaatgaactttgtactgtttaaattattgatgcatagttttgaagacttaaacaatatgctgcatgaaaatctttactttattcacaacacacctgagatggactgggcttgggcagctaaccggttaattgagaaggatgaggcataaactccagacgatgctcctttaaattatttgccgcagaagaggctaattttgacaagccagttgatccagcaacttctccctgctataccagcgaccattttgagaggacaagctgtgtctacttacggaagtgcgacatacactctatcaatgttgacactaagggatgcatgcagcatggtagcatcattatcatcatcatataactcttgctcacctgtggaggatgaaaataacccatctgaacaaacaagtgctaagaaaatggaagacagagtatcaaaggttgtggaagtcttcgctggaagaatccagaagatggaaaatgactttataagtgattccctcacggttgtgtccttcacaaaggaaggatgtgaagccacactattatcaagcaacaaagccaaagttgtgtgacacaattataacaaaggaatcatcacccattagcacactaaaattggcgcatacagataacgcacctgcaaagtgggatcatttgaacatagttcagcaaagggccgacgcacttgagtcactcctcaagctctacgcaaagcttctggaggagaggctcgatgagctcgccgacgtttttcgaccatttggtgagagagctgtgtcatccggagagatgagcatacaatgatgtctgaccataagcctgatgactccaccgaagttttgagagtccccaacaatgcttttgtagcagcgattcgtttcaacatttttttgtttttcaaataccatttcgagagtgtaaataacttcaacggaattcaaaattgatgtacttaggtaggcctgagccctgtttatttttgatgtatatggtttgcatgtcaccaactgttgtgagcgatgattgattatttatcgtcttgttttatctgtctgtactcctttaatgcagcaccttcgtttgtcatgtgtcgtctcccctgtaagatgttgattaatattcattatatcattgttt

SEQ ID NO: 41697 - DNA, 2679 bp, Zea Mays
cgcttcgcacgtccccgccgtcgcgctcgcctccctcctctttgttgcctccgcgtcgacctccaccccgctctccgacgcgcttaccgtcgtctcggatttctggtgcactctcttctctacgacgcgagcaagggcggcgcttgccatggcatcgacgggaaccaggcatcactctccctatctctcgggaggggagctgtttgagcggatgcccaccaggaacaatgtttcctagatcacgatgtttgggccacttttggaagaggtcagggatgacatgttttcaagcttggaggacatcaccaacgcaccatatgcagatctgctctctattaattcaatgaggaaaggaaaggggtcatagaaattagtcttggcagatggaggggaacgtctcaatgactgaggcacattttttcttgttagttagctcatggatttttatggtccaagaggagttgctgctatatgaatatgacaacacccattaatcaacataactatatgaatacaatctgaaaggaaggtcggtttggtcagaaacacatggaggtactgatggaggctatgaaacatataagagacatgccagtgaggagcaggagtagtttagtcggttcttgctttatgaagtggatgcaattagaaagacgtacgagcaggccaacatctcgcggtggctcgccctgggcaaccggacctgcccgaccacgatgcaggagctctgggacgacgccctcacccccaacgccactctctgacagctcatcgtcacctggttctcccgcctggttctgcattttgttttcttatctgtcaatcatgtttttccatattactgcaggcgggtctgattaattatttaaatgtagtttatcttagatactgtttgaacgtatgggatgttggaggacagaagacaatcatgtcttactggagaaaattctttgagcagactaatgggttagtttggtttgctgatagttcacacataaggaggcttgatgattgccgtgctgaactccacaatctcttgaaagaagagagactagttggagcttcattgttgatttttgcaaataagcaagacatgcaaggagctctaaaaccaactggaatcgcgaagagtcactctccgacagctcatcgccgcttggttctcccgccggtacacaaggtttaagaagcgctccgcggacttccacggccgcgctgccgatctcgtccacagcctccggggcacggcgatgcccaggagacaggccctcgaggaagagcaatgtagagaagagaaaggtatctcgactgttccaaagcacaagtatgcatccaaagcctgttccccaaaagacttaaacaatatgctgcatgaaaatctttactttattcacaacacacctgagatggactgggcttgggcagctaaccggttaattgagaaggttagccaactttgcgattctgctattttagttcttgtccatattggtccaagggatttatcttgatgctaaactaaattctggaataggatgaggcataaactccagacgatgctcctttaaattatttgccgcagaagaggctaattttgacaagccagttgatccagcaacttctccctgctataccagcgaccattttgagaggacaagctgtgtctacttacggaagtgcgacatacactctatcaatgttgacactaagggatgcatgcagcatggtagcatcattatcatcatcatataactcttgctcacctgtggaggatgaaaataacccatctgaacaaacaagtgctaagaaaatggaagacagagtatcaaaggttgtggaagtcttcgctggaagaatccagaagatggaaaatgactttataagtttgaacaagagggcctcgactaatcggacgactggacgattagtcgacctaatcgggtcggatgccctggtcgttccactaaaaccgactagaccgactaatcgcgattaatcgcgattagtcggacgacttgaaatcattgatcagtgattccctcacggttgtgtccttcacaaaggaaggatgtgaagccacactattatcaagcaacaaagccaaagttgtgtgacacaattataacaaaggaatcatcacccattagcacactaaaattggcgcatacagataacgcacctgcaaagtgggatcatttgaacatagttcagcaaagggccgacgcacttgagtcactcctcaagctctacgcaaagcttctggaggagaggctcgatgagctcgccgacgtttttcgaccatttggtgagagagctgtgtcatccggagagatgagcatacaatgatgtctgaccataagcctgatgactccaccgaagttttgagagtccccaacaatgcttttgtagcagcgattcgtttcaacatttttttgtttttcaaataccatttcgagagtgtaaataacttcaacggaattcaaaattgatgtacttaggtaggcctgagccctgtttatttttgatgtatatggtttgcatgtcaccaactgttgtgagcgatgattgattatttatcgtcttgttttatctgtctgtactcctttaatgcagcaccttcgtttgtcatgtgtcgtctcccctgtaagatgttgattaatattcattatatcattgttt

SEQ ID NO: 41698 - DNA, 2878 bp, Zea Mays
cgcttcgcacgtccccgccgtcgcgctcgcctccctcctctttgttgcctccgcgtcgacctccaccccgctctccgacgcgcttaccgtcgtctcggatttctggtgcactctcttctctacgacgcgagcaagggcggcgcttgccatggcatcgacgggaaccaggcatcactctccctatctctcgggaggggagctgtttgagcggatgcccaccaggaacaatgtttcctagatcacgatgtttgggccacttttggaagaggtcagggatgacatgttttcaagcttggaggacatcaccaacgcaccatatgcagatctgctctctattaattcaatgaggaaaggaaaggggtcatagaaattagtcttggcagatggaggggaacgtctcaatgactgaggcacattttttcttgttagttagctcatggatttttatggtccaagaggagttgctgctatatgaatatgacaacacccattaatcaacataactatatgaatacaatctgaaaggaaggtcggtttggtcagaaacacatggaggtactgatggaggctatgaaacatataagagacatgccagtgaggagcaggagtagtttagtcggttcttgctttatgaagtggatgcaattagaaagacgtacgagcaggccaacatctcgcggtggctcgccctgggcaaccggacctgcccgaccacgatgcaggagctctgggacgacgccctcacccccaacgccactctctgacagctcatcgtcacctgtttatcttagatactgtttgaacgtatgggatgttggaggacagaagacaatcatgtcttactggagaaaattctttgagcagactaatgggttagtttggtttgctgatagttcacacataaggaggcttgatgattgccgtgctgaactccacaatctcttgaaagaagagagactagttggagcttcattgttgatttttgcaaataagcaagacatgcaaggagctctaaaaccaactggaatcgcgaagagtcactctccgacagctcatcgccgcttggttctcccgccggtacacaaggtttaagaagcgctccgcggacttccacggccgcgctgccgatctcgtccacagcctccggggcacggcgatgcccaggagacaggccctcgaggaagagcaatgtagagaagagaaaggtatctcgactgttccaaagcacaagtatgcatccaaagcctgttccccaaaaggtgcgtgaactttgttcttgattttgtcagactaaatgtgggtgaactttgtactgcagtttttgtttaaataaactttggactgtttaaattactgatgcatccaaccactgtttttctttactgtttgttgatacacgaccagatgcccagttgagttcacccaaaaggtttattacaccacgaaaaaatctgagatgaaatgatttttatttaaatgaactttgtactgcagtatttacagacatattttggcacccgatcgattactgtttttgttttactaatagctgctgctattactatcttttgggtgaagtgaatcagatttttgtttaaatgaactttgtactgtttaaattattgatgcatagttttgaagacttaaacaatatgctgcatgaaaatctttactttattcacaacacacctgagatggactgggcttgggcagctaaccggttaattgagaaggatgaggcataaactccagacgatgctcctttaaattatttgccgcagaagaggctaattttgacaagccagttgatccagcaacttctccctgctataccagcgaccattttgagaggacaagctgtgtctacttacggaagtgcgacatacactctatcaatgttgacactaagggatgcatgcagcatggtagcatcattatcatcatcatataactcttgctcacctgtggaggatgaaaataacccatctgaacaaacaagtgctaagaaaatggaagacagagtatcaaaggttgtggaagtcttcgctggaagaatccagaagatggaaaatgactttataagtttgaacaagagggcctcgactaatcggacgactggacgattagtcgacctaatcgggtcggatgccctggtcgttccactaaaaccgactagaccgactaatcgcgattaatcgcgattagtcggacgacttgaaatcattgatcagtgattccctcacggttgtgtccttcacaaaggaaggatgtgaagccacactattatcaagcaacaaagccaaagttgtgtgacacaattataacaaaggaatcatcacccattagcacactaaaattggcgcatacagataacgcacctgcaaagtgggatcatttgaacatagttcagcaaagggccgacgcacttgagtcactcctcaagctctacgcaaagcttctggaggagaggctcgatgagctcgccgacgtttttcgaccatttggtgagagagctgtgtcatccggagagatgagcatacaatgatgtctgaccataagcctgatgactccaccgaagttttgagagtccccaacaatgcttttgtagcagcgattcgtttcaacatttttttgtttttcaaataccatttcgagagtgtaaataacttcaacggaattcaaaattgatgtacttaggtaggcctgagccctgtttatttttgatgtatatggtttgcatgtcaccaactgttgtgagcgatgattgattatttatcgtcttgttttatctgtctgtactcctttaatgcagcaccttcgtttgtcatgtgtcgtctcccctgtaagatgttgattaatattcattatatcattgttt

SEQ ID NO: 41699 - DNA, 2598 bp, Zea Mays
cgcttcgcacgtccccgccgtcgcgctcgcctccctcctctttgttgcctccgcgtcgacctccaccccgctctccgacgcgcttaccgtcgtctcggatttctggtgcactctcttctctacgacgcgagcaagggcggcgcttgccatggcatcgacgggaaccaggcatcactctccctatctctcgggaggggagctgtttgagcggatgcccaccaggaacaatgtttcctagatcacgatgtttgggccacttttggaagaggtcagggatgacatgttttcaagcttggaggacatcaccaacgcaccatatgcagatctgctctctattaattcaatgaggaaaggaaaggggtcatagaaattagtcttggcagatggaggggaacgtctcaatgactgaggcacattttttcttgttagttagctcatggatttttatggtccaagaggagttgctgctatatgaatatgacaacacccattaatcaacataactatatgaatacaatctgaaaggaaggtcggtttggtcagaaacacatggaggtactgatggaggctatgaaacatataagagacatgccagtgaggagcaggagtagtttagtcggttcttgctttatgaagtggatgcaattagaaagacgtacgagcaggccaacatctcgcggtggctcgccctgggcaaccggacctgcccgaccacgatgcaggagctctgggacgacgccctcacccccaacgccactctctgacagctcatcgtcacctggttctcccgcctggttctgcattttgttttcttatctgtcaatcatgtttttccatattactgcaggcgggtctgattaattatttaaatgtagtttatcttagatactgtttgaacgtatgggatgttggaggacagaagacaatcatgtcttactggagaaaattctttgagcagactaatgggttagtttggtttgctgatagttcacacataaggaggcttgatgattgccgtgctgaactccacaatctcttgaaagaagagagactagttggagcttcattgttgatttttgcaaataagcaagacatgcaaggagctctaaaaccaactggaatcgcgaagagtcactctccgacagctcatcgccgcttggttctcccgccggtacacaaggtttaagaagcgctccgcggacttccacggccgcgctgccgatctcgtccacagcctccggggcacggcgatgcccaggagacaggccctcgaggaagagcaatgtagagaagagaaaggtatctcgactgttccaaagcacaagtatgcatccaaagcctgttccccaaaagttttgaagacttaaacaatatgctgcatgaaaatctttactttattcacaacacacctgagatggactgggcttgggcagctaaccggttaattgagaaggatgaggcataaactccagacgatgctcctttaaattatttgccgcagaagaggctaattttgacaagccagttgatccagcaacttctccctgctataccagcgaccattttgagaggacaagctgtgtctacttacggaagtgcgacatacactctatcaatgttgacactaagggatgcatgcagcatggtagcatcattatcatcatcatataactcttgctcacctgtggaggatgaaaataacccatctgaacaaacaagtgctaagaaaatggaagacagagtatcaaaggttgtggaagtcttcgctggaagaatccagaagatggaaaatgactttataagtttgaacaagagggcctcgactaatcggacgactggacgattagtcgacctaatcgggtcggatgccctggtcgttccactaaaaccgactagaccgactaatcgcgattaatcgcgattagtcggacgacttgaaatcattgatcagtgattccctcacggttgtgtccttcacaaaggaaggatgtgaagccacactattatcaagcaacaaagccaaagttgtgtgacacaattataacaaaggaatcatcacccattagcacactaaaattggcgcatacagataacgcacctgcaaagtgggatcatttgaacatagttcagcaaagggccgacgcacttgagtcactcctcaagctctacgcaaagcttctggaggagaggctcgatgagctcgccgacgtttttcgaccatttggtgagagagctgtgtcatccggagagatgagcatacaatgatgtctgaccataagcctgatgactccaccgaagttttgagagtccccaacaatgcttttgtagcagcgattcgtttcaacatttttttgtttttcaaataccatttcgagagtgtaaataacttcaacggaattcaaaattgatgtacttaggtaggcctgagccctgtttatttttgatgtatatggtttgcatgtcaccaactgttgtgagcgatgattgattatttatcgtcttgttttatctgtctgtactcctttaatgcagcaccttcgtttgtcatgtgtcgtctcccctgtaagatgttgattaatattcattatatcattgttt

SEQ ID NO: 41700 - DNA, 2666 bp, Zea Mays
cgcttcgcacgtccccgccgtcgcgctcgcctccctcctctttgttgcctccgcgtcgacctccaccccgctctccgacgcgcttaccgtcgtctcggatttctggtgcactctcttctctacgacgcgagcaagggcggcgcttgccatggcatcgacgggaaccaggcatcactctccctatctctcgggaggggagctgtttgagcggatgcccaccaggaacaatgtttcctagatcacgatgtttgggccacttttggaagaggtcagggatgacatgttttcaagcttggaggacatcaccaacgcaccatatgcagatctgctctctattaattcaatgaggaaaggaaaggggtcatagaaattagtcttggcagatggaggggaacgtctcaatgactgaggcacattttttcttgttagttagctcatggatttttatggtccaagaggagttgctgctatatgaatatgacaacacccattaatcaacataactatatgaatacaatctgaaaggaaggtcggtttggtcagaaacacatggaggtactgatggaggctatgaaacatataagagacatgccagtgaggagcaggagtagtttagtcggttcttgctttatgaagtggatgcaattagaaagacgtacgagcaggccaacatctcgcggtggctcgccctgggcaaccggacctgcccgaccacgatgcaggagctctgggacgacgccctcacccccaacgccactctctgacagctcatcgtcacctggttctcccgcctggttctgcattttgttttcttatctgtcaatcatgtttttccatattactgcaggcgggtctgattaattatttaaatgtagtttatcttagatactgtttgaacgtatgggatgttggaggacagaagacaatcatgtcttactggagaaaattctttgagcagactaatgggttagtttggtttgctgatagttcacacataaggaggcttgatgattgccgtgctgaactccacaatctcttgaaagaagagagactagttggagcttcattgttgatttttgcaaataagcaagacatgcaaggagctctaaaaccaactggaatcgcgaagattttacttagttcaatgtgggagcaaaaggatatgccaaattgaatgtagtttcatcagttatgctctattatggatgttcagaggcatccaatttcagtgtgtactgcaatacttgggtccacctagtcactctccgacagctcatcgccgcttggttctcccgccggtacacaaggtttaagaagcgctccgcggacttccacggccgcgctgccgatctcgtccacagcctccggggcacggcgatgcccaggagacaggccctcgaggaagagcaatgtagagaagagaaaggtatctcgactgttccaaagcacaagtatgcatccaaagcctgttccccaaaagttttgaagacttaaacaatatgctgcatgaaaatctttactttattcacaacacacctgagatggactgggcttgggcagctaaccggttaattgagaaggttagccaactttgcgattctgctattttagttcttgtccatattggtccaagggatttatcttgatgctaaactaaattctggaataggatgaggcataaactccagacgatgctcctttaaattatttgccgcagaagaggctaattttgacaagccagttgatccagcaacttctccctgctataccagcgaccattttgagaggacaagctgtgtctacttacggaagtgcgacatacactctatcaatgttgacactaagggatgcatgcagcatggtagcatcattatcatcatcatataactcttgctcacctgtggaggatgaaaataacccatctgaacaaacaagtgctaagaaaatggaagacagagtatcaaaggttgtggaagtcttcgctggaagaatccagaagatggaaaatgactttataagtgattccctcacggttgtgtccttcacaaaggaaggatgtgaagccacactattatcaagcaacaaagccaaagttgtgtgacacaattataacaaaggaatcatcacccattagcacactaaaattggcgcatacagataacgcacctgcaaagtgggatcatttgaacatagttcagcaaagggccgacgcacttgagtcactcctcaagctctacgcaaagcttctggaggagaggctcgatgagctcgccgacgtttttcgaccatttggtgagagagctgtgtcatccggagagatgagcatacaatgatgtctgaccataagcctgatgactccaccgaagttttgagagtccccaacaatgcttttgtagcagcgattcgtttcaacatttttttgtttttcaaataccatttcgagagtgtaaataacttcaacggaattcaaaattgatgtacttaggtaggcctgagccctgtttatttttgatgtatatggtttgcatgtcaccaactgttgtgagcgatgattgattatttatcgtcttgttttatctgtctgtactcctttaatgcagcaccttcgtttgtcatgtgtcgtctcccctgtaagatgttgattaatattcattatatcattgttt

SEQ ID NO: 41701 - DNA, 2369 bp, Zea Mays
cgcttcgcacgtccccgccgtcgcgctcgcctccctcctctttgttgcctccgcgtcgacctccaccccgctctccgacgcgcttaccgtcgtctcggatttctggtgcactctcttctctacgacgcgagcaagggcggcgcttgccatggcatcgacgggaaccaggcatcactctccctatctctcgggaggggagctgtttgagcggatgcccaccaggaacaatgtttcctagatcacgatgtttgggccacttttggaagaggtcagggatgacatgttttcaagcttggaggacatcaccaacgcaccatatgcagatctgctctctattaattcaatgaggaaaggaaaggggtcatagaaattagtcttggcagatggaggggaacgtctcaatgactgaggcacattttttcttgttagttagctcatggatttttatggtccaagaggagttgctgctatatgaatatgacaacacccattaatcaacataactatatgaatacaatctgaaaggaaggtcggtttggtcagaaacacatggaggtactgatggaggctatgaaacatataagagacatgccagtgaggagcaggagtagtttagtcggttcttgctttatgaagtggatgcaattagaaagacgtacgagcaggccaacatctcgcggtggctcgccctgggcaaccggacctgcccgaccacgatgcaggagctctgggacgacgccctcacccccaacgccactctctgacagctcatcgtcacctggttctcccgcctgtttatcttagatactgtttgaacgtatgggatgttggaggacagaagacaatcatgtcttactggagaaaattctttgagcagactaatgggttagtttggtttgctgatagttcacacataaggaggcttgatgattgccgtgctgaactccacaatctcttgaaagaagagagactagttggagcttcattgttgatttttgcaaataagcaagacatgcaaggagctctaaaaccaactggaatcgcgaagagtcactctccgacagctcatcgccgcttggttctcccgccggtacacaaggtttaagaagcgctccgcggacttccacggccgcgctgccgatctcgtccacagcctccggggcacggcgatgcccaggagacaggccctcgaggaagagcaatgtagagaagagaaaggtatctcgactgttccaaagcacaagtatgcatccaaagcctgttccccaaaagttttgaagacttaaacaatatgctgcatgaaaatctttactttattcacaacacacctgagatggactgggcttgggcagctaaccggttaattgagaaggatgaggcataaactccagacgatgctcctttaaattatttgccgcagaagaggctaattttgacaagccagttgatccagcaacttctccctgctataccagcgaccattttgagaggacaagctgtgtctacttacggaagtgcgacatacactctatcaatgttgacactaagggatgcatgcagcatggtagcatcattatcatcatcatataactcttgctcacctgtggaggatgaaaataacccatctgaacaaacaagtgctaagaaaatggaagacagagtatcaaaggttgtggaagtcttcgctggaagaatccagaagatggaaaatgactttataagtgattccctcacggttgtgtccttcacaaaggaaggatgtgaagccacactattatcaagcaacaaagccaaagttgtgtgacacaattataacaaaggaatcatcacccattagcacactaaaattggcgcatacagataacgcacctgcaaagtgggatcatttgaacatagttcagcaaagggccgacgcacttgagtcactcctcaagctctacgcaaagcttctggaggagaggctcgatgagctcgccgacgtttttcgaccatttggtgagagagctgtgtcatccggagagatgagcatacaatgatgtctgaccataagcctgatgactccaccgaagttttgagagtccccaacaatgcttttgtagcagcgattcgtttcaacatttttttgtttttcaaataccatttcgagagtgtaaataacttcaacggaattcaaaattgatgtacttaggtaggcctgagccctgtttatttttgatgtatatggtttgcatgtcaccaactgttgtgagcgatgattgattatttatcgtcttgttttatctgtctgtactcctttaatgcagcaccttcgtttgtcatgtgtcgtctcccctgtaagatgttgattaatattcattatatcattgttt

SEQ ID NO: 41702 - DNA, 2675 bp, Zea Mays
gaaaccgctcccttcgcacgccgaccctagctcccagatccacattcgcctccgcctcagatccctacagcgtgatgcgagggaacaacaaccgcgcgacctccccatcctgagcacctcaaatccgatgcccctccccaagccattccctcggccgcgacagcgacgacaacgagcgtggcccccctctaccacctctgcctttccatttgtggcctccgcaccgccccaacgttgacccctccgtcctccccctctactcccagcgcagcgccgccgcgcctgcgctatcccacccgatggatgtgctgccgcctctgcagcacgccccgtcgctaccgaccccgcccagccatgcatttggagttcacaatatgaagacatggtttatccaccggacgacgaggatggtgcgtggatggcgagggaggacctccactggacctactccgcacctcttcctgtctaccgaggccgagcacatggagccaacgactacaaaatcataaggaggggagctgtttgagcggatgcccaccaggaacaatgtttcctagatcacgatgtttgggccacttttggaagaggtcagggatgacatgttttcaagcttggaggacatcaccaacgcaccatatgcagatctgctctctattaattcaatgaggaaaggaaaggggtcatagaaattagtcttggcagatggaggggaacgtctcaatgactgaggcacattttttcttgttagttagctcatggatttttatggtccaagaggagttgctgctatatgaatatgacaacacccattaatcaacataactatatgaatacaatctgaaaggaaggtcggtttggtcagaaacacatggaggtactgatggaggctatgaaacatataagagacatgccagtgaggagcaggagtagtttagtcggttcttgctttatgaagtggatgcaattagaaagacgtacgagcaggccaacatctcgcggtggctcgccctgggcaaccggacctgcccgaccacgatgcaggagctctgggacgacgccctcacccccaacgccactctctgacagctcatcgtcacctgtttatcttagatactgtttgaacgtatgggatgttggaggacagaagacaatcatgtcttactggagaaaattctttgagcagactaatgggttagtttggtttgctgatagttcacacataaggaggcttgatgattgccgtgctgaactccacaatctcttgaaagaagagagactagttggagcttcattgttgatttttgcaaataagcaagacatgcaaggagctctaaaaccaactggaatcgcgaagagtcactctccgacagctcatcgccgcttggttctcccgccggtacacaaggtttaagaagcgctccgcggacttccacggccgcgctgccgatctcgtccacagcctccggggcacggcgatgcccaggagacaggccctcgaggaagagcaatgtagagaagagaaaggtatctcgactgttccaaagcacaagtatgcatccaaagcctgttccccaaaagttttgaagacttaaacaatatgctgcatgaaaatctttactttattcacaacacacctgagatggactgggcttgggcagctaaccggttaattgagaaggatgaggcataaactccagacgatgctcctttaaattatttgccgcagaagaggctaattttgacaagccagttgatccagcaacttctccctgctataccagcgaccattttgagaggacaagctgtgtctacttacggaagtgcgacatacactctatcaatgttgacactaagggatgcatgcagcatggtagcatcattatcatcatcatataactcttgctcacctgtggaggatgaaaataacccatctgaacaaacaagtgctaagaaaatggaagacagagtatcaaaggttgtggaagtcttcgctggaagaatccagaagatggaaaatgactttataagtgattccctcacggttgtgtccttcacaaaggaaggatgtgaagccacactattatcaagcaacaaagccaaagttgtgtgacacaattataacaaaggaatcatcacccattagcacactaaaattggcgcatacagataacgcacctgcaaagtgggatcatttgaacatagttcagcaaagggccgacgcacttgagtcactcctcaagctctacgcaaagcttctggaggagaggctcgatgagctcgccgacgtttttcgaccatttggtgagagagctgtgtcatccggagagatgagcatacaatgatgtctgaccataagcctgatgactccaccgaagttttgagagtccccaacaatgcttttgtagcagcgattcgtttcaacatttttttgtttttcaaataccatttcgagagtgtaaataacttcaacggaattcaaaattgatgtacttaggtaggcctgagccctgtttatttttgatgtatatggtttgcatgtcaccaactgttgtgagcgatgattgattatttatcgtcttgttttatctgtctgtactcctttaatgcagcaccttcgtttgtcatgtgtcgtctcccctgtaagatgttgattaatattcattatatcattgttt

SEQ ID NO: 41703 - DNA, 3196 bp, Zea Mays
aaaccgctcccttcgcacgccgaccctagctcccagatccacattcgcctccgcctcagatccctacagcgtgatgcgagggaacaacaaccgcgcgacctccccatcctgagcacctcaaatccgatgcccctccccaagccattccctcggccgcgacagcgacgacaacgagcgtggcccccctctaccacctctgcctttccatttgtggcctccgcaccgccccaacgttgacccctccgtcctccccctctactcccagcgcagcgccgccgcgcctgcgctatcccacccgatggatgtgctgccgcctctgcagcacgccccgtcgctaccgaccccgcccagccatgcatttggagttcacaatatgaagacatggtttatccaccggacgacgaggatggtgcgtggatggcgagggaggacctccactggacctactccgcacctcttcctgtctaccgaggccgagcacatggagccaacgactacaaaatcataaggaggggagctgtttgagcggatgcccaccaggaacaatgtttcctagatcacgatgtttgggccacttttggaagaggtcagggatgacatgttttcaagcttggaggacatcaccaacgcaccatatgcagatctgctctctattaattcaatgaggaaaggaaaggggtcatagaaattagtcttggcagatggaggggaacgtctcaatgactgaggcacattttttcttgttagttagctcatggatttttatggtccaagaggagttgctgctatatgaatatgacaacacccattaatcaacataactatatgaatacaatctgaaaggaaggtcggtttggtcagaaacacatggaggtactgatggaggctatgaaacatataagagacatgccagtgaggagcaggagtagtttagtcggttcttgctttatgaagtggatgcaattagaaagacgtacgagcaggccaacatctcgcggtggctcgccctgggcaaccggacctgcccgaccacgatgcaggagctctgggacgacgccctcacccccaacgccactctctgacagctcatcgtcacctgtttatcttagatactgtttgaacgtatgggatgttggaggacagaagacaatcatgtcttactggagaaaattctttgagcagactaatgggttagtttggtttgctgatagttcacacataaggaggcttgatgattgccgtgctgaactccacaatctcttgaaagaagagagactagttggagcttcattgttgatttttgcaaataagcaagacatgcaaggagctctaaaaccaactggaatcgcgaagagtcactctccgacagctcatcgccgcttggttctcccgccggtacacaaggtttaagaagcgctccgcggacttccacggccgcgctgccgatctcgtccacagcctccggggcacggcgatgcccaggagacaggccctcgaggaagagcaatgtagagaagagaaaggtatctcgactgttccaaagcacaagtatgcatccaaagcctgttccccaaaaggtgcgtgaactttgttcttgattttgtcagactaaatgtgggtgaactttgtactgcagtttttgtttaaataaactttggactgtttaaattactgatgcatccaaccactgtttttctttactgtttgttgatacacgaccagatgcccagttgagttcacccaaaaggtttattacaccacgaaaaaatctgagatgaaatgatttttatttaaatgaactttgtactgcagtatttacagacatattttggcacccgatcgattactgtttttgttttactaatagctgctgctattactatcttttgggtgaagtgaatcagatttttgtttaaatgaactttgtactgtttaaattattgatgcatagttttgaagacttaaacaatatgctgcatgaaaatctttactttattcacaacacacctgagatggactgggcttgggcagctaaccggttaattgagaaggatgaggcataaactccagacgatgctcctttaaattatttgccgcagaagaggctaattttgacaagccagttgatccagcaacttctccctgctataccagcgaccattttgagaggacaagctgtgtctacttacggaagtgcgacatacactctatcaatgttgacactaagggatgcatgcagcatggtagcatcattatcatcatcatataactcttgctcacctgtggaggatgaaaataacccatctgaacaaacaagtgctaagaaaatggaagacagagtatcaaaggttgtggaagtcttcgctggaagaatccagaagatggaaaatgactttataagtttgaacaagagggcctcgactaatcggacgactggacgattagtcgacctaatcgggtcggatgccctggtcgttccactaaaaccgactagaccgactaatcgcgattaatcgcgattagtcggacgacttgaaatcattgatcagtgattccctcacggttgtgtccttcacaaaggaaggatgtgaagccacactattatcaagcaacaaagccaaagttgtgtgacacaattataacaaaggaatcatcacccattagcacactaaaattggcgcatacagataacgcacctgcaaagtgggatcatttgaacatagttcagcaaagggccgacgcacttgagtcactcctcaagctctacgcaaagcttctggaggagaggctcgatgagctcgccgacgtttttcgaccatttggtgagagagctgtgtcatccggagagatgagcatacaatgatgtctgaccataagcctgatgactccaccgaagttttgagagtccccaacaatgcttttgtagcagcgattcgtttcaacatttttttgtttttcaaataccatttcgagagtgtaaataacttcaacggaattcaaaattgatgtacttaggtaggcctgagccctgtttatttttgatgtatatggtttgcatgtcaccaactgttgtgagcgatgattgattatttatcgtcttgttttatctgtctgtactcctttaatgcagcaccttcgtttgtcatgtgtcgtctcccctgtaagatgttgattaatattcattatatcattgttt

SEQ ID NO: 41704 - DNA, 491 bp, Zea Mays
tgtgtaaccctgttatgctagcgctaggaactcctctcctctgtgtttggttgaagtccgagttgcttgggttgtggagtctttttcctgcccacaagctctaacctgtgttcctcatgtgagcatattgtttctgtgctcaagccgaggatgactcccttcccaaccctgagtgcgctgtcccagagcttgcttgtcgtgttcctgtgccagtggtgaccgcagccacctatgttcacctcaccgtggccaagacactcgaagcaattacacacaaagacaatcctaccgtagacccttcaactagcactttctctaaccgattcctcgcaagcattgaagactaggtaatcatgagctttctaggtgtccctgtggctggaagatgcttccagtcttgaaggaggattagttaggtttatgtgtgaactttggaagggttctaccttcttgctatggtaataagttatgcactttgagtatatcaggaa

SEQ ID NO: 41705 - DNA, 202 bp, Zea Mays
agagtgttcagataagtcctgccacttggtttgccaagacaaggataagttttaccgtcatggcgcctactgcgtggaaaagacttgggagtgctgctgcccaacttaaccggcggctggtgtacactgtagcaacgcatgtgtgttctcctcggtgtgtttttatgagtcatgacgaaaaaataatggaatgaaactgcgc

SEQ ID NO: 41706 - DNA, 765 bp, Zea Mays
atttgaataagatatttagtaatttatggagggtttccctctctaggtttgcctcctatatattgctcctaaaacttaaatccccttcgagattttcagggattgagtgataaattaattcatttttttctcaatttgtaggaatctcgaagtacatttaagtttccaaactagctataaaagagattccttctccttacaaaagctggaggagcaataacactgtcttcctcatggcagtgatgacgagcagtgccgggccgtcgacgacgacgcacttcattgccgctatacctttggtccttctgctcatttctgcagcctccccgtcaagatgccaagcctggaaccaccacacaagcgctacacagccgcagccctcgttgctggggacggcgccggcggtggcacgacgaggaccgtcgttgcgagtgcgatgctacaacctctactcggaagaggagtgttcaaataggtactgccactcggtttgcgtggtccgcgatagaaagtatcgccagggagcctactgcgctgaaacaagatgggagtgttgctgcccacattgaatgaagcagcggtatggtgtacctgctcctgtagtgagccagtgtatttttatggaatctgtcagaatatttatttgtcacatttgtaaccatattagatgcacaatctaggggacatctatcttcctcttggccaacttcatttgaacaataatacaatagttttaccgaatataaattctgtctgtttctttcg

SEQ ID NO: 41707 - DNA, 2349 bp, Zea Mays
acacacactcactcactcgtacgccgtcgcttcctgcggtacgcactctctgtccgctgcgttcctccagctagcaactggccatcggggctgctatagcagagtaagtggcgatggctccagctcatgataggctccgccgcctggtgctgctcctcgtcgttgccaccgcggcggcggctttgcttctggcgccgacgacggcggatgctgcgctgccgcgggtgcagcacacgcccaccaaggccgacgggtcgctcgccatcctcgtcgtcggcgactggggccgccgtggtggggcagaagctggacatcgacttcgtcatctccaccggcgacaacatctacgacgacggcatcgccaacaccagcgaccccctcttcaaggaatcgttctccaatatctacactgccaacagccttcagaagccttggtacctggtccttggtaaccatgactacacgggaaacgcgctcgcgcagctcgaccctgccattcgcaaagtggatagccggtacaccgccattgccaagtccttcattgtcaactcagggattgcggattttttcctcgtcgacacaacgccgttcattgtccactactggaacaacaccaagttcgattggagaggcgtcgctcctcgagacacctacatcgcgaatctcctcaaggacttgaagtgtgcactgacagcgtccaaggctccctggaagatcgtcgtgggtcaccaccccatcagcagcgcctgcgggcatgggaacaacactgagctggaggagttgcttctcccggtcctcagggtatatatatgcatgctgttcgatctaacatgaagttaattgtcttctctcaagtcattaacatgatcgatcgatctatatatgaaactgaatgttcctgctgctttgcaacgcaattaacactactgcgcatgcagacacacgggtagtgctgcaacttggaccgtgccgtgccggcccggcacgagcccatcgtgcttcgggcctcagttagtcgggcctatctagcacgaaatagaatcgggccgtgccttactgggcctcgtgagtagaaataaggcccagcacggccctaaagcacggcgggcttccgttgggccgtgctggcccaggcacggcacgcaattaagtttgtatctcggtcgccgtggggagatcaggagatggccgctgggctggcgcctcgggagatccggagatggcgcttggggagatggattggccgctgggcgcctgtctggccgctggcatgcatggcatcgtggccgcaggaccgctggatggccgctgggcgtgggcgcgtggccgctggccgctgggcgtcacgcctaaggagatggccgcatggcgcgtggccgcaggaccgctggagtctggacgccacgccggggagatggccgcatggcgcgtggccgcaggaccgctggagtctggacgccgcgcctggggagctggacgccgcgcctggggagaagacgaatggatgggctggcggcggccgacgcctggggagtcgaggagagaatcggagacgggcggacgtctggggaaacgactaaacctaattaaatggcggccgacgctggaccgggatgttttcgtgccgggccagcacgagcacggcccacaacaacgtgtcgggcctggtagcacgacgggctcaaatttagagcacggcccagcccgcgattcgtgccgtgctagcccgaatttaaaccagtcgtgtcgggccgggcctttttccatttttcacgggccgtgctcgggccggccctttaggcacggcccaaactttcaggactacacacggggttgacatgtacttgaatggccatgaccactgcctgcagcgcgtcagcagcagagacagtcgtcttcagctattaaccagcggcggcgggtccaaggcatgggctggcaagttcaagcccaccctcgacaaggtggagttcctctacgacggccaggggttcatgtcgatgcgcctgagcaggacggaggcccgcctcgcgttcttcgacgtcgctggcagcgtcctgcactgctggaccatgcatgcccaaaaattaacgacgacgacgactgctgctgcagctaggcactaaagctttgctgggtacgatgagttgatgatgcaattaattatttggttttgtcgtcttttcgtgcgtgagagggaagcaataataattaattgctgctgcttctgttgttgtgtgcacatgcatgtgagggtgtcaagtatgttcagcctcttgcaagataaaatctctcgtcttctgtggaataaactgggaaaaaagtttttttttgtaaagtatgcaggag

SEQ ID NO: 41708 - DNA, 1327 bp, Zea Mays
acacacactcactcactcgtacgccgtcgcttcctgcggtacgcactctctgtccgctgcgttcctccagctagcaactggccatcggggctgctatagcagagtaagtggcgatggctccagctcatgataggctccgccgcctggtgctgctcctcgtcgttgccaccgcggcggcggctttgcttctggcgccgacgacggcggatgctgcgctgccgcgggtgcagcacacgcccaccaaggccgacgggtcgctcgccatcctcgtcgtcggcgactggggccgccgtggtggggcagaagctggacatcgacttcgtcatctccaccggcgacaacatctacgacgacggcatcgccaacaccagcgaccccctcttcaaggaatcgttctccaatatctacactgccaacagccttcagaagccttggtacctggtccttggtaaccatgactacacgggaaacgcgctcgcgcagctcgaccctgccattcgcaaagtggatagccggtacaccgccattgccaagtccttcattgtcaactcagggattgcggattttttcctcgtcgacacaacgccgttcattgtccactactggaacaacaccaagttcgattggagaggcgtcgctcctcgagacacctacatcgcgaatctcctcaaggacttgaagtgtgcactgacagcgtccaaggctccctggaagatcgtcgtgggtcaccaccccatcagcagcgcctgcgggcatgggaacaacactgagctggaggagttgcttctcccggtcctgactacacacggggttgacatgtacttgaatggccatgaccactgcctgcagcgcgtcagcagcagagacagtcgtcttcagctattaaccagcggcggcgggtccaaggcatgggctggcaagttcaagcccaccctcgacaaggtggagttcctctacgacggccaggggttcatgtcgatgcgcctgagcaggacggaggcccgcctcgcgttcttcgacgtcgctggcagcgtcctgcactgctggaccatgcatgcccaaaaattaacgacgacgacgactgctgctgcagctaggcactaaagctttgctgggtacgatgagttgatgatgcaattaattatttggttttgtcgtcttttcgtgcgtgagagggaagcaataataattaattgctgctgcttctgttgttgtgtgcacatgcatgtgagggtgtcaagtatgttcagcctcttgcaagataaaatctctcgtcttctgtggaataaactgggaaaaaagtttttttttgtaaagtatgcaggag

SEQ ID NO: 41709 - DNA, 1368 bp, Zea Mays
acacacactcactcactcgtacgccgtcgcttcctgcggtacgcactctctgtccgctgcgttcctccagctagcaactggccatcggggctgctatagcagagtaagtggcgatggctccagctcatgataggctccgccgcctggtgctgctcctcgtcgttgccaccgcggcggcggctttgcttctggcgccgacgacggcggatgctgcgctgccgcgggtgcagcacacgcccaccaaggccgacgggtcgctcgccatcctcgtcgtcggcgactggggccgccgtggacagttcaaccagaccttggttgcccagcagatgggcgtggtggggcagaagctggacatcgacttcgtcatctccaccggcgacaacatctacgacgacggcatcgccaacaccagcgaccccctcttcaaggaatcgttctccaatatctacactgccaacagccttcagaagccttggtacctggtccttggtaaccatgactacacgggaaacgcgctcgcgcagctcgaccctgccattcgcaaagtggatagccggtacaccgccattgccaagtccttcattgtcaactcagggattgcggattttttcctcgtcgacacaacgccgttcattgtccactactggaacaacaccaagttcgattggagaggcgtcgctcctcgagacacctacatcgcgaatctcctcaaggacttgaagtgtgcactgacagcgtccaaggctccctggaagatcgtcgtgggtcaccaccccatcagcagcgcctgcgggcatgggaacaacactgagctggaggagttgcttctcccggtcctgactacacacggggttgacatgtacttgaatggccatgaccactgcctgcagcgcgtcagcagcagagacagtcgtcttcagctattaaccagcggcggcgggtccaaggcatgggctggcaagttcaagcccaccctcgacaaggtggagttcctctacgacggccaggggttcatgtcgatgcgcctgagcaggacggaggcccgcctcgcgttcttcgacgtcgctggcagcgtcctgcactgctggaccatgcatgcccaaaaattaacgacgacgacgactgctgctgcagctaggcactaaagctttgctgggtacgatgagttgatgatgcaattaattatttggttttgtcgtcttttcgtgcgtgagagggaagcaataataattaattgctgctgcttctgttgttgtgtgcacatgcatgtgagggtgtcaagtatgttcagcctcttgcaagataaaatctctcgtcttctgtggaataaactgggaaaaaagtttttttttgtaaagtatgcaggag

SEQ ID NO: 41710 - DNA, 1551 bp, Zea Mays
cgcgcccctccattattgtcccgtgacctcactagtcagcccacgcctcgtggatcttactcttgcgtcgaccgaccccgagaaccttgccgccagtgagatcccagctggccaaacacagccaacctcctaaccgacctctggcagccataaaaggttgcgccgaagccctgccttcccttttccttcgccgcacaccaatagccattgcccaaatctgcgagggagagattgaagacgccgccgtgtgagagcaaggcgtctaagcgagtctcccgggttcaccgacaaattcatttcgttgaagcatcgcagtgtgccctgtggatccgtaaaagccagctcggggaccttctgaggccggtgtcaccccgctcgcggcatattgctcatcagagcaaatctacgctgtgaacctgccgcaccgagattcagctcggccttatcacaacctcaactctgacgagcaagtgaccgaggagcccggagcacagcaggttgaagatactaaacaggagctcgctgaaggtgaagagcaggtgccaccggaggaggactactacgacaagttcgatgaggtctaggtgtcgtctcccagtcagcatgatggcgccaagggatgataatattattattttgctttatttattatcagttattttttaagacatttttgttatgtaataaagttggtgacatttgtctctatacactgagtcattatatgtgttgatcttaaatctgggtttgccccttaaatctgggtgtgacagtgcgcgatggcggtggaccccgggatgcgtgcgacggcggcaccatgcgtggcggcgacgacaattccttgatccagaggcacgacggtggtagctctccgatccgaaggcatggcgataccggctctccgatctggtggtgcagcgactgtggctcgcagatccggtggcgcgatgtcggttcctcgacccggaggcacaacgacagcggctccctaatccgaaggcacgacaccggtggcttcccggaggtggctccccagaggcgtgtgcggggttcaccatccgcaccacgggccccgtgacatcctccaatcctgcgcatttcgagtatcctccggcgacagtctcctccaacccgacgactttggggtatcctccagcgatggagctcatcagatccatgtttatgcctccatggttgctttttatgccaaccactgcagtactttagatattccattagatgattttatgatgatgaatatggcgtctctaacttgtatttttatgttaatagcatttacactatatttgccattattttacgctcaaacttgatgattttttcgatcataaattcaacacatttgagttattaactgctctcacgttggttcgatatttacaataaaaatgaggattttacactaaaagttataggattttatgcaaatctggggtgcgccaccaatgtcccgcatgcatatcttctgtgtgcgcagtgaaaaggaaactccttaatttatggtgtatgtacctaccataaaaaatcaaa

SEQ ID NO: 41711 - DNA, 2654 bp, Zea Mays
aactaattttagcggttaactactagttagctactgaagattccaaaaccaaccccccatccacgccgcgatgctccgccgccgccgggcaccgctcctcctggccgccgccgccgcgggcgccgcgctggctgccacctctccctccggcgaaaatggtcgaagcgtcgcctccgcgctccaccaaggcatcgctcgctcctcccgttccgtctacacggttcgccctcccgtatctgttgctattactcctgagtttcggatgctgcttttgctcgattttctagccgttggctgtcgcagattggttttgtgatggcagattacaagtattcgctgaggggtctggatgctggatcggcggattaccgtgttaagctctccaaggttcatctgcggtcagcaaaaaaactacttaaactatgtgaagtgaatggagggttttatgtcaaagctggtcaatatgtatcttcactaagacaagtgccaaaggagtactcatcaactctctcctgcctgcaagaccaggcaactccatccaagtttcaagatattaaagcagtaatagagcagaactttggcaaggaattgtatgacatgttcaatatcctggattggagcagcgaatgaagatagacattatgacaatgtcattcttgtcaaaaatggtctcttgggtatgaacaccaacattttgtttcctttttattgtgcaatgcaaagaagagcacgacttggtgcagtggtgagtgcatggtttttaaagcggtaaggcggtccaaggcgttggagcaccgcctggacgcctaggcgaggtaggcgggcaaggcgcctaggcgttagaccaccacccggacgcctaggcgacgccttaagaacagaggttgagtggtcttactgagtcaggccgtgggttcgaagcagcctctccgcatttacgggggaaggcttaccttggtttcctttctccagaccccactcatgtaggagcctccggcactaggtctgcccttcttttattgtgaaatgctaataatttgccagtcagtacatctaattcatcatagactgtatatgtagcagaatggaagtcaccataagtcgactgctttgagcaagcaggacttggtgtgatggtacccactgtaccatcatgttgtctattgtgttattgttgtaatttgtagggcatgctttcatgattgttgtactaattaatttttttaccaatcaaaacatttacgtgaatcacctcctgttctagcatagtttcataatgttcttttggctggcacaatgctttatctttttctgtgcaggtttttcctgattataaatttgacagaatactaattgaatttgagaaatccatgacaatggagcttgattttacgcgggaggctaagaattctgagagaacagccagctgcttcaggaaaaatagtgttgttaaagtgccttatgtgttctggcaacttacaaccagggaggttttgacgatggagttttgttatggacacaaggttaacgacttggacttcctgcggaaaacagatattagccctacaaaggtagctaaggctttgattgaactctttggtgaaatgatatttgtacatggttttgttcacggtgatccacatcctggaaatatattagtttctcctgaaggccatgggaaattttcactagttctgttggatcatggaatttatagagaattggaccaaaagttcagattggactattgtcggctatggaaagcactgatattgttggattcaaacaaaattctggaattaggcgaacagtttggcgttggcaaatatgcgaagtactttcctgtaatattcacagggagaactatagaaagcaagtcagctcttggcacacaaatgtctggtgaagagcagaggcgtctgaaggaggacttaaactctcttgggatggatgatatatcttcatttatggaatccttgccaccggacttctatgtcatactacgaacagacggactattgaggtccattttagggaatcttggggcaccacgccatgttcggcttctcacttatgcaagatgtgctatacacggtcttgagaagcagcacaaaatggagtctgatgttcaattgtgttcaggtgcaatcagacgtatgttcttgaatgtcaaaacaaatgtcagctatctccgtctgagagtgattattgaaatagcggtattattagctaaagcaaatggtgccaagcagaaagtcgtgaacaaactcagacagatgttacaggagaccagtcaaggttttcaccgccgtatgtgatgcccagaagtcagcgacgtggtgaaattaaggctacgagaaaggtgggggaagttggaagtacgtcaggactccggagtagaatcataactgtgattgttctgtttcaacttgtaaattggaggttgtattgtgtcaaggagtccaatcataactgtgagtgctctgttgtaacttgtaaattctacttctacgtcgagtctgcgctcgagagtccaggtgttttttttttgttggaccaagtacgcatcccaaaataagtctacatcccaaaattcgaggagtcaaacaaatcttaatttgaagtttgcctaaatttataaaattggtattaac

SEQ ID NO: 41712 - DNA, 2578 bp, Zea Mays
aactaattttagcggttaactactagttagctactgaagattccaaaaccaaccccccatccacgccgcgatgctccgccgccgccgggcaccgctcctcctggccgccgccgccgcgggcgccgcgctggctgccacctctccctccggcgaaaatggtcgaagcgtcgcctccgcgctccaccaaggcatcgctcgctcctcccgttccgtctacacggttcgccctcccgtatctgttgctattactcctgagtttcggatgctgcttttgctcgattttctagccgttggctgtcgcagattggttttgtgatggcagattacaagtattcgctgaggggtctggatgctggatcggcggattaccgtgttaagctctccaaggttcatctgcggtcagcaaaaaaactacttaaactatgtgaagtgaatggagggttttatgtcaaagctggtcaatatgtatcttcactaagacaagtgccaaaggagtactcatcaactctctcctgcctgcaagaccaggcaactccatccaagtttcaagatattaaagcagtaatagagcagaactttggcaaggaattgtatgacatgttcatcgaggtcgattgcataacaatcaagatgtagctgtcaaggttcaatatcctggattggagcagcgaatgaagatagacattatgacaatgtcattcttgtcaaaaatggtctcttgggtatgaacaccaacattttgtttcctttttattgtgcaatgcaaagaagagcacgacttggtgcagtggtgagtgcatggtttttaaagcggtaaggcggtccaaggcgttggagcaccgcctggacgcctaggcgaggtaggcgggcaaggcgcctaggcgttagaccaccacccggacgcctaggcgacgccttaagaacagaggttgagtggtcttactgagtcaggccgtgggttcgaagcagcctctccgcatttacgggggaaggcttaccttggtttcctttctccagaccccactcatgtaggagcctccggcactaggtctgcccttcttttattgtgaaatgctaataatttgccagtcagtacatctaattcatcatagactgtatatgtagcagaatggaagtcaccataagtcgactgctttgagcaagcaggacttggtgtgatggtacccactgtaccatcatgttgtctattgtgttattgttgtaatttgtagggcatgctttcatgattgttgtactaattaatttttttaccaatcaaaacatttacgtgaatcacctcctgttctagcatagtttcataatgttcttttggctggcacaatgctttatctttttctgtgcaggtttttcctgattataaatttgacagaatactaattgaatttgagaaatccatgacaatggagcttgattttacgcgggaggctaagaattctgagagaacagccagctgcttcaggaaaaatagtgttgttaaagtgccttatgtgttctggcaacttacaaccagggaggttttgacgatggagttttgttatggacacaaggttaacgacttggacttcctgcggaaaacagatattagccctacaaagttctgttggatcatggaatttatagagaattggaccaaaagttcagattggactattgtcggctatggaaagcactgatattgttggattcaaacaaaattctggaattaggcgaacagtttggcgttggcaaatatgcgaagtactttcctgtaatattcacagggagaactatagaaagcaagtcagctcttggcacacaaatgtctggtgaagagcagaggcgtctgaaggaggacttaaactctcttgggatggatgatatatcttcatttatggaatccttgccaccggacttctatgtcatactacgaacagacggactattgaggtccattttagggaatcttggggcaccacgccatgttcggcttctcacttatgcaagatgtgctatacacggtcttgagaagcagcacaaaatggagtctgatgttcaattgtgttcaggtgcaatcagacgtatgttcttgaatgtcaaaacaaatgtcagctatctccgtctgagagtgattattgaaatagcggtattattagctaaagcaaatggtgccaagcagaaagtcgtgaacaaactcagacagatgttacaggagaccagtcaaggttttcaccgccgtatgtgatgcccagaagtcagcgacgtggtgaaattaaggctacgagaaaggtgggggaagttggaagtacgtcaggactccggagtagaatcataactgtgattgttctgtttcaacttgtaaattggaggttgtattgtgtcaaggagtccaatcataactgtgagtgctctgttgtaacttgtaaattctacttctacgtcgagtctgcgctcgagagtccaggtgttttttttttgttggaccaagtacgcatcccaaaataagtctacatcccaaaattcgaggagtcaaacaaatcttaatttgaagtttgcctaaatttataaaattggtattaac

SEQ ID NO: 41713 - DNA, 2012 bp, Zea Mays
aactaattttagcggttaactactagttagctactgaagattccaaaaccaaccccccatccacgccgcgatgctccgccgccgccgggcaccgctcctcctggccgccgccgccgcgggcgccgcgctggctgccacctctccctccggcgaaaatggtcgaagcgtcgcctccgcgctccaccaaggcatcgctcgctcctcccgttccgtctacacggttcgccctcccgtatctgttgctattactcctgagtttcggatgctgcttttgctcgattttctagccgttggctgtcgcagattggttttgtgatggcagattacaagtattcgctgaggggtctggatgctggatcggcggattaccgtgttaagctctccaaggttcatctgcggtcagcaaaaaaactacttaaactatgtgaagtgaatggagggttttatgtcaaagctggtcaatatgtatcttcactaagacaagtgccaaaggagtactcatcaactctctcctgcctgcaagaccaggcaactccatccaagtttcaagatattaaagcagtaatagagcagaactttggcaaggaattgtatgacatgttcaatatcctggattggagcagcgaatgaagatagacattatgacaatgtcattcttgtcaaaaatggtctcttgggtttttcctgattataaatttgacagaatactaattgaatttgagaaatccatgacaatggagcttgattttacgcgggaggctaagaattctgagagaacagccagctgcttcaggaaaaatagtgttgttaaagtgccttatgtgttctggcaacttacaaccagggaggttttgacgatggagttttgttatggacacaaggttaacgacttggacttcctgcggaaaacagatattagccctacaaaggtagctaaggctttgattgaactctttggtgaaatgatatttgtacatggttttgttcacggtgatccacatcctggaaatatattagtttctcctgaaggccatgggaaattttcactagttctgttggatcatggaatttatagagaattggaccaaaagttcagattggactattgtcggctatggaaagcactgatattgttggattcaaacaaaattctggaattaggcgaacagtttggcgttggcaaatatgcgaagtactttcctgtaatattcacagggagaactatagaaagcaagtcagctcttggcacacaaatgtctggtgaagagcagaggcgtctgaaggaggacttaaactctcttgggatggatgatatatcttcatttatggaatccttgccaccggacttctatgtcatactacgaacagacggactattgaggtccattttagggaatcttggggcaccacgccatgttcggcttctcacttatgcaagatgtgctatacacggtcttgagaagcagcacaaaatggagtctgatgttcaattgtgttcaggtgcaatcagacgtatgttcttgaatgtcaaaacaaatgtcagctatctccgtctgagagtgattattgaaatagcggtattattagctaaagcaaatggtgccaagcagaaagtcgtgaacaaactcagacagatgttacaggagaccagtcaaggttttcaccgccgtatgtgatgcccagaagtcagcgacgtggtgaaattaaggctacgagaaaggtgggggaagttggaagtacgtcaggactccggagtagaatcataactgtgattgttctgtttcaacttgtaaattggaggttgtattgtgtcaaggagtccaatcataactgtgagtgctctgttgtaacttgtaaattctacttctacgtcgagtctgcgctcgagagtccaggtgttttttttttgttggaccaagtacgcatcccaaaataagtctacatcccaaaattcgaggagtcaaacaaatcttaatttgaagtttgcctaaatttataaaattggtattaac

SEQ ID NO: 41714 - DNA, 1994 bp, Zea Mays
aactaattttagcggttaactactagttagctactgaagattccaaaaccaaccccccatccacgccgcgatgctccgccgccgccgggcaccgctcctcctggccgccgccgccgcgggcgccgcgctggctgccacctctccctccggcgaaaatggtcgaagcgtcgcctccgcgctccaccaaggcatcgctcgctcctcccgttccgtctacacggttcgccctcccgtatctgttgctattactcctgagtttcggatgctgcttttgctcgattttctagccgttggctgtcgcagattggttttgtgatggcagattacaagtattcgctgaggggtctggatgctggatcggcggattaccgtgttaagctctccaaggttcatctgcggtcagcaaaaaaactacttaaactatgtgaagtgaatggagggttttatgtcaaagctggtcaatatgtatcttcactaagacaagtgccaaaggagtactcatcaactctctcctgcctgcaagaccaggcaactccatccaagtttcaagatattaaagcagtaatagagcagaactttggcaaggaattgtatgacatgttcaatatcctggattggagcagcgaatgaagatagacattatgacaatgtcattcttgtcaaaaatggtctcttgggtttttcctgattataaatttgacagaatactaattgaatttgagaaatccatgacaatggagcttgattttacgcgggaggctaagaattctgagagaacagccagctgcttcaggaaaaatagtgttgttaaagtgccttatgtgttctggcaacttacaaccagggaggttttgacgatggagttttgttatggacacaaggttaacgacttggacttcctgcggaaaacagatattagccctacaaaggtagctaaggctttgattgaactctttggtgaaatgatatttgtacatggttttgttcacggtgatccacatcctggaaatatattagtttctcctgaaggccatgggaaattttcactagttctgttggatcatggaatttatagagaattggaccaaaagttcagattggactattgtcggctatggaaagcactgatattgttggattcaaacaaaattctggaattaggcgaacagtttggcgttggcaaatatgcgaagtactttcctgtaatattcacagggagaactatagaaagcaagtcagctcttggcacacaaatgtctggtgaagagcagaggcgtctgaaggaggacttaaactctcttgggatggatgatatatcttcatttatggaatccttgccaccggacttctatgtcatactacgaacagacggactattgaggtccattttagggaatcttggggcaccacgccatgttcggcttctcacttatgcaagatgtgctatacacggtcttgagaagcagcacaaaatggagtctggtgcaatcagacgtatgttcttgaatgtcaaaacaaatgtcagctatctccgtctgagagtgattattgaaatagcggtattattagctaaagcaaatggtgccaagcagaaagtcgtgaacaaactcagacagatgttacaggagaccagtcaaggttttcaccgccgtatgtgatgcccagaagtcagcgacgtggtgaaattaaggctacgagaaaggtgggggaagttggaagtacgtcaggactccggagtagaatcataactgtgattgttctgtttcaacttgtaaattggaggttgtattgtgtcaaggagtccaatcataactgtgagtgctctgttgtaacttgtaaattctacttctacgtcgagtctgcgctcgagagtccaggtgttttttttttgttggaccaagtacgcatcccaaaataagtctacatcccaaaattcgaggagtcaaacaaatcttaatttgaagtttgcctaaatttataaaattggtattaac

SEQ ID NO: 41715 - DNA, 1997 bp, Zea Mays
aactaattttagcggttaactactagttagctactgaagattccaaaaccaaccccccatccacgccgcgatgctccgccgccgccgggcaccgctcctcctggccgccgccgccgcgggcgccgcgctggctgccacctctccctccggcgaaaatggtcgaagcgtcgcctccgcgctccaccaaggcatcgctcgctcctcccgttccgtctacacgattggttttgtgatggcagattacaagtattcgctgaggggtctggatgctggatcggcggattaccgtgttaagctctccaaggttcatctgcggtcagcaaaaaaactacttaaactatgtgaagtgaatggagggttttatgtcaaagctggtcaatatgtatcttcactaagacaagtgccaaaggagtactcatcaactctctcctgcctgcaagaccaggcaactccatccaagtttcaagatattaaagcagtaatagagcagaactttggcaaggaattgtatgacatattcctggaatttgacgaacatccgattgctgctgcatcaattgctcaggttcatcgaggtcgattgcataacaatcaagatgtagctgtcaaggttcaatatcctggattggagcagcgaatgaagatagacattatgacaatgtcattcttgtcaaaaatggtctcttggaatactaattgaatttgagaaatccatgacaatggagcttgattttacgcgggaggctaagaattctgagagaacagccagctgcttcaggaaaaatagtgttgttaaagtgccttatgtgttctggcaacttacaaccagggaggttttgacgatggagttttgttatggacacaaggttaacgacttggacttcctgcggaaaacagatattagccctacaaaggtagctaaggctttgattgaactctttggtgaaatgatatttgtacatggttttgttcacggtgatccacatcctggaaatatattagtttctcctgaaggccatgggaaattttcactagttctgttggatcatggaatttatagagaattggaccaaaagttcagattggactattgtcggctatggaaagcactgatattgttggattcaaacaaaattctggaattaggcgaacagtttggcgttggcaaatatgcgaagtactttcctgtaatattcacagggagaactatagaaagcaagtcagctcttggcacacaaatgtctggtgaagagcagaggcgtctgaaggaggacttaaactctcttgggatggatgatatatcttcatttatggaatccttgccaccggacttctatgtcatactacgaacagacggactattgaggtccattttagggaatcttggggcaccacgccatgttcggcttctcacttatgcaagatgtgctatacacggtcttgagaagcagcacaaaatggagtctgatgttcaattgtgttcaggtgcaatcagacgtatgttcttgaatgtcaaaacaaatgtcagctatctccgtctgagagtgattattgaaatagcggtattattagctaaagcaaatggtgccaagcagaaagtcgtgaacaaactcagacagatgttacaggagaccagtcaaggttttcaccgccgtatgtgatgcccagaagtcagcgacgtggtgaaattaaggctacgagaaaggtgggggaagttggaagtacgtcaggactccggagtagaatcataactgtgattgttctgtttcaacttgtaaattggaggttgtattgtgtcaaggagtccaatcataactgtgagtgctctgttgtaacttgtaaattctacttctacgtcgagtctgcgctcgagagtccaggtgttttttttttgttggaccaagtacgcatcccaaaataagtctacatcccaaaattcgaggagtcaaacaaatcttaatttgaagtttgcctaaatttataaaattggtattaac

SEQ ID NO: 41716 - DNA, 2592 bp, Zea Mays
aactaattttagcggttaactactagttagctactgaagattccaaaaccaaccccccatccacgccgcgatgctccgccgccgccgggcaccgctcctcctggccgccgccgccgcgggcgccgcgctggctgccacctctccctccggcgaaaatggtcgaagcgtcgcctccgcgctccaccaaggcatcgctcgctcctcccgttccgtctacacgattggttttgtgatggcagattacaagtattcgctgaggggtctggatgctggatcggcggattaccgtgttaagctctccaaggttcatctgcggtcagcaaaaaaactacttaaactatgtgaagtgaatggagggttttatgtcaaagctggtcaatatgtatcttcactaagacaagtgccaaaggagtactcatcaactctctcctgcctgcaagaccaggcaactccatccaagtttcaagatattaaagcagtaatagagcagaactttggcaaggaattgtatgacatgttcatcgaggtcgattgcataacaatcaagatgtagctgtcaaggttcaatatcctggattggagcagcgaatgaagatagacattatgacaatgtcattcttgtcaaaaatggtctcttgggtatgaacaccaacattttgtttcctttttattgtgcaatgcaaagaagagcacgacttggtgcagtggtgagtgcatggtttttaaagcggtaaggcggtccaaggcgttggagcaccgcctggacgcctaggcgaggtaggcgggcaaggcgcctaggcgttagaccaccacccggacgcctaggcgacgccttaagaacagaggttgagtggtcttactgagtcaggccgtgggttcgaagcagcctctccgcatttacgggggaaggcttaccttggtttcctttctccagaccccactcatgtaggagcctccggcactaggtctgcccttcttttattgtgaaatgctaataatttgccagtcagtacatctaattcatcatagactgtatatgtagcagaatggaagtcaccataagtcgactgctttgagcaagcaggacttggtgtgatggtacccactgtaccatcatgttgtctattgtgttattgttgtaatttgtagggcatgctttcatgattgttgtactaattaatttttttaccaatcaaaacatttacgtgaatcacctcctgttctagcatagtttcataatgttcttttggctggcacaatgctttatctttttctgtgcaggtttttcctgattataaatttgacagaatactaattgaatttgagaaatccatgacaatggagcttgattttacgcgggaggctaagaattctgagagaacagccagctgcttcaggaaaaatagtgttgttaaagtgccttatgtgttctggcaacttacaaccagggaggttttgacgatggagttttgttatggacacaaggttaacgacttggacttcctgcggaaaacagatattagccctacaaaggtagctaaggctttgattgaactctttggtgaaatgatatttgtacatggttttgttcacggtgatccacatcctggaaatatattagtttctcctgaaggccatgggaaattttcactagttctgttggatcatggaatttatagagaattggaccaaaagttcagattggactattgtcggctatggaaagcactgatattgttggattcaaacaaaattctggaattaggcgaacagtttggcgttggcaaatatgcgaagtactttcctgtaatattcacagggagaactatagaaagcaagtcagctcttggcacacaaatgtctggtgaagagcagaggcgtctgaaggaggacttaaactctcttgggatggatgatatatcttcatttatggaatccttgccaccggacttctatgtcatactacgaacagacggactattgaggtccattttagggaatcttggggcaccacgccatgttcggcttctcacttatgcaagatgtgctatacacggtcttgagaagcagcacaaaatggagtctggtgcaatcagacgtatgttcttgaatgtcaaaacaaatgtcagctatctccgtctgagagtgattattgcggtattattagctaaagcaaatggtgccaagcagaaagtcgtgaacaaactcagacagatgttacaggagaccagtcaaggttttcaccgccgtatgtgatgcccagaagtcagcgacgtggtgaaattaaggctacgagaaaggtgggggaagttggaagtacgtcaggactccggagtagaatcataactgtgattgttctgtttcaacttgtaaattggaggttgtattgtgtcaaggagtccaatcataactgtgagtgctctgttgtaacttgtaaattctacttctacgtcgagtctgcgctcgagagtccaggtgttttttttttgttggaccaagtacgcatcccaaaataagtctacatcccaaaattcgaggagtcaaacaaatcttaatttgaagtttgcctaaatttataaaattggtattaac

SEQ ID NO: 41717 - DNA, 2665 bp, Zea Mays
aactaattttagcggttaactactagttagctactgaagattccaaaaccaaccccccatccacgccgcgatgctccgccgccgccgggcaccgctcctcctggccgccgccgccgcgggcgccgcgctggctgccacctctccctccggcgaaaatggtcgaagcgtcgcctccgcgctccaccaaggcatcgctcgctcctcccgttccgtctacacgattggttttgtgatggcagattacaagtattcgctgaggggtctggatgctggatcggcggattaccgtgttaagctctccaaggttcatctgcggtcagcaaaaaaactacttaaactatgtgaagtgaatggagggttttatgtcaaagctggtcaatatgtatcttcactaagacaagtgccaaaggagtactcatcaactctctcctgcctgcaagaccaggcaactccatccaagtttcaagatattaaagcagtaatagagcagaactttggcaaggaattgtatgacatattcctggaatttgacgaacatccgattgctgctgcatcaattgctcaggttcatcgaggtcgattgcataacaatcaagatgtagctgtcaaggttcaatatcctggattggagcagcgaatgaagatagacattatgacaatgtcattcttgtcaaaaatggtctcttgggtatgaacaccaacattttgtttcctttttattgtgcaatgcaaagaagagcacgacttggtgcagtggtgagtgcatggtttttaaagcggtaaggcggtccaaggcgttggagcaccgcctggacgcctaggcgaggtaggcgggcaaggcgcctaggcgttagaccaccacccggacgcctaggcgacgccttaagaacagaggttgagtggtcttactgagtcaggccgtgggttcgaagcagcctctccgcatttacgggggaaggcttaccttggtttcctttctccagaccccactcatgtaggagcctccggcactaggtctgcccttcttttattgtgaaatgctaataatttgccagtcagtacatctaattcatcatagactgtatatgtagcagaatggaagtcaccataagtcgactgctttgagcaagcaggacttggtgtgatggtacccactgtaccatcatgttgtctattgtgttattgttgtaatttgtagggcatgctttcatgattgttgtactaattaatttttttaccaatcaaaacatttacgtgaatcacctcctgttctagcatagtttcataatgttcttttggctggcacaatgctttatctttttctgtgcaggtttttcctgattataaatttgacagaatactaattgaatttgagaaatccatgacaatggagcttgattttacgcgggaggctaagaattctgagagaacagccagctgcttcaggaaaaatagtgttgttaaagtgccttatgtgttctggcaacttacaaccagggaggttttgacgatggagttttgttatggacacaaggttaacgacttggacttcctgcggaaaacagatattagccctacaaaggtagctaaggctttgattgaactctttggtgaaatgatatttgtacatggttttgttcacggtgatccacatcctggaaatatattagtttctcctgaaggccatgggaaattttcactagttctgttggatcatggaatttatagagaattggaccaaaagttcagattggactattgtcggctatggaaagcactgatattgttggattcaaacaaaattctggaattaggcgaacagtttggcgttggcaaatatgcgaagtactttcctgtaatattcacagggagaactatagaaagcaagtcagctcttggcacacaaatgtctggtgaagagcagaggcgtctgaaggaggacttaaactctcttgggatggatgatatatcttcatttatggaatccttgccaccggacttctatgtcatactacgaacagacggactattgaggtccattttagggaatcttggggcaccacgccatgttcggcttctcacttatgcaagatgtgctatacacggtcttgagaagcagcacaaaatggagtctgatgttcaattgtgttcaggtgcaatcagacgtatgttcttgaatgtcaaaacaaatgtcagctatctccgtctgagagtgattattgaaatagcggtattattagctaaagcaaatggtgccaagcagaaagtcgtgaacaaactcagacagatgttacaggagaccagtcaaggttttcaccgccgtatgtgatgcccagaagtcagcgacgtggtgaaattaaggctacgagaaaggtgggggaagttggaagtacgtcaggactccggagtagaatcataactgtgattgttctgtttcaacttgtaaattggaggttgtattgtgtcaaggagtccaatcataactgtgagtgctctgttgtaacttgtaaattctacttctacgtcgagtctgcgctcgagagtccaggtgttttttttttgttggaccaagtacgcatcccaaaataagtctacatcccaaaattcgaggagtcaaacaaatcttaatttgaagtttgcctaaatttataaaattggtattaac

SEQ ID NO: 41718 - DNA, 2699 bp, Zea Mays
aactaattttagcggttaactactagttagctactgaagattccaaaaccaaccccccatccacgccgcgatgctccgccgccgccgggcaccgctcctcctggccgccgccgccgcgggcgccgcgctggctgccacctctccctccggcgaaaatggtcgaagcgtcgcctccgcgctccaccaaggcatcgctcgctcctcccgttccgtctacacggttcgccctcccgtatctgttgctattactcctgagtttcggatgctgcttttgctcgattttctagccgttggctgtcgcagattggttttgtgatggcagattacaagtattcgctgaggggtctggatgctggatcggcggattaccgtgttaagctctccaaggttcatctgcggtcagcaaaaaaactacttaaactatgtgaagtgaatggagggttttatgtcaaagctggtcaatatgtatcttcactaagacaagtgccaaaggagtactcatcaactctctcctgcctgcaagaccaggcaactccatccaagtttcaagatattaaagcagtaatagagcagaactttggcaaggaattgtatgacatgttcatcgaggtcgattgcataacaatcaagatgtagctgtcaaggttcaatatcctggattggagcagcgaatgaagatagacattatgacaatgtcattcttgtcaaaaatggtctcttgggtatgaacaccaacattttgtttcctttttattgtgcaatgcaaagaagagcacgacttggtgcagtggtgagtgcatggtttttaaagcggtaaggcggtccaaggcgttggagcaccgcctggacgcctaggcgaggtaggcgggcaaggcgcctaggcgttagaccaccacccggacgcctaggcgacgccttaagaacagaggttgagtggtcttactgagtcaggccgtgggttcgaagcagcctctccgcatttacgggggaaggcttaccttggtttcctttctccagaccccactcatgtaggagcctccggcactaggtctgcccttcttttattgtgaaatgctaataatttgccagtcagtacatctaattcatcatagactgtatatgtagcagaatggaagtcaccataagtcgactgctttgagcaagcaggacttggtgtgatggtacccactgtaccatcatgttgtctattgtgttattgttgtaatttgtagggcatgctttcatgattgttgtactaattaatttttttaccaatcaaaacatttacgtgaatcacctcctgttctagcatagtttcataatgttcttttggctggcacaatgctttatctttttctgtgcaggtttttcctgattataaatttgacagaatactaattgaatttgagaaatccatgacaatggagcttgattttacgcgggaggctaagaattctgagagaacagccagctgcttcaggaaaaatagtgttgttaaagtgccttatgtgttctggcaacttacaaccagggaggttttgacgatggagttttgttatggacacaaggttaacgacttggacttcctgcggaaaacagatattagccctacaaaggtagctaaggctttgattgaactctttggtgaaatgatatttgtacatggttttgttcacggtgatccacatcctggaaatatattagtttctcctgaaggccatgggaaattttcactagttctgttggatcatggaatttatagagaattggaccaaaagttcagattggactattgtcggctatggaaagcactgatattgttggattcaaacaaaattctggaattaggcgaacagtttggcgttggcaaatatgcgaagtactttcctgtaatattcacagggagaactatagaaagcaagtcagctcttggcacacaaatgtctggtgaagagcagaggcgtctgaaggaggacttaaactctcttgggatggatgatatatcttcatttatggaatccttgccaccggacttctatgtcatactacgaacagacggactattgaggtccattttagggaatcttggggcaccacgccatgttcggcttctcacttatgcaagatgtgctatacacggtcttgagaagcagcacaaaatggagtctgatgttcaattgtgttcaggtgcaatcagacgtatgttcttgaatgtcaaaacaaatgtcagctatctccgtctgagagtgattattgaaatagcggtattattagctaaagcaaatggtgccaagcagaaagtcgtgaacaaactcagacagatgttacaggagaccagtcaaggttttcaccgccgtatgtgatgcccagaagtcagcgacgtggtgaaattaaggctacgagaaaggtgggggaagttggaagtacgtcaggactccggagtagaatcataactgtgattgttctgtttcaacttgtaaattggaggttgtattgtgtcaaggagtccaatcataactgtgagtgctctgttgtaacttgtaaattctacttctacgtcgagtctgcgctcgagagtccaggtgttttttttttgttggaccaagtacgcatcccaaaataagtctacatcccaaaattcgaggagtcaaacaaatcttaatttgaagtttgcctaaatttataaaattggtattaac

SEQ ID NO: 41719 - DNA, 1833 bp, Zea Mays
aactaattttagcggttaactactagttagctactgaagattccaaaaccaaccccccatccacgccgcgatgctccgccgccgccgggcaccgctcctcctggccgccgccgccgcgggcgccgcgctggctgccacctctccctccggcgaaaatggtcgaagcgtcgcctccgcgctccaccaaggcatcgctcgctcctcccgttccgtctacacgattggttttgtgatggcagattacaagtattcgctgaggggtctggatgctggatcggcggattaccgtgttaagctctccaaggttcatctgcggtcagcaaaaaaactacttaaactatgtgaagtgaatggagggttttatgtcaaagctggtcaatatgtatcttcactaagacaagtgccaaaggagtactcatcaactctctcctgcctgcaagaccaggcaactccatccaagtttcaagatattaaagcagtaatagagcagaactttggcaaggaattgtatgacatgtttttcctgattataaatttgacagaatactaattgaatttgagaaatccatgacaatggagcttgattttacgcgggaggctaagaattctgagagaacagccagctgcttcaggaaaaatagtgttgttaaagtgccttatgtgttctggcaacttacaaccagggaggttttgacgatggagttttgttatggacacaaggttaacgacttggacttcctgcggaaaacagatattagccctacaaaggtagctaaggctttgattgaactctttggtgaaatgatatttgtacatggttttgttcacggtgatccacatcctggaaatatattagtttctcctgaaggccatgggaaattttcactagttctgttggatcatggaatttatagagaattggaccaaaagttcagattggactattgtcggctatggaaagcactgatattgttggattcaaacaaaattctggaattaggcgaacagtttggcgttggcaaatatgcgaagtactttcctgtaatattcacagggagaactatagaaagcaagtcagctcttggcacacaaatgtctggtgaagagcagaggcgtctgaaggaggacttaaactctcttgggatggatgatatatcttcatttatggaatccttgccaccggacttctatgtcatactacgaacagacggactattgaggtccattttagggaatcttggggcaccacgccatgttcggcttctcacttatgcaagatgtgctatacacggtcttgagaagcagcacaaaatggagtctggtgcaatcagacgtatgttcttgaatgtcaaaacaaatgtcagctatctccgtctgagagtgattattgaaatagcggtattattagctaaagcaaatggtgccaagcagaaagtcgtgaacaaactcagacagatgttacaggagaccagtcaaggttttcaccgccgtatgtgatgcccagaagtcagcgacgtggtgaaattaaggctacgagaaaggtgggggaagttggaagtacgtcaggactccggagtagaatcataactgtgattgttctgtttcaacttgtaaattggaggttgtattgtgtcaaggagtccaatcataactgtgagtgctctgttgtaacttgtaaattctacttctacgtcgagtctgcgctcgagagtccaggtgttttttttttgttggaccaagtacgcatcccaaaataagtctacatcccaaaattcgaggagtcaaacaaatcttaatttgaagtttgcctaaatttataaaattggtattaac

SEQ ID NO: 41720 - DNA, 2598 bp, Zea Mays
aactaattttagcggttaactactagttagctactgaagattccaaaaccaaccccccatccacgccgcgatgctccgccgccgccgggcaccgctcctcctggccgccgccgccgcgggcgccgcgctggctgccacctctccctccggcgaaaatggtcgaagcgtcgcctccgcgctccaccaaggcatcgctcgctcctcccgttccgtctacacgattggttttgtgatggcagattacaagtattcgctgaggggtctggatgctggatcggcggattaccgtgttaagctctccaaggttcatctgcggtcagcaaaaaaactacttaaactatgtgaagtgaatggagggttttatgtcaaagctggtcaatatgtatcttcactaagacaagtgccaaaggagtactcatcaactctctcctgcctgcaagaccaggcaactccatccaagtttcaagatattaaagcagtaatagagcagaactttggcaaggaattgtatgacatgttcatcgaggtcgattgcataacaatcaagatgtagctgtcaaggttcaatatcctggattggagcagcgaatgaagatagacattatgacaatgtcattcttgtcaaaaatggtctcttgggtatgaacaccaacattttgtttcctttttattgtgcaatgcaaagaagagcacgacttggtgcagtggtgagtgcatggtttttaaagcggtaaggcggtccaaggcgttggagcaccgcctggacgcctaggcgaggtaggcgggcaaggcgcctaggcgttagaccaccacccggacgcctaggcgacgccttaagaacagaggttgagtggtcttactgagtcaggccgtgggttcgaagcagcctctccgcatttacgggggaaggcttaccttggtttcctttctccagaccccactcatgtaggagcctccggcactaggtctgcccttcttttattgtgaaatgctaataatttgccagtcagtacatctaattcatcatagactgtatatgtagcagaatggaagtcaccataagtcgactgctttgagcaagcaggacttggtgtgatggtacccactgtaccatcatgttgtctattgtgttattgttgtaatttgtagggcatgctttcatgattgttgtactaattaatttttttaccaatcaaaacatttacgtgaatcacctcctgttctagcatagtttcataatgttcttttggctggcacaatgctttatctttttctgtgcaggtttttcctgattataaatttgacagaatactaattgaatttgagaaatccatgacaatggagcttgattttacgcgggaggctaagaattctgagagaacagccagctgcttcaggaaaaatagtgttgttaaagtgccttatgtgttctggcaacttacaaccagggaggttttgacgatggagttttgttatggacacaaggttaacgacttggacttcctgcggaaaacagatattagccctacaaaggtagctaaggctttgattgaactctttggtgaaatgatatttgtacatggttttgttcacggtgatccacatcctggaaatatattagtttctcctgaaggccatgggaaattttcactagttctgttggatcatggaatttatagagaattggaccaaaagttcagattggactattgtcggctatggaaagcactgatattgttggattcaaacaaaattctggaattaggcgaacagtttggcgttggcaaatatgcgaagtactttcctgtaatattcacagggagaactatagaaagcaagtcagctcttggcacacaaatgtctggtgaagagcagaggcgtctgaaggaggacttaaactctcttgggatggatgatatatcttcatttatggaatccttgccaccggacttctatgtcatactacgaacagacggactattgaggtccattttagggaatcttggggcaccacgccatgttcggcttctcacttatgcaagatgtgctatacacggtcttgagaagcagcacaaaatggagtctggtgcaatcagacgtatgttcttgaatgtcaaaacaaatgtcagctatctccgtctgagagtgattattgaaatagcggtattattagctaaagcaaatggtgccaagcagaaagtcgtgaacaaactcagacagatgttacaggagaccagtcaaggttttcaccgccgtatgtgatgcccagaagtcagcgacgtggtgaaattaaggctacgagaaaggtgggggaagttggaagtacgtcaggactccggagtagaatcataactgtgattgttctgtttcaacttgtaaattggaggttgtattgtgtcaaggagtccaatcataactgtgagtgctctgttgtaacttgtaaattctacttctacgtcgagtctgcgctcgagagtccaggtgttttttttttgttggaccaagtacgcatcccaaaataagtctacatcccaaaattcgaggagtcaaacaaatcttaatttgaagtttgcctaaatttataaaattggtattaac

SEQ ID NO: 41721 - DNA, 2647 bp, Zea Mays
aactaattttagcggttaactactagttagctactgaagattccaaaaccaaccccccatccacgccgcgatgctccgccgccgccgggcaccgctcctcctggccgccgccgccgcgggcgccgcgctggctgccacctctccctccggcgaaaatggtcgaagcgtcgcctccgcgctccaccaaggcatcgctcgctcctcccgttccgtctacacgattggttttgtgatggcagattacaagtattcgctgaggggtctggatgctggatcggcggattaccgtgttaagctctccaaggttcatctgcggtcagcaaaaaaactacttaaactatgtgaagtgaatggagggttttatgtcaaagctggtcaatatgtatcttcactaagacaagtgccaaaggagtactcatcaactctctcctgcctgcaagaccaggcaactccatccaagtttcaagatattaaagcagtaatagagcagaactttggcaaggaattgtatgacatattcctggaatttgacgaacatccgattgctgctgcatcaattgctcaggttcatcgaggtcgattgcataacaatcaagatgtagctgtcaaggttcaatatcctggattggagcagcgaatgaagatagacattatgacaatgtcattcttgtcaaaaatggtctcttgggtatgaacaccaacattttgtttcctttttattgtgcaatgcaaagaagagcacgacttggtgcagtggtgagtgcatggtttttaaagcggtaaggcggtccaaggcgttggagcaccgcctggacgcctaggcgaggtaggcgggcaaggcgcctaggcgttagaccaccacccggacgcctaggcgacgccttaagaacagaggttgagtggtcttactgagtcaggccgtgggttcgaagcagcctctccgcatttacgggggaaggcttaccttggtttcctttctccagaccccactcatgtaggagcctccggcactaggtctgcccttcttttattgtgaaatgctaataatttgccagtcagtacatctaattcatcatagactgtatatgtagcagaatggaagtcaccataagtcgactgctttgagcaagcaggacttggtgtgatggtacccactgtaccatcatgttgtctattgtgttattgttgtaatttgtagggcatgctttcatgattgttgtactaattaatttttttaccaatcaaaacatttacgtgaatcacctcctgttctagcatagtttcataatgttcttttggctggcacaatgctttatctttttctgtgcaggtttttcctgattataaatttgacagaatactaattgaatttgagaaatccatgacaatggagcttgattttacgcgggaggctaagaattctgagagaacagccagctgcttcaggaaaaatagtgttgttaaagtgccttatgtgttctggcaacttacaaccagggaggttttgacgatggagttttgttatggacacaaggttaacgacttggacttcctgcggaaaacagatattagccctacaaaggtagctaaggctttgattgaactctttggtgaaatgatatttgtacatggttttgttcacggtgatccacatcctggaaatatattagtttctcctgaaggccatgggaaattttcactagttctgttggatcatggaatttatagagaattggaccaaaagttcagattggactattgtcggctatggaaagcactgatattgttggattcaaacaaaattctggaattaggcgaacagtttggcgttggcaaatatgcgaagtactttcctgtaatattcacagggagaactatagaaagcaagtcagctcttggcacacaaatgtctggtgaagagcagaggcgtctgaaggaggacttaaactctcttgggatggatgatatatcttcatttatggaatccttgccaccggacttctatgtcatactacgaacagacggactattgaggtccattttagggaatcttggggcaccacgccatgttcggcttctcacttatgcaagatgtgctatacacggtcttgagaagcagcacaaaatggagtctggtgcaatcagacgtatgttcttgaatgtcaaaacaaatgtcagctatctccgtctgagagtgattattgaaatagcggtattattagctaaagcaaatggtgccaagcagaaagtcgtgaacaaactcagacagatgttacaggagaccagtcaaggttttcaccgccgtatgtgatgcccagaagtcagcgacgtggtgaaattaaggctacgagaaaggtgggggaagttggaagtacgtcaggactccggagtagaatcataactgtgattgttctgtttcaacttgtaaattggaggttgtattgtgtcaaggagtccaatcataactgtgagtgctctgttgtaacttgtaaattctacttctacgtcgagtctgcgctcgagagtccaggtgttttttttttgttggaccaagtacgcatcccaaaataagtctacatcccaaaattcgaggagtcaaacaaatcttaatttgaagtttgcctaaatttataaaattggtattaac

SEQ ID NO: 41722 - DNA, 1532 bp, Zea Mays
cccgccgtagggttcaacggacccatccaagtgcccgaaccccatcagcgcatcccttttcgcctgcctgcacacgccgccgccggcaatggccgcctgcgacgacgacgtcgccccgtcaaccgcctccgcctaccttgacccctcttactgggacgcgcggttcgggaaggaggagcactacgagtggttcaaggacttctcgcacttccgccacctcctcgcgccgctcctctccccgtccctctcggtcctcgaggtcgggtgtggcaactcgcggcttggcgaggatctcctgcgggagggcgtcgccggcggaatcacctgcgttgacctgtcccccgtcgccgtccagcggatgcgcgaccgcctcgccgctcttggcaccaaaggcgtggatgctgtggttgcggacatgcttgatctgccgtttgagcatgagagctttgatctcgtcattgaaaagggcaccatggctttagtgttctaaccatagtgctgcatcctggaagataacaagacagttacttttagcaccgttgttcacgtgttaacaagaacaagaggggctggcatctagtgagctcgtgtgcaacaggtcaacatgatgtgttgtttgtggacagtggcgatccatgggaccccaatcctacaacagtggaaaacgtgatgaaaatgcttaatggtatccacagggttttgaagccagaaggcatctttgtatcaattgcctttggacagccacactttcgacgccgattttttgaagctcctgagttaacatggtctattgagtacagtacctttggcgacagcttccattatttcttctacactcttaagaagggcaagaggtcactggagtccagcagttaccaaaacacattaccatcacctgttgctccaagaataaatatggtccacgaagagctcgagagcgaggattttatattcctcacaaaccttgatgggttgtgagtggctgcttaaacaagcatctggctaacagcctaacacatcaaaagggtgaccaggccagcgttggtgaccctgcagtgatgtttttttcctgggcggcaaatgagaatgatgcctgtaaaatgtgtaatttaggatagatttaaattttgagctttgttgtctagtaatactataatactctatattactgcaggctagaggtctgtgtatgatcttgtaaaaattagtattactttccttttgaaatctaatgcttcgacttaacttatgcattgtttaggctgttatatgaaatccatagatgaaagtacttgttggtcattccttttctttttcaaagttcatcttgttttatttttcaagaattaaggagttgtttgattgggattataatctactcagattatataatctaacttattaaataagttatctaactttgagttgtttgtttgacaaattataatctcaaacaagcagaccttaatttatgatgtattagcgtgaaactttcacctcacgacttattgttatacaaaactaaaaaaaga

SEQ ID NO: 41723 - DNA, 1009 bp, Zea Mays
ctagtctcactaaatagtgccttgaagtcagagaaataatacagactggctagaaaggcaatcccatgtcctcagtttgatgggatgtgttgtttgtggacagtggcgatccatgggaccccaatcctacaacagtggaaaacgtgatgaaaatgcttaatggtatccacagggttttgaagccagaaggcatctttgtatcaattgcctttggacagccacactttcgacgccgattttttgaagctcctgagttaacatggtctattgagtacagtacctttggcgacagcttccattatttcttctacactcttaagaagggcaagaggtcactggagtccagcagttaccaaaacacattaccatcacctgttgctccaagaataaatatggtccacgaagagctcgagagcgaggattttatattcctcacaaaccttgatgggttgtgagtggctgcttaaacaagcatctggctaacagcctaacacatcaaaagggtgaccaggccagcgttggtgaccctgcagtgatgtttttttcctgggcggcaaatgagaatgatgcctgtaaaatgtgtaatttaggatagatttaaattttgagctttgttgtctagtaatactataatactctatattactgcaggctagaggtctgtgtatgatcttgtaaaaattagtattactttccttttgaaatctaatgcttcgacttaacttatgcattgtttaggctgttatatgaaatccatagatgaaagtacttgttggtcattccttttctttttcaaagttcatcttgttttatttttcaagaattaaggagttgtttgattgggattataatctactcagattatataatctaacttattaaataagttatctaactttgagttgtttgtttgacaaattataatctcaaacaagcagaccttaatttatgatgtattagcgtgaaactttcacctcacgacttattgttatacaaaactaaaaaaaga

SEQ ID NO: 41724 - DNA, 978 bp, Zea Mays
ctgacagtcatgtcatcaattaatcatcattggaaacaacctacagcatgatgatgtgttgtttgtggacagtggcgatccatgggaccccaatcctacaacagtggaaaacgtgatgaaaatgcttaatggtatccacagggttttgaagccagaaggcatctttgtatcaattgcctttggacagccacactttcgacgccgattttttgaagctcctgagttaacatggtctattgagtacagtacctttggcgacagcttccattatttcttctacactcttaagaagggcaagaggtcactggagtccagcagttaccaaaacacattaccatcacctgttgctccaagaataaatatggtccacgaagagctcgagagcgaggattttatattcctcacaaaccttgatgggttgtgagtggctgcttaaacaagcatctggctaacagcctaacacatcaaaagggtgaccaggccagcgttggtgaccctgcagtgatgtttttttcctgggcggcaaatgagaatgatgcctgtaaaatgtgtaatttaggatagatttaaattttgagctttgttgtctagtaatactataatactctatattactgcaggctagaggtctgtgtatgatcttgtaaaaattagtattactttccttttgaaatctaatgcttcgacttaacttatgcattgtttaggctgttatatgaaatccatagatgaaagtacttgttggtcattccttttctttttcaaagttcatcttgttttatttttcaagaattaaggagttgtttgattgggattataatctactcagattatataatctaacttattaaataagttatctaactttgagttgtttgtttgacaaattataatctcaaacaagcagaccttaatttatgatgtattagcgtgaaactttcacctcacgacttattgttatacaaaactaaaaaaaga

SEQ ID NO: 41725 - DNA, 992 bp, Zea Mays
ggcccatgccaaaacgggccatagggaccatatagcctcacccacgtagccacgtcagagcagagcacccagcaggccagggccagccggccaaaacacagaaaagctaaacccgacctccgctcgccggcgcccggcaggatggcttcgtcggcggcgtaccctgatgcggacgagaacctggaggccatcatcacccgcatagagcagaagtcccgaaagatcgagacccttctcaagcagtcgaagccggtggaggccctaaagacggcgctcgaggggtcaccgctcaagacccgcgacgagcgatgcaaggttcggccttgatatgtcggcgaactggatcgtggtgcaccgcgcgttgatggcgattagggacgtagacggcatgttcaactccctggatcccgagtactacgacatcctcatgaagtacctttatagaggtttatctacaggggataggccaacatgtgaccagtgcctcaaaattcatgaaaaactgactgagaaggcaggcctaggctgtatattgcgatcccttgctgatactgtaaacactgtatgaactttgtctctgctgctgatggtggatattgcaaagttctctcctgctctttacaatcacatcaggcaaactacctgtagttgttaactagttttgcattgtgtctttctttgccattaggcaattttagttagcgtatcattgtaccttactagaatggccgaacaaaatgtgtattatgttgattttcaagtctttgtattaggggtgacaccggactctaaattgtactctataaaatttaaggatgggattatgggctctatttctattcatttttgagctaaaatttatttaggacccaaaaaattgcgaagaaatatttggatcacgattcattaccacccctatttgtactagattttttacttccatagttagaatccaaagtgatttctatacgattagatctgaatgaatgtca

SEQ ID NO: 41726 - DNA, 2430 bp, Zea Mays
aactgccctgccctctctcccatcaccaccgcctgcgactgcgagctcaaagatccatccacactgagctgcccaaatccacattcccatcggcgcagacggccgggaggaggatgtccatgccggagacgttcaccctgaaggtgggggaggcgacgccggccgccgccggcaggccgtcggccgggcccgtgtaccggagcatctacgccaaggacggcctcatggacctcccacaggacatccagtccccttgggacttgttcagtggggcagtcaagaagtaccccacgaacaggatggtcgggcagcgtcaggttacagatggcaaggccggtgagtatgtgtggcaaacgtacgaggaagtgtgccagaaggtcatgaggattggatcagcgatcagaagcctgggcgtagagccgggagctcactgtggcatatatggatccaactgcccggaatgggttatggccatgcaggcatgtaacagtcaagggatatgttatgtgccactgtatgacaccctcggagctaaagctgttgaattcatcatgtaccatgctgagatatccattgcctttgtccaggagagcaagatcaaatcaatactagcagttctccctaagtgcacagcgcaccttagagccattgttagtttcggagattttgcaagcgagatgaaagcggaagctgagagattgggcgtctcctgcttttcttgggaagagttttcttcaatgggaaaacaagactaccaacttcccaataaacgtaaggaagatatctgtacaatcatgtataccagcggaacaactggagatcccaaaggtgtgataatcacaaacaaagctatcgttgctggtgttatgaccacagaacacctcctcaaagagaccgataaagtgatcacagaagaggattcctacttttcctaccttccattagcacatatatttgatcaagtaattgagaactactgtatttctaaaggagcctccatcggattctggcaaggggacattaggtacctgatggaggatgtgcaagtgatgaaaccgacaatattctgtggtgttcctcgtgtttatgatcgtatatatacaggtataaacatgaaaattcagtctggagggatgatagccagacacctttttcagtatgcctacaactacaaacttgccaatatgaggaaagggctgaaacagcatgaagcatcaccgtttttcgacaagatagttttcagcaaaataaaggaagggcttggagggcgtatacgtctcatgatagctggagcagcacctttgccagggcaaatcgaagaattcatgcgggtaaccacctgcagcgttgtagtacaaggatatggatgcttcacgtcaatcgccaacattttctcaatgattggaacagtcggccctcctgtcacaacaatagaagcacggctggagtcggtccctgaaatgggctacgacgcactgtcagacacgccccggggcgagatctgcttgaggggccacaccatgttctccgggtactacaagcgccctagcctcactgaagaagtgttctcagatggctggttccatacaggtgatatcggggagtggcaatccaatggcacgatgaagatcatcgacagaaagaagaacatcttcaagctgtcccagggggagtatgtggcagttgaggtcctggaaagagcatacctgcagtcaccccttgtggcatcggtctgggtctacgggaacagcttcgagtcgttcctcgttgccgtggctgtccctgagaggcaggctctcgaggaatgggcagcagccaacagcaaggccggcgactttgcagagctgtgcgctgatcccaaggcgaggacctacgttcgggatcagctgaaccaaactgggaagaaacttgggttgagaggcttcgagatgctgaaagcagtctacctggagccggtgcctttcagcatcgagaaggacctcgtcactccaacctttaagctcaagagaccccagctgctcaagtattacaaggatcgggtcgaccaaatgtacaaggatgccaaggaggggagagctgcgccatgagcccatgacggcattgccaatttgccacgagtggctatgatcctgagcattgtgattcctcgaaagcgtgtacatattgattatcacaatttgtaagtttaaggcatgtgtgttctatgccaaaatgtcagcagaaaatgaattggctaagaagctcgtgaatcgtgatagcttacattaataaatttattaagctagtccattaccttcacacactccttacttttttgtttttgtttggtttgtggaatagaagatgagtttatccatcactaccctttttctcatagataccactatttcttatagatagttagttagtactaatatgagaaatgagatc

SEQ ID NO: 41727 - DNA, 1762 bp, Zea Mays
aactgccctgccctctctcccatcaccaccgcctgcgactgcgagctcaaagatccatccacactgagctgcccaaatccacattcccatcggcgcagacggccgggaggaggatgtccatgccggagacgttcaccctgaaggtgggggaggcgacgccggccgccgccggcaggccgtcggccgggcccgtgtaccggagcatctacgccaaggacggcctcatggacctcccacaggacatccagtccccttgggacttgttcagtggggcagtcaagaagtaccccacgaacaggatggtcgggcagcgtcaggttacagatggcaaggccggtgagtatgtgtggcaaacgtacgaggaagtgtgccagaaggtcatgaggattggatcagcgatcagaagcctgggcgtagagccgggagctcactgtggcatatatggatccaactgcccggaatgggttatggccatgcaggcatgtaacagtcaagggatatgttatgtgccactgtatgacaccctcggagctaaagctgttgaattcatcatgtaccatgctgagatatccattgcctttgtccaggagagcaagatcaaatcaatactagcagttctccctaagtgcacagcgcaccttagagccattgttagtttcggagattttgcaagcgagatgaaagcggaagctgagagattgggcgtctcctgcttttcttgggaagagttttcttcaatgggaaaacaagactaccaacttcccaataaacgtaaggaagatatctgtacaatcatgtataccagcggaacaactggagatcccaaaggtgtgataatcacaaacaaagctatcgttgctggtgttatgaccacagaacacctcctcaaagagaccgataaagtgatcacagaagaggattcctacttttcctaccttccattagcacatatatttgatcaagtaattgagaactactgtatttctaaaggagcctccatcggattctggcaaggggacattaggtacctgatggaggatgtgcaagtgatgaaaccgacaatattctgtggtgttcctcgtgtttatgatcgtatatatacaggtataaacatgaaaattcagtctggagggatgatagccagacacctttttcagtatgcctacaactacaaacttgccaatatgaggaaagggctgaaacagcatgaagcatcaccgtttttcgacaagatagttttcagcaaaataaaggaagggcttggagggcgtatacgtctcatgatagctggagcagcacctttgccagggcaaatcgaagaattcatgcgggtaaccacctgcagcgttgtagtacaaggatatggatcgggtcgaccaaatgtacaaggatgccaaggaggggagagctgcgccatgagcccatgacggcattgccaatttgccacgagtggctatgatcctgagcattgtgattcctcgaaagcgtgtacatattgattatcacaatttgtaagtttaaggcatgtgtgttctatgccaaaatgtcagcagaaaatgaattggctaagaagctcgtgaatcgtgatagcttacattaataaatttattaagctagtccattaccttcacacactccttacttttttgtttttgtttggtttgtggaatagaagatgagtttatccatcactaccctttttctcatagataccactatttcttatagatagttagttagtactaatatgagaaatgagatc

SEQ ID NO: 41728 - DNA, 1594 bp, Zea Mays
cgccaaccacgtgcccctgatgcagccgaccgcggagtaggagtagagatcacagaagaggattcctacttttcctaccttccattagcacatatatttgatcaagtaattgagaactactgtatttctaaaggagcctccatcggattctggcaaggggacattaggtacctgatggaggatgtgcaagtgatgaaaccgacaatattctgtggtgttcctcgtgtttatgatcgtatatatacaggtataaacatgaaaattcagtctggagggatgatagccagacacctttttcagtatgcctacaactacaaacttgccaatatgaggaaagggctgaaacagcatgaagcatcaccgtttttcgacaagatagttttcagcaaaataaaggaagggcttggagggcgtatacgtctcatgatagctggagcagcacctttgccagggcaaatcgaagaattcatgcgggtaaccacctgcagcgttgtagtacaaggatatgggctcactgagagttgtgcaggatgcttcacgtcaatcgccaacattttctcaatgattggaacagtcggccctcctgtcacaacaatagaagcacggctggagtcggtccctgaaatgggctacgacgcactgtcagacacgccccggggcgagatctgcttgaggggccacaccatgttctccgggtactacaagcgccctagcctcactgaagaagtgttctcagatggctggttccatacaggtgatatcggggagtggcaatccaatggcacgatgaagatcatcgacagaaagaagaacatcttcaagctgtcccagggggagtatgtggcagttgaggtcctggaaagagcatacctgcagtcaccccttgtggcatcggtctgggtctacgggaacagcttcgagtcgttcctcgttgccgtggctgtccctgagaggcaggctctcgaggaatgggcagcagccaacagcaaggccggcgactttgcagagctgtgcgctgatcccaaggcgaggacctacgttcgggatcagctgaaccaaactgggaagaaacttgggttgagaggcttcgagatgctgaaagcagtctacctggagccggtgcctttcagcatcgagaaggacctcgtcactccaacctttaagctcaagagaccccagctgctcaagtattacaaggatcgggtcgaccaaatgtacaaggatgccaaggaggggagagctgcgccatgagcccatgacggcattgccaatttgccacgagtggctatgatcctgagcattgtgattcctcgaaagcgtgtacatattgattatcacaatttgtaagtttaaggcatgtgtgttctatgccaaaatgtcagcagaaaatgaattggctaagaagctcgtgaatcgtgatagcttacattaataaatttattaagctagtccattaccttcacacactccttacttttttgtttttgtttggtttgtggaatagaagatgagtttatccatcactaccctttttctcatagataccactatttcttatagatagttagttagtactaatatgagaaatgagatc

SEQ ID NO: 41729 - DNA, 2484 bp, Zea Mays
cccaagatatataaagtaagcaaccaacttgtggaggttcttgatgcaaaatccaccataccatttgacctctgactagtgtgccccctgccccacccctcaccaagacacagcctggccgccaaattaaacttgaccacttcctctctctctcaactccaagtcttctctctctttctctctattctttccatccccgcttctcggaagctcatcagccatggacgacgccgcgggagaggaagaagcttcgatgttcgagaccagccatgtccttggcgccctgctggcctcctcgccgctgctggcgtccgcctgggaccgctgtacgaccgccacagccgcggcgcccgggttcgtgcacggagaggacggcggcaaggtgtacgtggggttctccggggtgcaggccgcgctgtctgcggcaggcgcggcggtggccggtggtggcgccgacgtcttcgcgccggtggggctcggcggggacgcggcggggcggatgttcgcgccgctgctcgcggccgagcccgactcgtccgctgctggggagccggttgccgtgcaggcgctggcgctgcagtgcttcttgaaactctgcggtaaccctgatttccagatgcttctgaatgagatcaggggtaaggcagtcatgttcacgggccactccctcggtggcgccattgccaccctcgcggcgctacactacctctgcatctcatcttcaagctcaccatggtcacctgctgctcctgtcctgtgcgtcacctttggaagcccgctactaggcaatgaggcactgtccagggcaatcctgcgtgagcgctggggtggtaacttctgccacgttgtctcacagcacgacgtcgtcccaaggctcctcttctgccccccggacgccgtccctgcgcatatcattgtcggaatgcaactggatcaatggccggcccggactcgccacacaggtgcggtgaacacggtcaccacacgcatggcggacactgacaagaacgcgctccagcagctgatacagacacacatggccgctgtggccatggagcagaagcttgctactcctgagacgacaggtgggagtccttaccggccgtttgggacgtacgtgctgtgctccccagaaggtgcggcgtgcgtggacaacgcgaccgcggcggcacagatgctgtacgccaccttcgcatctcggagttcgcccggtgcagagtccccggaggccgcgcactcctgctacggcgagctcgtgctgaaaatgccacagcacctgctcctcaagagatgcctgcgtgtggacgacacgcgtgccacgcccaactacgacgacggcgtctccctcgcactggaggcctccggcatcgacgccacggtgagggcacacgccatggaggcatcgacagcgcggcagtggctgaagacatcgaagcgggcagggcggcggccgagcctgaactgcgcttgcctagcgacgcagcttggccggatcacgcctctccgtgcgcagatcgaatggtacaaggcggtgttcgacgcggagatggggtactacgacgcgtttaagcagcgcaggtcgcccaggaagtactccaaggtgaacttaaaccgcatgaagctgggccagttctgggacggcgtgctcactaagctcgacgccggtcagctcccccacgatttccaccgccgcgccaagtgggtcaatgctgcccgtttctaccagctcctggtcgagcctctcgacattgccgactaccaccaccaaggcctccatcggacgagcgggagctacatgacccacggccgggagaggaggtatgagctgttcgacaggtggtggcaggagaaggcatgtacgggcgctggcggcgacatcacgtcctccatgttggcagcgtcggcgagcagccggagacgcagcaaatacgccgggctcacgcaggacccgtgcttctgggcgagagtggaggaagcgagggaggagacggagagcgctcggggcgagcgcgacgtggcggagctggcgatgaagctggaggagctgcaagagttcgagcgctactcccgtgagctggtggcgaacaaggaggtgtctgttgacgtgctcgcgccgcagtcgagctacacgctctgggtggaggagtggaaccagctcaagctcagggatgaggtgaggacactgttgctccagttttgagctgagttgcaaacagctgatgaatttgtagatagctggtgggcattctccaaatggttcagaagtacatgaatcatttgatcattgtccatggatgctactatatagctgattgtaaatatatctaaacctagaaacattgcagtggattacaatatatttattctttcatgggtaccttgatggcccgatactgattcgaaaaagctttcgagcaaggaggcttgaaaacagctgaagttcagatatggatggatggatgctagtaagctccaagggcagag

SEQ ID NO: 41730 - DNA, 3909 bp, Zea Mays
aagcaaccaacttgtggaggttcttgatgcaaaatccaccataccatttgacctctgactagtgtgccccctgccccacccctcaccaagacacagcctggccgccaaattaaacttgaccacttcctctctctctcaactccaagtcttctctctctttctctctattctttccatccccgcttctcggaagctcatcagccatggacgacgccgcgggagaggaagaagcttcgatgttcgagaccagccatgtccttggcgccctgctggcctcctcgccgctgctggcgtccgcctgggaccgctgtacgaccgccacagccgcggcgcccgggttcgtgcacggagaggacggcggcaaggtgtacgtggggttctccggggtgcaggccgcgctgtctgcggcaggcgcggcggtggccggtggtggcgccgacgtcttcgcgccggtggggctcggcggggacgcggcggggcggatgttcgcgccgctgctcgcggccgagcccgactcgtccgctgctggggagccggttgccgtgcaggcgctggcgctgcagtgcttcttgaaactctgcggtaaccctgatttccaggtaagtgattactactccaatgaaaaaaatatctgcctggttatcatttgttttatgcttagcgcgttgattggagcagtttgccttgcccactaataatctgactaaaaatgttatttttcaagttgcacgttcatgtgactatctgatatttttgcctttctggttggctggggcctagggatggacttattgtgatgttgatgtgcctgtctttggttgttgctgtgtccttgtgtgcagacgtatagtatgagacagatccactgagatatgagatattataaatccattgtcagtcattcatagagcaagaatttggtcagtgagaaatttaacaacattatgcgaggaaaacaaaacgaaattctctgggacaaattccatgctgctgggtctattttcttccctctagtgatttctcttctatatcagtttgccttctccgtcatagtaaaacttgtctgtgaagtcacttcggacctcagaactcaaattagagtattgtgtgtgtacatagaacaatcctcgtcaaatttgccggctaacatgagatgagatgctatgcatctgttttctattgtcccagtgcaaacaaaaagtacaatcacatgtcatagatcgcagtacccaacaaaagttgctgttgcgcctttattgtcgcttacagttgatgcatttcttagggcccatgatcaacagaacatgagatagtgacgaggcatttaaaatgcactgcagtttggctcatgatcggacagctttataaaccaattgcatagatacagatatagatctgtagacatttcaaagtcttaaaatgcttcgactaagatatggagaatgactgatctgtaggaatataatctaaccatgatgaagagctctacttcagagtttactgtcattcagaattcacgctggtttgatcggacattatctatcttctggcctcctttaatttcagatgatcacacacacacacaaaaatgtgattcttttacttgtgattcatacatttgaactaaattccactattgtagagtaacaacctaaatgacgacagctttttgctccatcacaaattccagtctttgttgacggactataattaaatacttcaaatagctgaagagaattttgaggtttcgttgatcttttgatatacgtttcagaggaccacaccttgtctccatcttctatacctttatcacttttgactttttaatcgagtgacctaattattgttcataaaactatgcagatgatcatttttcatgattttttttgttctagcatgagtgctttgtgccactttatgcagctaatgatcccattctctccaatctttacttttcgacctgtctcactgaaactgtgctactaaaatttcacatttgtgtttcaccacactgaaactgtgacttactcatcagaattggttgacattgcagatgcttctgaatgagatcaggggtaaggcagtcatgttcacgggccactccctcggtggcgccattgccaccctcgcggcgctacactacctctgcatctcatcttcaagctcaccatggtcacctgctgctcctgtcctgtgcgtcacctttggaagcccgctactaggcaatgaggcactgtccagggcaatcctgcgtgagcgctggggtggtaacttctgccacgttgtctcacagcacgacgtcgtcccaaggctcctcttctgccccccggacgccgtccctgcgcatatcattgtcggaatgcaactggatcaatggccggcccggactcgccacacaggtgcggtgaacacggtcaccacacgcatggcggacactgacaagaacgcgctccagcagctgatacagacacacatggccgctgtggccatggagcagaagcttgctactcctgagacgacaggtgggagtccttaccggccgtttgggacgtacgtgctgtgctccccagaaggtgcggcgtgcgtggacaacgcgaccgcggcggcacagatgctgtacgccaccttcgcatctcggagttcgcccggtgcagagtccccggaggccgcgcactcctgctacggcgagctcgtgctgaaaatgccacagcacctgctcctcaagagatgcctgcgtgtggacgacacgcgtgccacgcccaactacgacgacggcgtctccctcgcactggaggcctccggcatcgacgccacggccatggaggcatcgacagcgcggcagtggctgaagacatcgaagcgggcagggcggcggccgagcctgaactgcgcttgcctagcgacgcagcttggccggatcacgcctctccgtgcgcagatcgaatggtacaaggcggtgttcgacgcggagatggggtactacgacgcgtttaagcagcgcaggtcgcccaggaagtactccaaggtgaacttaaaccgcatgaagctgggccagttctgggacggcgtgctcactaagctcgacgccggtcagctcccccacgatttccaccgccgcgccaagtgggtcaatgctgcccgtttctaccagctcctggtcgagcctctcgacattgccgactaccaccaccaaggcctccatcggacgagcgggagctacatgacccacggccgggagaggaggtatgagctgttcgacaggtggtggcaggagaaggcatgtacgggcgctggcggcgacatcacgtcctccatgttggcagcgtcggcgagcagccggagacgcagcaaatacgccgggctcacgcaggacccgtgcttctgggcgagagtggaggaagcgagggaggagacggagagcgctcggggcgagcgcgacgtggcggagctggcgatgaagctggaggagctgcaagagttcgagcgctactcccgtgagctggtggcgaacaaggaggtgtctgttgacgtgctcgcgccgcagtcgagctacacgctctgggtggaggagtggaaccagctcaagctcagggatgaggtgaggacactgttgctccagttttgagctgagttgcaaacagctgatgaatttgtagatagctggtgggcattctccaaatggttcagaagtacatgaatcatttgatcattgtccatggatgctactatatagctgattgtaaatatatctaaacctagaaacattgcagtggattacaatatatttattctttcatgggtaccttgatggcccgatactgattcgaaaaagctttcgagcaaggaggcttgaaaacagctgaagttcagatatggatggatggatgctagtaagctccaagggcagag

SEQ ID NO: 41731 - DNA, 1345 bp, Zea Mays
cgcaagcaaaacagggcaaatgtccgtgccaacagcatcctgtatccatcaatgcggttgcaggggcgctacgctgcgttcctccgccgggcatcagccctgccgtccctgccgctggtggcttccctccacgccgccgtgctccgccgcggagtccccgccctcctcgcgtcgtccctcatccaaggctactccgcctgcggggacctcgactccgcgcgcgccctgttcgacgaaacgcccccaacgctctcgtcccgcaccgcgctcgccggcgcgctctcggcgcacggccggtgcgcggaggctctggatctgctaaatgtcccggaggcaggggtggacgacagggcggtgacggtgctcctggcggcgtgcgcgcgcgcagggatggtggccgaggggaggcgcgtgttcgcgagggtaccccgccccgcgctgcagcactacacgtgcatggtggagatgctggggcgcgtcggggaggtggaggaggccgagagactcgtggccgggatggaggcgcgcccggacagggtcatcttggcggcgctcctcaccgcgtgccgcgtgcacggccgggttgacgttgccgagcgggtggccgggctcatgcgccggtatgccgttgcgtgaaaactcgcggtctgactaatgcatcatcagttgaagacttgaagcgcagttcagacctctgatctgaaatgatcatccatcgccatgcatcttttgggtggattgcttgcttggacacgaatcggactaagaaatactccatagatggcaatgtggtagcgttgcttgtcagttctggcatttgcatggacattgcgcctgaatgcaacaaatgcctcaaaccaatgcccacgaggtgtgtatggagattgtaatgccaattttcttgtctcagactgcaaattattatcatatcaatttgctgtagctagcagtgcagccatagaacctgtgaaacatggatacttggttacaaagttcaactttcagtcaagttttgtgcaacacgggtctgattgagacttccatgaaaccgaccaatttgtcgttgctgtcatgtttgggaacttgtggtgaagcatgcttggaattattaaggtctagaagcagctgagttttcaacgtgttccatggtagggaatgtgtttgctaacactgttggaagaatcttggtatccagatttatttggtaccatacttcctaagttaacacatatgaaggatgtcatctgactggagctcttaagattcttctgataattaggatatggctgtgtgtctgtgacagaatccaaagttgggcctaggaatttcaaatagcaagtttgaa

SEQ ID NO: 41732 - DNA, 3324 bp, Zea Mays
ccggcgccggggcccgcgaaatctcctcgaccgctgctttctcttcctcttcctcttcctcttcctttcccatcctttccacccatccacaccgccaccaccgcctacctccaccaccagtccatctcctccgcagcgtctaaagccctatccggatatccccactcgccgacgcccggacatatggccagcttcggcgtcgacacccgcccggccgccgcggcctccggcggcggcgtgggcgtggcggggacgagggagggcgcgctctcgttcctctcccgcgggctgcgggaggacctccgtctcatccgcgcgcgggccggggagctcgagaccttcctcagcgcgccggtgccggaacccgagctgttcgcgcgcctccgtcgcgcctactcctgctcggcgtcctcttcgcggacgcggctcgacctgtccgccatcgggaaggcgttcgaggccgacgcgtggaggggcgccaggactgccaggtggaggtgggaggcggagacggaggcggaggagtgggagccagtcaggatggtcaaggcgcacctcagggagctcgagcggaggaggctggcccagtcgcccagcgacatgctgcacaagctcaagctcagcttgaaatcactgacctttgcgcctgaagcgtctgaggttagtcctcttgattcacttcttgttgcaatgttgcatagtgctgtcaaggagatacacttctgaaaccttttgctcgtagtggtgtcttttatttgcgtatatttaattactgacttctgacagtgacttttgcaagaatgttcaatctaaagaaaaatgattgtggtaaacatttcattcaatatattacttatgtaacattttcctaaaccctggtaccacatttctcttctgtatatctgtgtaaatccttattaaacaaaagaggaacattctatcttgttagagcactgcctaatcaaccttgtccacttttgcatttccataatcagtaccacgcttgtgcaggatgttctgccactggatttaggggaacttcttgcttattttgtaaagcaatctgtaccactattcgaccaacttggtataaaaagagatgtatgtgacaagttggtggagtctctgtgcagcaagcgcaaggaccaccctgcatatagttttttgtcagcaactgaatcatcttcattgaaaaatgacaatgttgggaatgaactcgacctaagaatagctagcgccctacagagtacaggacaccattatgaaggtggattttggagtgatggccataagtctgacatatctggcaagagacatgttgccatagtcaccactgccagtcttccctggatgactggaacggctgtgaatcctttgtttcgagctgcatacttggctaaatcttgcaagcaagatgtaactttggtagtgccctggctttgtaagtcggatcaggaacttgtgtaccccaacagcatgacttttagttcaccagaagagcaagaaaaatatatgaggaattggctggaagaaagagttggtttcaagacagacttcaaaatatcattttatcctggaaagtttcaaaaggaaaggagaagcataattcctgctggggacacttcacagttcataccatcaaaggaagctgatattgcaatcttggaagagcccgagcacctcaactggtatcatcacgggaaacgatggacagataaattcaatcatgtgatcggtgtagtgcatacaaattatttggagtacatcaagagggagaagaatggtgctattcaggcctttttcgttaagcacattaataacctggtcgccagagcttattgccataagatcttgcggctgtcaggtgccactcaagatcttcccaagtcgacgatctgcaatgtgcacggtgtgaaccccaagtttctggaggttggagagaggatagcagcagagcgggagtctggccagcaatccttctctaaaggagcttattttctggggaagatggtgtgggccaagggttacagagagttaatagatttgttcgcgaagcacaacagtgatttggaaggcttcaagctggacatctatggaaacggtgaggattcacacgaggtgcaatcggctgccaggaagctgaatctgaacctcaactttcataagggccgggaccatgcggatgattctcttcatgggtacaaggttttcataaacccaagcatcagcgacgtcctctgcaccgcgaccgcggaggcgctagcgatgggcaagttcgtggtgtgcgccgaccacccgtccaacgacttcttccggtcgttccccaactgcctgacatacaagacctccgaggacttcgtcgccagagtgaaggaagccatggcgcgcgacccgcagcccctgaccccggagcagcggtacaacctgtcgtgggatgccgccacccagcggttcatggagcactccgagctcgacaaggtcctgaatggcgacagcaacagcgaatgcggtggctctgttggcaccgaaaccggcaagagcgcgggcacaatgatgaggagatccgcctcggcgccgaacatgtcagacgtcgtggacggcggcctggcgttcgtgcactattgcttcaccggcagtgagctcttgaggctgtccacgggtgccgtccctggaacccgggactacaacaagcaacatagcctggacctccgtctcccgccgccccaggtacagaacccggtctacggctggtaattactagatatataggtatagctctgcagtctgtagcactagctttttcatctccgcgtgtgtttgtttgccaaaggcgagccttgttcattattacctacaaacaacaactacgactgtaaggatgacaacgctgcgtcgtgattttgtaagactagtgctagatagagaggcgagcatttcttcaatcaaaaaatttaaaaaaaaggaaaggaaagaaagactgaggcggggcaggccctctgtttccaactttttgttgccaacaattgcacgcaccgccctcgttcagactcagtataggtgtacatttgggctgggcctgatgggccggctcaaagcacgaaaaaaagtacggcccaggcacgacacggttcgaaatattttagtgctgggctggcacggccccaatatattgggctgggtttgggccgaggtcgtggcccgtgggcgagcacgagcacggcttgtttaaggcaggcacgaaatggcccatatagaggcacgaaaagatccatatatttattaaaaccatacttcattccacattttcatgtacttgataaagaa

SEQ ID NO: 41733 - DNA, 2421 bp, Zea Mays
atgcatatttttagtagctttgctgaaaagtggttttttatgatccaaagggcacacgagaatttgaaaaacaagaaatcactgacctttgcgcctgaagcgtctgaggatgttctgccactggatttaggggaacttcttgcttattttgtaaagcaatctgtaccactattcgaccaacttggtataaaaagagatgtatgtgacaagttggtggagtctctgtgcagcaagcgcaaggaccaccctgcatatagttttttgtcagcaactgaatcatcttcattgaaaaatgacaatgttgggaatgaactcgacctaagaatagctagcgccctacagagtacaggacaccattatgaaggtggattttggagtgatggccataagtctgacatatctggcaagagacatgttgccatagtcaccactgccagtcttccctggatgactggaacggctgtgaatcctttgtttcgagctgcatacttggctaaatcttgcaagcaagatgtaactttggtagtgccctggctttgtaagtcggatcaggaacttgtgtaccccaacagcatgacttttagttcaccagaagagcaagaaaaatatatgaggaattggctggaagaaagagttggtttcaagacagacttcaaaatatcattttatcctggaaagtttcaaaaggaaaggagaagcataattcctgctggggacacttcacagttcataccatcaaaggaagctgatattgcaatcttggaagagcccgagcacctcaactggtatcatcacgggaaacgatggacagataaattcaatcatgtgatcggtgtagtgcatacaaattatttggagtacatcaagagggagaagaatggtgctattcaggcctttttcgttaagcacattaataacctggtcgccagagcttattgccataagatcttgcggctgtcaggtgccactcaagatcttcccaagtcgacgatctgcaatgtgcacggtgtgaaccccaagtttctggaggttggagagaggatagcagcagagcgggagtctggccagcaatccttctctaaaggagcttattttctggggaagatggtgtgggccaagggttacagagagttaatagatttgttcgcgaagcacaacagtgatttggaaggcttcaagctggacatctatggaaacggtgaggattcacacgaggtgcaatcggctgccaggaagctgaatctgaacctcaactttcataagggccgggaccatgcggatgattctcttcatgggtacaaggttttcataaacccaagcatcagcgacgtcctctgcaccgcgaccgcggaggcgctagcgatgggcaagttcgtggtgtgcgccgaccacccgtccaacgacttcttccggtcgttccccaactgcctgacatacaagacctccgaggacttcgtcgccagagtgaaggaagccatggcgcgcgacccgcagcccctgaccccggagcagcggtacaacctgtcgtgggatgccgccacccagcggttcatggagcactccgagctcgacaaggtcctgaatggcgacagcaacagcgaatgcggtggctctgttggcaccgaaaccggcaagagcgcgggcacaatgatgaggagatccgcctcggcgccgaacatgtcagacgtcgtggacggcggcctggcgttcgtgcactattgcttcaccggcagtgagctcttgaggctgtccacgggtgccgtccctggaacccgggactacaacaagcaacatagcctggacctccgtctcccgccgccccaggtacagaacccggtctacggctggtaattactagatatataggtatagctctgcagtctgtagcactagctttttcatctccgcgtgtgtttgtttgccaaaggcgagccttgttcattattacctacaaacaacaactacgactgtaaggatgacaacgctgcgtcgtgattttgtaagactagtgctagatagagaggcgagcatttcttcaatcaaaaaatttaaaaaaaaggaaaggaaagaaagactgaggcggggcaggccctctgtttccaactttttgttgccaacaattgcacgcaccgccctcgttcagactcagtataggtgtacatttgggctgggcctgatgggccggctcaaagcacgaaaaaaagtacggcccaggcacgacacggttcgaaatattttagtgctgggctggcacggccccaatatattgggctgggtttgggccgaggtcgtggcccgtgggcgagcacgagcacggcttgtttaaggcaggcacgaaatggcccatatagaggcacgaaaagatccatatatttattaaaaccatacttcattccacattttcatgtacttgataaagaa

SEQ ID NO: 41734 - DNA, 2421 bp, Zea Mays
gagttaaggaaaatagtaatgttaaacaactggaggttcaaagctcatggaaatgttcttctgtgaagtctacagaaatcactgacctttgcgcctgaagcgtctgaggatgttctgccactggatttaggggaacttcttgcttattttgtaaagcaatctgtaccactattcgaccaacttggtataaaaagagatgtatgtgacaagttggtggagtctctgtgcagcaagcgcaaggaccaccctgcatatagttttttgtcagcaactgaatcatcttcattgaaaaatgacaatgttgggaatgaactcgacctaagaatagctagcgccctacagagtacaggacaccattatgaaggtggattttggagtgatggccataagtctgacatatctggcaagagacatgttgccatagtcaccactgccagtcttccctggatgactggaacggctgtgaatcctttgtttcgagctgcatacttggctaaatcttgcaagcaagatgtaactttggtagtgccctggctttgtaagtcggatcaggaacttgtgtaccccaacagcatgacttttagttcaccagaagagcaagaaaaatatatgaggaattggctggaagaaagagttggtttcaagacagacttcaaaatatcattttatcctggaaagtttcaaaaggaaaggagaagcataattcctgctggggacacttcacagttcataccatcaaaggaagctgatattgcaatcttggaagagcccgagcacctcaactggtatcatcacgggaaacgatggacagataaattcaatcatgtgatcggtgtagtgcatacaaattatttggagtacatcaagagggagaagaatggtgctattcaggcctttttcgttaagcacattaataacctggtcgccagagcttattgccataagatcttgcggctgtcaggtgccactcaagatcttcccaagtcgacgatctgcaatgtgcacggtgtgaaccccaagtttctggaggttggagagaggatagcagcagagcgggagtctggccagcaatccttctctaaaggagcttattttctggggaagatggtgtgggccaagggttacagagagttaatagatttgttcgcgaagcacaacagtgatttggaaggcttcaagctggacatctatggaaacggtgaggattcacacgaggtgcaatcggctgccaggaagctgaatctgaacctcaactttcataagggccgggaccatgcggatgattctcttcatgggtacaaggttttcataaacccaagcatcagcgacgtcctctgcaccgcgaccgcggaggcgctagcgatgggcaagttcgtggtgtgcgccgaccacccgtccaacgacttcttccggtcgttccccaactgcctgacatacaagacctccgaggacttcgtcgccagagtgaaggaagccatggcgcgcgacccgcagcccctgaccccggagcagcggtacaacctgtcgtgggatgccgccacccagcggttcatggagcactccgagctcgacaaggtcctgaatggcgacagcaacagcgaatgcggtggctctgttggcaccgaaaccggcaagagcgcgggcacaatgatgaggagatccgcctcggcgccgaacatgtcagacgtcgtggacggcggcctggcgttcgtgcactattgcttcaccggcagtgagctcttgaggctgtccacgggtgccgtccctggaacccgggactacaacaagcaacatagcctggacctccgtctcccgccgccccaggtacagaacccggtctacggctggtaattactagatatataggtatagctctgcagtctgtagcactagctttttcatctccgcgtgtgtttgtttgccaaaggcgagccttgttcattattacctacaaacaacaactacgactgtaaggatgacaacgctgcgtcgtgattttgtaagactagtgctagatagagaggcgagcatttcttcaatcaaaaaatttaaaaaaaaggaaaggaaagaaagactgaggcggggcaggccctctgtttccaactttttgttgccaacaattgcacgcaccgccctcgttcagactcagtataggtgtacatttgggctgggcctgatgggccggctcaaagcacgaaaaaaagtacggcccaggcacgacacggttcgaaatattttagtgctgggctggcacggccccaatatattgggctgggtttgggccgaggtcgtggcccgtgggcgagcacgagcacggcttgtttaaggcaggcacgaaatggcccatatagaggcacgaaaagatccatatatttattaaaaccatacttcattccacattttcatgtacttgataaagaa

SEQ ID NO: 41735 - DNA, 3569 bp, Zea Mays
caacagtgacgctagctctcaagcaaatagaggcagcagagcagaccatagagagtggagatcagccagcagcagcagcagcaaggctgagccgccgcccccacgagtggagtggaggcagcagccagcgacaaggctgaatccgggaggtccgcgcgccgcagccgtggctgccatcgcaggcgccgccgccgccgccgcttgtgagaggcgctcgtcttgtattcacgaggagggcgacgacaccccctcggcaaaggagctggccactggccccgccctgtgatggctgctgcccgtgccccggcggcgaggggacgcgtaggtgctccggaggcggcagctgcgtggaggggcggcggtctccgcgcgaagcaggccgggcgcgccagctgccgcggcgcgtagaccgagcgactggacgccgtctctctctctctctctctcgcaatccgagtcgggggctcggggctagggttttggcgctgagggcgccggggttctagcggagcggctggaggaagaggggagggggcggggggcacggagatggcggtcggggacgcgctgcgacggctgtgcgaggagatcgggtggtcctacgccgtcttctggaaggccatcggtgctgcagaccccgtgcatttggtgcaggaggacggctactgtggccacacgtcatgtcctgtcggatctgagccttccgaatctctgcccagcgacgccgggtgctctgttcctgctgctaacaccatctgctcgcttgttcacagcgttatggcgtcgcaggtccatgtcgtcggacaagggaccgtaggccgtgctgcgttcagtggcaaccaccaatggatcgtccgcggtaccgccaatggtcacgggctctcctccgaggttgctgcggagatgaacaatcagttcagagttggcattcagacaattgcgatcattcctgtgctgccacggggtgtcctgcagttaggctctgctggtttggttatggaaaacataaattttgtgatgtttgcaaagaagttgtgttctcagctaaacaaccgttcaagcatggctgcatctgcttcggctaaaaacgctttaagtcagcatggccagtcacgtcctgatactgcaactgtgtcaactaggacaccaccaaatgcattgctgaatgcatctttgcttaaggttgcacaacagagtggtcaccctgttagagagcacgttgtctatgctgagcctgaccttaggtttagacaacaagcatccttctgcgagaaccaatttggaagtaatttacagagtgttgttatgaactcaagtttgacctccccaagcttggcatcagttaaaaagcagccactcttgatgaacagcattgggcagttacagttcagtaattatgtgcattcatcggcagatttggcaagagatgtcatattaaaatcccttgtgcgccaggactcttctgtctgcgaaactacaaacatgaatatgcatcgtggaagatatatggtatccaatgatataaatggttctggggattttgattttctccctgtaggtgccaaagcaagcagagccaacttatcaaccagtgtgtcgagtcaaatattggaccacacaacaagaacactgcagcaaaaacagtctcttgtcccattcaaagtcacccaatcttctgaattcaataagaaaatggagaaccctgaaaatggatcatttcaaaccccttcagttccaacttctgaatctggtggtcaggtttctaacagtttcaacatggaccaagagaatcaattgattatgtcaaacaatgtacggcaagttcaaaagattaatagatttagtgatccaagtgctaatgtaagcactcagagaatgaagaacagggatgtatgcgagtcgggaatgcccattgagagaggttcctcgttgctagtggagcctggtgcagataatgacttgtttgatatgcttggttctgaatttcatcagttctcccacaacgttgggtctgatttggtcacctggagtggtacagagtctcagaattcagatagagatggccctgaatcatcaatatatctcaatagctcaccccttttcagttcgttagacaacgagcttcactattctggtatcttatcactaactgatactgatcaactattggatgctgtcatctcaaatgtcaatccaagtagtaaacagtgtcctgatgatagtgcttcttgcaagactgcattgacggatgttcctagcacatctcatcttggttcaatagacttgaagagatgtgagtcctccggcgttccttcagtgctaattaagcacgaattggcacagcttgttaagcaaccatgtatttttgacaaatctgagaactgtctttcccaaaataatggaatgcacaagtctcagatacgcctttggattgagagtggtcagaacatgaaatgtgaaagtacttcagcttctaacagcaaaggtcttgatacgccaagcaaggcgaatcgcaagagatctcgacccggtgaaagtgctaagccacgacctaaggaccggcagctgatacaggaccgtattaaagagcttcgtgagcttgtaccgaatggggcaaagcattgatggtttgttggagaagacggttaagcacatgcttttcttacaaagtgtgacgaagaatgcagacaagctcaaggactctaccgagtctaagatacttggtagtgaaaatggccccctttggaaagactacttcgaaggtggggctacctgggcttttgatgtcggctctcagtctatgacatgtccaatcattgttgaggatcttgaccgacctcgtcagatgcttgtggagatgctttgcgaggatagaggaatcttcttggagatagctgatttcatcaaaggactaggactgactatcttgaggggtgtgatggaaatgcgcaaaagtaaaatctgggcacggttcactgttgaggcgaaccgggacgtaaccagaatggagatctttctatcgcttgtgcgcttattggagccaaactgtgacggcagtgcagcggcggagaacgctagcaacatgaacatgcctcttggcttggtgcaccaacctgtcatcccagcaacaggcagcatccaatgagactagaggaaaccctgaagcatcttcccaagtgctaagagcaggagctcaactaacttctgcagtgactagcatcgccaatatgccagtgcatcgcctgcttttcctgagacatcttaatccgtgcaaatgtgacatccttcatgagaccaggtcgcagaaatggaagaaggaaaacaacgccaagagtgattgttaggcagtgttttgtttgtatgatcttagtttgtttgttagttagcgctgtttggtcgtatattagcggatttttttggtactgttattcagaatggaaattcttgggttggtttatttcacaccaaaaaagagagatggaataccacctttgttataaatcttctcacatcagaaccagttagcatgactagtggaaaaacacctgagcagatttgtcattgctccg

SEQ ID NO: 41736 - DNA, 1068 bp, Zea Mays
cacgctattgcctgctccagctggccttcttcctcccccacccgatatagccacccatggcacctcctctcttccatggccgcctccctcaagctccagccgagctccctcctccgtgcggcaagacaacaggctaacgctccctgttcctcccttcccacggcgcccagcccaagctcctcttccccaccatggctgagctcaccggatctcctcccctcggcgcagtaggtcgagcagctcctcaactcccccctctgctcgagcaagccgtgtatggagcccccaacctgcagcaagccggagcacgcagcagcagtactactcacgtctagttgtccagggaagaagaagcccctttatctctatgatatgtgggctcaaggccatgggaaccttcggactcgggatgaagttgttcacaatatgaaaagcatggtcgggatgaaggtcgaaccagctccggagatacgcgcaaggaagcttcggctcagtagcagaaaagaaccgacttaaagaggaaaaggctatctagtcttcgatagattgtcctaatgtcaatagtaaacatgaagggcatgaatgtaattttacataggctgcgccctgtgcctataaataggtgaaccattaacatttgtgttgccttgttcttaactcatagcatttgagaacaagtccccaacaactaagtttgtctatatagaagccatagcaaattgaagtgtacttaactagtataataataaaggaactaatgaaagattagagcgaatgtgataaatgcttgcacttgcgatgttgtggttgcaatggataataataggtagtaatcttcgtccttccaatgcttgacacagggcgaaggatggaggtctccttcgaagggtattcagtgaaaaacatcccaagaggagacaacgagcaggcagatttactagctaaatcagcggcacaggagctcccactcccctcagaattattcttcgaaactctcaaagcatcttcggtcgagctcatggagcgagcggtacttacaatttcacctgtgcacagcaaggattggag

SEQ ID NO: 41737 - DNA, 3446 bp, Zea Mays
attgcctgctccagctggccttcttcctcccccacccgatatagccacccatggcacctcctctcttccatggccgcctccctcaagctccagccgagctccctcctccgtgcggcaagacaacaggctaacgctccctgttcctcccttcccacggcgcccagcccaagctcctcttccccaccatggctgagctcaccggatctcctcccctcggcgcagtaggtcgagcagctcctcaactcccccctctgctcgagcaagccgtgtatggagcccccaacctgcagcaagccggagcacgcagcagcagtactactcacgtctagttgtccagggaagaagaagcccctttatctctatgatatgtgggctcaaggccatgggtaagaatgctcaaagtttcagatctttgccctttctttaaaaaatcatatcttgagtttgagagctcttaaaattgtgaaacctatttcattggctttcttataaattatctacatattgaatctataagttggcatgttttagtggaaaatttctgctatagaaattcgtatttaaaactggtttagaaaataaatgaacttgcttctctccatagttttaatttaaaaaatccaaaaatgatgagacttgttttgtttgttagatgatgtcatactctagctaagaaaaatataaaacccatatgttgtttactgttttcttgttgtgttaattaaatcatgttaaataggaaaaatattattgatttgcttgttatttttggatatgcagctctagtgctccaaatagattgcaatttttacagtagaccccctgtgtgattcttggttactggtacaaagtttaagaattatggtgcacgtatcactgagttagtgatttaacttgcttgatgcacattaagtagttttaaatgatttaaatataatatataaatgtaaaaatagaaaatggtattccactgtccttgcatgatattatagtagcctaagaaaatttgatatggtcatgcatccatagaaaataattagttttagatttaacttgctctcacatgctttattgcattaacaatttgttatttttgtaataaatacaatataaaacctgagcatgtgaaatttatacattagtcataatttattattacctatgcctcaccaaacttccagccccaaatttgatagtttcatacggtgctaaaataacaccaattttataattataagaatagttagtgaaaaattagaagtaaacaaaagcatgcacgtttcttgaaaatcttaagtgtctaaatataaatagaaacttgataactaagtcataataatttaaacttgagaaattgctggtagtatctctcgatgattttgtttggtgatttagttaagtgctcatgtgctagcaaactgaaattcatgcgtgtacagttttggttgtgcgtgtaatctagtaaaataaagtatgttttctgtagatatgtgctatataaatgttacagttcacttgtgtatctagctcttcctaaaacttcatgatctaagaattgatggtttagaagttatgcttttcaaaagttcagtgactgaatctgtccaatttctgtacagatttcagggactggaatggttgcttaagttaatgttaaaatcagttcttggtggtcataagaaagttgtagataacttatttatattggttgtgttaaaatttcataaccataggcctgatagtttcagagttatgaattttacaaaatgattgttgtgttctgaccactgtccggatagatttcgaaaactgtactgtttaggttaattaaaattggaaccacttcttggtgattgtaaaagttatgtagtacttttactaagctttacaaaaagtcttgaatcatcatttttggtggtataaaactcaagttatagatgttttaagtatgaagactgaatctgtccaattctggaccgcaaggccttcatagtgtcttttacccttaatacatattaaatcagcccgagttgtttataaatgatttgtagacgatttcattagctttctagaaagctaggaccacttgctttggatgcctaaatctctagttaagaatttttgaagtcgcaagtctgaatctgttcaaatctagacatagctgtcattttagcactatttaaacttgttaagtgtctaatcaccttgagatgacaataccaaagttgtagagtgtttcttaagctttccaaaaagtatctgttcactatttttggatagataccttgtgagttatgactaaaacaagtaactgttgtgctgctgtcctaatcttgttgattgtggtggattgctctactctcttgtctcgcttgagtaggattgatagtgttatctcatgatccccatattagtatattatatgattggatatatatataagtaactagtgcagtagtaaattaagttattgaagtctagtaagtgaattagcttcgatcaacgttaatactgtgaagtagttaatacttgcgtagctaatctaatattactaaataatcaatcacattaaactagtatgataagcagtacgattaggatatcacttcatgtgtgttttcttgggtgtgtgcttgcattaggatattgtgaatattggtagaacccgattaagtgagtatccccttttaactaatgttgggggtcttcgtcttctgaaggtactcaaaatcatgattaacaatgtttcccaagtgtaatatatttacaggaaccttcggactcgggatgaagttgttcacaatatgaaaagcatggtcgggatgaaggtcgaaccagctccggagatacgcgcaaggaagcttcggctcagtagcagaaaagaaccgacttaaagaggaaaaggctatctagtcttcgatagattgtcctaatgtcaatagtaaacatgaagggcatgaatgtaattttacataggctgcgccctgtgcctataaataggtgaaccattaacatttgtgttgccttgttcttaactcatagcatttgagaacaagtccccaacaactaagtttgtctatatagaagccatagcaaattgaagtgtacttaactagtataataataaaggaactaatgaaagattagagcgaatgtgataaatgcttgcacttgcgatgttgtggttgcaatggataataataggtagtaatcttcgtccttccaatgcttgacacagggcgaaggatggaggtctccttcgaagggtattcagtgaaaaacatcccaagaggagacaacgagcaggcagatttactagctaaatcagcggcacaggagctcccactcccctcagaattattcttcgaaactctcaaagcatcttcggtcgagctcatggagcgagcggtacttacaatttcacctgtgcacagcaaggattggag

SEQ ID NO: 41738 - DNA, 2208 bp, Zea Mays
cttactcatgtgcgctccttctcatgcaagaagatatactcaatttctactctcttctatcagtcttctcactcctatctctcatgtctccttttcctcccaccattcctgtcacccacgcagcacgccagagcagcagtagctgtagagctcggcatcagctctcttgctgctcactttgcagcacctccccggctccctagtaacactctgcacctaccatcgaactctctcaggttcggtcatccctgctcccttgcaaatcagcgcccctccactcggctctgctactgtgccgtgcgcgcgattcctccggcttccatcgctgcgtgcgtgctcatcttccgtcgcatgccacctgctcgatagaacgagtagtttgatcgtccccatctccccgtggttcgtcatcgccaagttttcaggtgtgtttgtgcagagatgccattcaaagtcgatgatctaatcgtcgccaccagccacaagcaccagttccgttgaacatatgtgattgaagatcctttctggtgatgaaagtgaaatcagcgtggcactcgccaagcgctcgaaagaaggtctagactagagaaccatgtcgtttcacgtttgttgactcggtttggattatgagctcccaacagaaggagtgaagattctagatgaagtggtagctgaagaggtgtttgctccagtgcctgttcatcaagtggatggagccatctaactggttattttgatagaagaatctagaacctcttctctgcaacaaaaggcaagcccggtgcatttgctccttccttgtgttttaaatgctttatcacattatatgatgcattaggtgattggagttgggtgataaacaattgatgcattaacattccatggaaattcctgaatccttgttttataaaaagaattattactgcttagaacttaaaaatcgtttgtttttaaaaaagaatgatgtgtaacactggttacaggctttttgttcaaaaatcaaagcaaacttaatggtgagtccatcagggcccaggtggattcatcatccgaaaagaatacccctgccaggtaccaaaaatgggaaaatggtttgaataaattgagaccagacgctaagcagatatggtcgtccatctgtgtcgattaaggaccgtacatttgactagcctgttgtggttaagactttgcaactagccacatacatgaagagacaatcgcacactgggattggagagatggcgggagtagcatgtaccctcctggcatagtaacacgcctggtagggtaatgtactctcgggtggcgcgaacttgttcatgtagtggaggactccatgggaacggctcacatatgcaagggttaagtgctacatatgtcgtgtggttagagatccccagctgggtataatcggttcgaatcgtcattgctcctcggttatggagactcatcccggtgaccatcatcgtagttagcaagtgaaatatgattatggataaaattcagctactataggccaagtgcttgaactagattaggcaaatctagattcaggtaaatacctaacttgtgaattaaaacttggcttagggatcaactggtagtaagtttctctgccaaagggggtctttgataattgataagctttaccttgagtcccaaatctagcatacccttgatagtctttttctttagtctattccctatgttgttgcaggaagggttattgctacctttagctcttgatagttgttttgtgtggaggtcttgaagattttaatacttaggtgtatttcttctggaaaggcttcacctttccctattgtgtaataagttatgcactttgagtactatcaggacttgtaataattacaactctttctatgatgtaaagcttgagatttggaattgtaaaatatgttttgtaaagtcttctgctctatctccaatgtatgtatgtatcaaaggtgattactataatatacatgttttgtgggagatctctgggataatgagttcaagttgttgaactcgatagccttgttaagttatctcgtacacgtgtacaaccatatgaggctgttaaggcaaggattggtgcatgtgggcctgataacttgggagggctgtcacagttccccactatttaaatgcctatctagagccgaatgtcaagagctgatgaaagaaatacatccaggaatatgt

SEQ ID NO: 41739 - DNA, 1125 bp, Zea Mays
cttactcatgtgcgctccttctcatgcaagaagatatactcaatttctactctcttctatcagtcttctcactcctatctctcatgtctccttttcctcccaccattcctgtcacccacgcagcacgccagagcagcagtagctgtagagctcggcatcagctctcttgctgctcactttgcagcacctccccggctccctagtaacactctgcacctaccatcgaactctctcaggttcggtcatccctgctcccttgcaaatcagcgcccctccactcggctctgctactgtgccgtgcgcgcgattcctccggcttccatcgctgcgtgcgtgctcatcttccgtcgcatgccacctgctcgatagaacgagtagtttgatcgtccccatctccccgtggttcgtcatcgccaagttttcaggtgtgtttgtgcagagatgccattcaaagtcgatgatctaatcgtcgccaccagccacaagcaccagttccgttgaacaaggagtgaagattctagatgaagtggtagctgaagaggtgtttgctccagtgcctgttcatcaagtggatggagccatctaactggttattttgatagaagaatctagaacctcttctctgcaacaaaaggaagggttattgctacctttagctcttgatagttgttttgtgtggaggtcttgaagattttaatacttaggtgtatttcttctggaaaggcttcacctttccctattgtgtaataagttatgcactttgagtactatcaggacttgtaataattacaactctttctatgatgtaaagcttgagatttggaattgtaaaatatgttttgtaaagtcttctgctctatctccaatgtatgtatgtatcaaaggtgattactataatatacatgttttgtgggagatctctgggataatgagttcaagttgttgaactcgatagccttgttaagttatctcgtacacgtgtacaaccatatgaggctgttaaggcaaggattggtgcatgtgggcctgataacttgggagggctgtcacagttccccactatttaaatgcctatctagagccgaatgtcaagagctgatgaaagaaatacatccaggaatatgt

SEQ ID NO: 41740 - DNA, 1986 bp, Zea Mays
ttctcatgcaagaagatatactcaatttctactctcttctatcagtcttctcactcctatctctcatgtctccttttcctcccaccattcctgtcacccacgcagcacgccagagcagcagtagctgtagagctcggcatcagctctcttgctgctcactttgcagcacctccccggctccctagtaacactctgcacctaccatcgaactctctcaggttcggtcatccctgctcccttgcaaatcagcgcccctccactcggctctgctactgtgccgtgcgcgcgattcctccggcttccatcgctgcgtgcgtgctcatcttccgtcgcatgccacctgctcgatagaacgagtagtttgatcgtccccatctccccgtggttcgtcatcgccaagttttcagagctcccaacagaaggagtgaagattctagatgaagtggtagctgaagaggtgtttgctccagtgcctgttcatcaagtggatggagccatctaactggttattttgatagaagaatctagaacctcttctctgcaacaaaaggcaagcccggtgcatttgctccttccttgtgttttaaatgctttatcacattatatgatgcattaggtgattggagttgggtgataaacaattgatgcattaacattccatggaaattcctgaatccttgttttataaaaagaattattactgcttagaacttaaaaatcgtttgtttttaaaaaagaatgatgtgtaacactggttacaggctttttgttcaaaaatcaaagcaaacttaatggtgagtccatcagggcccaggtggattcatcatccgaaaagaatacccctgccaggtaccaaaaatgggaaaatggtttgaataaattgagaccagacgctaagcagatatggtcgtccatctgtgtcgattaaggaccgtacatttgactagcctgttgtggttaagactttgcaactagccacatacatgaagagacaatcgcacactgggattggagagatggcgggagtagcatgtaccctcctggcatagtaacacgcctggtagggtaatgtactctcgggtggcgcgaacttgttcatgtagtggaggactccatgggaacggctcacatatgcaagggttaagtgctacatatgtcgtgtggttagagatccccagctgggtataatcggttcgaatcgtcattgctcctcggttatggagactcatcccggtgaccatcatcgtagttagcaagtgaaatatgattatggataaaattcagctactataggccaagtgcttgaactagattaggcaaatctagattcaggtaaatacctaacttgtgaattaaaacttggcttagggatcaactggtagtaagtttctctgccaaagggggtctttgataattgataagctttaccttgagtcccaaatctagcatacccttgatagtctttttctttagtctattccctatgttgttgcaggaagggttattgctacctttagctcttgatagttgttttgtgtggaggtcttgaagattttaatacttaggtgtatttcttctggaaaggcttcacctttccctattgtgtaataagttatgcactttgagtactatcaggacttgtaataattacaactctttctatgatgtaaagcttgagatttggaattgtaaaatatgttttgtaaagtcttctgctctatctccaatgtatgtatgtatcaaaggtgattactataatatacatgttttgtgggagatctctgggataatgagttcaagttgttgaactcgatagccttgttaagttatctcgtacacgtgtacaaccatatgaggctgttaaggcaaggattggtgcatgtgggcctgataacttgggagggctgtcacagttccccactatttaaatgcctatctagagccgaatgtcaagagctgatgaaagaaatacatccaggaatatgt

SEQ ID NO: 41741 - DNA, 2225 bp, Zea Mays
gaagatatactcaatttctactctcttctatcagtcttctcactcctatctctcatgtctccttttcctcccaccattcctgtcacccacgcagcacgccagagcagcagtagctgtagagctcggcatcagctctcttgctgctcactttgcagcacctccccggctccctagtaacactctgcacctaccatcgaactctctcaggttcggtcatccctgctcccttgcaaatcagcgcccctccactcggctctgctactgtgccgtgcgcgcgattcctccggcttccatcgctgcgtgcgtgctcatcttccgtcgcatgccacctgctcgatagaacgagtagtttgatcgtccccatctccccgtggttcgtcatcgccaagttttcaggtgtgtttgtgcagagatgccattcaaagtcgatgatctaatcgtcgccaccagccacaagcaccagttccgttgaacgtgagaacgtcttaatcagttgttgagttgaaaattgatgtgtcgatctatggtttgacatagtgttttcaacatgtctatgttctggtcgaggccctagatatgtgattgaagatcctttctggtgatgaaagtgaaatcagcgtggcactcgccaagcgctcgaaagaagagctcccaacagaaggagtgaagattctagatgaagtggtagctgaagaggtgtttgctccagtgcctgttcatcaagtggatggagccatctaactggttattttgatagaagaatctagaacctcttctctgcaacaaaaggcaagcccggtgcatttgctccttccttgtgttttaaatgctttatcacattatatgatgcattaggtgattggagttgggtgataaacaattgatgcattaacattccatggaaattcctgaatccttgttttataaaaagaattattactgcttagaacttaaaaatcgtttgtttttaaaaaagaatgatgtgtaacactggttacaggctttttgttcaaaaatcaaagcaaacttaatggtgagtccatcagggcccaggtggattcatcatccgaaaagaatacccctgccaggtaccaaaaatgggaaaatggtttgaataaattgagaccagacgctaagcagatatggtcgtccatctgtgtcgattaaggaccgtacatttgactagcctgttgtggttaagactttgcaactagccacatacatgaagagacaatcgcacactgggattggagagatggcgggagtagcatgtaccctcctggcatagtaacacgcctggtagggtaatgtactctcgggtggcgcgaacttgttcatgtagtggaggactccatgggaacggctcacatatgcaagggttaagtgctacatatgtcgtgtggttagagatccccagctgggtataatcggttcgaatcgtcattgctcctcggttatggagactcatcccggtgaccatcatcgtagttagcaagtgaaatatgattatggataaaattcagctactataggccaagtgcttgaactagattaggcaaatctagattcaggtaaatacctaacttgtgaattaaaacttggcttagggatcaactggtagtaagtttctctgccaaagggggtctttgataattgataagctttaccttgagtcccaaatctagcatacccttgatagtctttttctttagtctattccctatgttgttgcaggaagggttattgctacctttagctcttgatagttgttttgtgtggaggtcttgaagattttaatacttaggtgtatttcttctggaaaggcttcacctttccctattgtgtaataagttatgcactttgagtactatcaggacttgtaataattacaactctttctatgatgtaaagcttgagatttggaattgtaaaatatgttttgtaaagtcttctgctctatctccaatgtatgtatgtatcaaaggtgattactataatatacatgttttgtgggagatctctgggataatgagttcaagttgttgaactcgatagccttgttaagttatctcgtacacgtgtacaaccatatgaggctgttaaggcaaggattggtgcatgtgggcctgataacttgggagggctgtcacagttccccactatttaaatgcctatctagagccgaatgtcaagagctgatgaaagaaatacatccaggaatatgt

SEQ ID NO: 41742 - DNA, 2088 bp, Zea Mays
atttctactctcttctatcagtcttctcactcctatctctcatgtctccttttcctcccaccattcctgtcacccacgcagcacgccagagcagcagtagctgtagagctcggcatcagctctcttgctgctcactttgcagcacctccccggctccctagtaacactctgcacctaccatcgaactctctcaggttcggtcatccctgctcccttgcaaatcagcgcccctccactcggctctgctactgtgccgtgcgcgcgattcctccggcttccatcgctgcgtgcgtgctcatcttccgtcgcatgccacctgctcgatagaacgagtagtttgatcgtccccatctccccgtggttcgtcatcgccaagttttcagatatgtgattgaagatcctttctggtgatgaaagtgaaatcagcgtggcactcgccaagcgctcgaaagaaggtctagactagagaaccatgtcgtttcacgtttgttgactcggtttggattatgagctcccaacagaaggagtgaagattctagatgaagtggtagctgaagaggtgtttgctccagtgcctgttcatcaagtggatggagccatctaactggttattttgatagaagaatctagaacctcttctctgcaacaaaaggcaagcccggtgcatttgctccttccttgtgttttaaatgctttatcacattatatgatgcattaggtgattggagttgggtgataaacaattgatgcattaacattccatggaaattcctgaatccttgttttataaaaagaattattactgcttagaacttaaaaatcgtttgtttttaaaaaagaatgatgtgtaacactggttacaggctttttgttcaaaaatcaaagcaaacttaatggtgagtccatcagggcccaggtggattcatcatccgaaaagaatacccctgccaggtaccaaaaatgggaaaatggtttgaataaattgagaccagacgctaagcagatatggtcgtccatctgtgtcgattaaggaccgtacatttgactagcctgttgtggttaagactttgcaactagccacatacatgaagagacaatcgcacactgggattggagagatggcgggagtagcatgtaccctcctggcatagtaacacgcctggtagggtaatgtactctcgggtggcgcgaacttgttcatgtagtggaggactccatgggaacggctcacatatgcaagggttaagtgctacatatgtcgtgtggttagagatccccagctgggtataatcggttcgaatcgtcattgctcctcggttatggagactcatcccggtgaccatcatcgtagttagcaagtgaaatatgattatggataaaattcagctactataggccaagtgcttgaactagattaggcaaatctagattcaggtaaatacctaacttgtgaattaaaacttggcttagggatcaactggtagtaagtttctctgccaaagggggtctttgataattgataagctttaccttgagtcccaaatctagcatacccttgatagtctttttctttagtctattccctatgttgttgcaggaagggttattgctacctttagctcttgatagttgttttgtgtggaggtcttgaagattttaatacttaggtgtatttcttctggaaaggcttcacctttccctattgtgtaataagttatgcactttgagtactatcaggacttgtaataattacaactctttctatgatgtaaagcttgagatttggaattgtaaaatatgttttgtaaagtcttctgctctatctccaatgtatgtatgtatcaaaggtgattactataatatacatgttttgtgggagatctctgggataatgagttcaagttgttgaactcgatagccttgttaagttatctcgtacacgtgtacaaccatatgaggctgttaaggcaaggattggtgcatgtgggcctgataacttgggagggctgtcacagttccccactatttaaatgcctatctagagccgaatgtcaagagctgatgaaagaaatacatccaggaatatgt

SEQ ID NO: 41743 - DNA, 1016 bp, Zea Mays
tttctactctcttctatcagtcttctcactcctatctctcatgtctccttttcctcccaccattcctgtcacccacgcagcacgccagagcagcagtagctgtagagctcggcatcagctctcttgctgctcactttgcagcacctccccggctccctagtaacactctgcacctaccatcgaactctctcaggttcggtcatccctgctcccttgcaaatcagcgcccctccactcggctctgctactgtgccgtgcgcgcgattcctccggcttccatcgctgcgtgcgtgctcatcttccgtcgcatgccacctgctcgatagaacgagtagtttgatcgtccccatctccccgtggttcgtcatcgccaagttttcagagctcccaacagaaggagtgaagattctagatgaagtggtagctgaagaggtgtttgctccagtgcctgttcatcaagtggatggagccatctaactggttattttgatagaagaatctagaacctcttctctgcaacaaaaggaagggttattgctacctttagctcttgatagttgttttgtgtggaggtcttgaagattttaatacttaggtgtatttcttctggaaaggcttcacctttccctattgtgtaataagttatgcactttgagtactatcaggacttgtaataattacaactctttctatgatgtaaagcttgagatttggaattgtaaaatatgttttgtaaagtcttctgctctatctccaatgtatgtatgtatcaaaggtgattactataatatacatgttttgtgggagatctctgggataatgagttcaagttgttgaactcgatagccttgttaagttatctcgtacacgtgtacaaccatatgaggctgttaaggcaaggattggtgcatgtgggcctgataacttgggagggctgtcacagttccccactatttaaatgcctatctagagccgaatgtcaagagctgatgaaagaaatacatccaggaatatgt

SEQ ID NO: 41744 - DNA, 1745 bp, Zea Mays
actctcttctatcagtcttctcactcctatctctcatgtctccttttcctcccaccattcctgtcacccacgcagcacgccagagcagcagtagctgtagagctcggcatcagctctcttgctgctcactttgcagcacctccccggctccctagtaacactctgcacctaccatcgaactctctcaggttcggtcatccctgctcccttgcaaatcagcgcccctccactcggctctgctactgtgccgtgcgcgcgattcctccggcttccatcgctgcgtgcgtgctcatcttccgtcgcatgccacctgctcgatagaacgagtagtttgatcgtccccatctccccgtggttcgtcatcgccaagttttcagagctcccaacagaaggagtgaagattctagatgaagtggtagctgaagaggtgtttgctccagtgcctgttcatcaagtggatggagccatctaactggttattttgatagaagaatctagaacctcttctctgcaacaaaaggctttttgttcaaaaatcaaagcaaacttaatggtgagtccatcagggcccaggtggattcatcatccgaaaagaatacccctgccaggtaccaaaaatgggaaaatggtttgaataaattgagaccagacgctaagcagatatggtcgtccatctgtgtcgattaaggaccgtacatttgactagcctgttgtggttaagactttgcaactagccacatacatgaagagacaatcgcacactgggattggagagatggcgggagtagcatgtaccctcctggcatagtaacacgcctggtagggtaatgtactctcgggtggcgcgaacttgttcatgtagtggaggactccatgggaacggctcacatatgcaagggttaagtgctacatatgtcgtgtggttagagatccccagctgggtataatcggttcgaatcgtcattgctcctcggttatggagactcatcccggtgaccatcatcgtagttagcaagtgaaatatgattatggataaaattcagctactataggccaagtgcttgaactagattaggcaaatctagattcaggtaaatacctaacttgtgaattaaaacttggcttagggatcaactggtagtaagtttctctgccaaagggggtctttgataattgataagctttaccttgagtcccaaatctagcatacccttgatagtctttttctttagtctattccctatgttgttgcaggaagggttattgctacctttagctcttgatagttgttttgtgtggaggtcttgaagattttaatacttaggtgtatttcttctggaaaggcttcacctttccctattgtgtaataagttatgcactttgagtactatcaggacttgtaataattacaactctttctatgatgtaaagcttgagatttggaattgtaaaatatgttttgtaaagtcttctgctctatctccaatgtatgtatgtatcaaaggtgattactataatatacatgttttgtgggagatctctgggataatgagttcaagttgttgaactcgatagccttgttaagttatctcgtacacgtgtacaaccatatgaggctgttaaggcaaggattggtgcatgtgggcctgataacttgggagggctgtcacagttccccactatttaaatgcctatctagagccgaatgtcaagagctgatgaaagaaatacatccaggaatatgt

SEQ ID NO: 41745 - DNA, 999 bp, Zea Mays
actctcttctatcagtcttctcactcctatctctcatgtctccttttcctcccaccattcctgtcacccacgcagcacgccagagcagcagtagctgtagagctcggcatcagctctcttgctgctcactttgcagcacctccccggctccctagtaacactctgcacctaccatcgaactctctcaggttcggtcatccctgctcccttgcaaatcagcgcccctccactcggctctgctactgtgccgtgcgcgcgattcctccggcttccatcgctgcgtgcgtgctcatcttccgtcgcatgccacctgctcgatagaacgagtagtttgatcgtccccatctccccgtggttcgtcatcgccaagttttcagaaggagtgaagattctagatgaagtggtagctgaagaggtgtttgctccagtgcctgttcatcaagtggatggagccatctaactggttattttgatagaagaatctagaacctcttctctgcaacaaaaggaagggttattgctacctttagctcttgatagttgttttgtgtggaggtcttgaagattttaatacttaggtgtatttcttctggaaaggcttcacctttccctattgtgtaataagttatgcactttgagtactatcaggacttgtaataattacaactctttctatgatgtaaagcttgagatttggaattgtaaaatatgttttgtaaagtcttctgctctatctccaatgtatgtatgtatcaaaggtgattactataatatacatgttttgtgggagatctctgggataatgagttcaagttgttgaactcgatagccttgttaagttatctcgtacacgtgtacaaccatatgaggctgttaaggcaaggattggtgcatgtgggcctgataacttgggagggctgtcacagttccccactatttaaatgcctatctagagccgaatgtcaagagctgatgaaagaaatacatccaggaatatgt

SEQ ID NO: 41746 - DNA, 1944 bp, Zea Mays
actctcttctatcagtcttctcactcctatctctcatgtctccttttcctcccaccattcctgtcacccacgcagcacgccagagcagcagtagctgtagagctcggcatcagctctcttgctgctcactttgcagcacctccccggctccctagtaacactctgcacctaccatcgaactctctcaggttcggtcatccctgctcccttgcaaatcagcgcccctccactcggctctgctactgtgccgtgcgcgcgattcctccggcttccatcgctgcgtgcgtgctcatcttccgtcgcatgccacctgctcgatagaacgagtagtttgatcgtccccatctccccgtggttcgtcatcgccaagttttcagaaggagtgaagattctagatgaagtggtagctgaagaggtgtttgctccagtgcctgttcatcaagtggatggagccatctaactggttattttgatagaagaatctagaacctcttctctgcaacaaaaggcaagcccggtgcatttgctccttccttgtgttttaaatgctttatcacattatatgatgcattaggtgattggagttgggtgataaacaattgatgcattaacattccatggaaattcctgaatccttgttttataaaaagaattattactgcttagaacttaaaaatcgtttgtttttaaaaaagaatgatgtgtaacactggttacaggctttttgttcaaaaatcaaagcaaacttaatggtgagtccatcagggcccaggtggattcatcatccgaaaagaatacccctgccaggtaccaaaaatgggaaaatggtttgaataaattgagaccagacgctaagcagatatggtcgtccatctgtgtcgattaaggaccgtacatttgactagcctgttgtggttaagactttgcaactagccacatacatgaagagacaatcgcacactgggattggagagatggcgggagtagcatgtaccctcctggcatagtaacacgcctggtagggtaatgtactctcgggtggcgcgaacttgttcatgtagtggaggactccatgggaacggctcacatatgcaagggttaagtgctacatatgtcgtgtggttagagatccccagctgggtataatcggttcgaatcgtcattgctcctcggttatggagactcatcccggtgaccatcatcgtagttagcaagtgaaatatgattatggataaaattcagctactataggccaagtgcttgaactagattaggcaaatctagattcaggtaaatacctaacttgtgaattaaaacttggcttagggatcaactggtagtaagtttctctgccaaagggggtctttgataattgataagctttaccttgagtcccaaatctagcatacccttgatagtctttttctttagtctattccctatgttgttgcaggaagggttattgctacctttagctcttgatagttgttttgtgtggaggtcttgaagattttaatacttaggtgtatttcttctggaaaggcttcacctttccctattgtgtaataagttatgcactttgagtactatcaggacttgtaataattacaactctttctatgatgtaaagcttgagatttggaattgtaaaatatgttttgtaaagtcttctgctctatctccaatgtatgtatgtatcaaaggtgattactataatatacatgttttgtgggagatctctgggataatgagttcaagttgttgaactcgatagccttgttaagttatctcgtacacgtgtacaaccatatgaggctgttaaggcaaggattggtgcatgtgggcctgataacttgggagggctgtcacagttccccactatttaaatgcctatctagagccgaatgtcaagagctgatgaaagaaatacatccaggaatatgt

SEQ ID NO: 41747 - DNA, 1792 bp, Zea Mays
gcttacctactcgtaacccgccccggcacccctcccgccccgccccgagcaacgcccgctaggctgctgtgctaccccgcagtcccaattccacagtccccaccccaccaggtgcaccacgccgccaccgcagcctccgccccggctgcgttgacccccgttgacctccgcccgcccggccgccatggacccgcgcttcccgccgccggcgccgtcgtcctgcttcggcgggggcggggagctcccagcacgggggcaccaccggcgggcgcactcggagacgttcatccggctgcccgacgcagacctgctgctggacccggacgccgacttcggcttctccgacatcgacttcccctctctctccgacgactcgcccgcggcgtccgacccgacgccgcagccccaggccccgccgctccagccgccgctgcagcaggcggcttccccggcgtccgcggcgccgccgaggccgccgagcggggcgcacatgcggagcctctccctcgacgccgccttcttcgacggcctctcgctgcagggaggcggcggcggcgggggggtaagagggggcatggcggggcacaagaggagcggctccatggacggggacacctcgccgttcgagggcgagtcggcgccgccgtccgtgctgccggactacgccaagaaggccgtgcccgacgacaagctcgccgagctcgcgctcctcgatcccaagcgcgccaagaggatcctggcgaaccggcagtccgcggcgaggtccaaggagaggaagatcaagtacaccagtgagctggagaggaaggtgcagacgctgcagacagaggccaccacgctttcggcacagctcacgcttcttcagagggacacctctggtttaaccactgagaacagggagctgaaactccggttgcaggccatggaagaacaagctaaacttcgagatggtatgtccttgtctttctttggaaggtctaaagccactgtcatataaggcccagaaagagactccacttttcctgtttcaagaacattacgaggcaaatgctctaaatgatgccttgagggaagaagtccagcggcttaagatagccgcagggcaggtccccaacatgaacgggaatcccttcaatggaggactatcacagcagcagcagatgccaagctatttctcacaaccacagcagatgcaatacttcagcggccaccagggccagcatcaccatccgaagcatgacccccagaattcttcaaacggcggtggccagcccttgagtgactccatggatttcatgtgaggattcaggggagacagctcaggagtgttgcctgagatcacataccaacttcaactaaagtactgtaaatgtagctgatgtataccatattcagtgttatgatatgaaccattgtagtttagctagctgttccttgtaccattaatcaaaagttcattcatggtgacaaacctatcatcgcttttgttctggcgttaaagtaaattggcttgactggttgacgagctgtcgttgtaaagttgttcctgtaacagtgaaggaatggtttgcggttggaacgtggttttcacgctgctgaaagccgttgcatttcgtgattggcgttcatgactatctcatcagcagcttacatatattaatattcaaactacagtgcaatgtacaatataaaatggtgtaaactacagttcacctatatagtcacaaaataccgttttggactatatattacactgtttatagaatgtagtttgaatatagatatgagtatg

SEQ ID NO: 41748 - DNA, 985 bp, Zea Mays
gggacttgtgcatcagcagcggtcgcaggcagagaaccagacggctcagaactcgctggtgatgtcgcggtagtgggagctgtcaagaagctctcttcccgtcccgcaatgccgcgggacatgtcgacggaagccacataatcgtggctagctgaaggagggacacctctggtttaaccactgagaacagggagctgaaactccggttgcaggccatggaagaacaagctaaacttcgagatgctctaaatgatgccttgagggaagaagtccagcggcttaagatagccgcagggcaggtccccaacatgaacgggaatcccttcaatggaggactatcacagcagcagcagatgccaagctatttctcacaaccacagcagatgcaatacttcagcggccaccagggccagcatcaccatccgaagcatgacccccagaattcttcaaacggcggtggccagcccttgagtgactccatggatttcatgtgaggattcaggggagacagctcaggagtgttgcctgagatcacataccaacttcaactaaagtactgtaaatgtagctgatgtataccatattcagtgttatgatatgaaccattgtagtttagctagctgttccttgtaccattaatcaaaagttcattcatggtgacaaacctatcatcgcttttgttctggcgttaaagtaaattggcttgactggttgacgagctgtcgttgtaaagttgttcctgtaacagtgaaggaatggtttgcggttggaacgtggttttcacgctgctgaaagccgttgcatttcgtgattggcgttcatgactatctcatcagcagcttacatatattaatattcaaactacagtgcaatgtacaatataaaatggtgtaaactacagttcacctatatagtcacaaaataccgttttggactatatattacactgtttatagaatgtagtttgaatatagatatgagtatg

SEQ ID NO: 41749 - DNA, 891 bp, Zea Mays
atatgcaccgcatcagcttcaggagcagtgtttggtactgaaggcgctaggacatccatatttgagggacacctctggtttaaccactgagaacagggagctgaaactccggttgcaggccatggaagaacaagctaaacttcgagatgctctaaatgatgccttgagggaagaagtccagcggcttaagatagccgcagggcaggtccccaacatgaacgggaatcccttcaatggaggactatcacagcagcagcagatgccaagctatttctcacaaccacagcagatgcaatacttcagcggccaccagggccagcatcaccatccgaagcatgacccccagaattcttcaaacggcggtggccagcccttgagtgactccatggatttcatgtgaggattcaggggagacagctcaggagtgttgcctgagatcacataccaacttcaactaaagtactgtaaatgtagctgatgtataccatattcagtgttatgatatgaaccattgtagtttagctagctgttccttgtaccattaatcaaaagttcattcatggtgacaaacctatcatcgcttttgttctggcgttaaagtaaattggcttgactggttgacgagctgtcgttgtaaagttgttcctgtaacagtgaaggaatggtttgcggttggaacgtggttttcacgctgctgaaagccgttgcatttcgtgattggcgttcatgactatctcatcagcagcttacatatattaatattcaaactacagtgcaatgtacaatataaaatggtgtaaactacagttcacctatatagtcacaaaataccgttttggactatatattacactgtttatagaatgtagtttgaatatagatatgagtatg

SEQ ID NO: 41750 - DNA, 2785 bp, Zea Mays
cacgcccagaccattaacagaacaagatttgcttaggcaaccagctttaaacacttaaaccagtccagtccagtccagcccgaccagctcagcccgtcgtgcatgtgagacgaaaatgaagcccaacccaacctcggtgacggcgacacgtgccaagccgcgtccccgccccccatctccggtgcttgccgaggcggcgctggagaccggccagagcacgggctgcggcgtcccaccttcgaactgaccctcttcaagtttcctaccaccaacgcggcctgcgccccccaattggcctggcctgctagctccgactccaatgcaggtagcacctgtacctcgaaccatgctttccacatggagattctctggcgtgcgccgcgttctctttgtcccgctgcaggggccgtcgtcgcggcacggcgcgcgtcgcgtggctcacacggtcacgcggttggtggcccgcgcatgggggaaggggaaggcaggcaagtggcagcagggtgctgttcctatcggcgaggagattcgtcgtgcgttttgcggctgtgcagatgaggatcaggcgaatcgcacgaacaatcatgggattgtcgtttcacctcatacgcaagggttcactatacgtaagcgaatcgcacggatgatcatggcctcgtgttcttgctgttctacccacgtgattcgtgacgggattctcgatcggatacaatcacgggtaggcgtgttgcgtagtaccatacatgctttacaatttttctttggctcaagtacctaatcgagagattcgattaagaaatagtagcagagaaaacatgccacactgctctagacacttgtgttttgctacggcttcagggaggcgatgagggtaacaaacaacaatgggcattggttaagaataaggtagaacttacctggtggaaatatcattccaatattgtttagaaagccaatccaagtttttccagggaagaggacctacatgatgccatctctttaatactaataatgtccagtccaagtcacgagtcattgcaacatcaactctgggaggaattaaatatttgattgaacattggagactgattgccttggaccttagcttgctaagcatgttagcaggaatctaccaagtgcagcaacttggtagtcattttgttttcagtaggtaggcagataggtcatgcaagtgactttaacaaagttttttttttgttggttaccatccctttctgcttatttgtagccgttgaaaacttgaatctttttctgctgtctggctaggacatcttttagtttcaggtacagcccagtattctgaaagagaaatcagttgaccatccattgccgcccttgtatcgtgatgtgctgcttcggtaaccaaacctgatttttcttgttgttccatgtgctaggatgaaaacgaactattcgccacagttgccagttgattttacttacatctaaacaggcacaatttgctctttacctagccaaaataccagttgtattctgctgctgctttgccactctaacattttggacttgatgctggaatctttaccattattccattagcatcttcatactgcattacgtcattggtggggccatgctgtaatcttaattttctaccccttagaaaatttgtgccgacaggggaaaaagccgatgtaatcatttgcgttttgataaactaaccactgaagtcgcaacatagaaaatagcatagcctttaacatgtgtcaatctagacttgccttttgtttacttagagtaagaagactagcttcttgaccaagaaccatgtttttattttcaaaagatacaggcaccgtgctcagcctgacaggctgtctgcatgatttcaactagttaatctatagcgtgtatctttttcatataaactgaaaggagactgtccaggtatcggtatggtcattttttctcattttttcagttcttcatcgtgtaatttatgctgtattaggaagtgtatattggtaatcaaaggtgatatactttaaggaaccttcagccttgctggtgataaggagatcacactgagctgatgctcagaatatacgagacagcagtttggtatgctactgttgtcttctgacttctgctatcgctagagctgcttctcacaactgaaggcatttgattggaacaattcctaatgatctttgtacattactctcgctaagttaataagttgtgtcacgttgatgaacattctgacaggtttagctcatatgctcaaattcttctctcacttgtttcaacttcttatttcattctctgtgatgatcatcagatcctccaattatgactagtagtctaggagcaaaatgaatttgttataaacatttgtgaatggccaagcccatcaatatctcctgaaattttatatactcggattttaaatgctttctttccttttccagttgcattgcttgctagctatgattaggatgatactgaggtgttccacctgctggccttaactcatctgatatcattgacagaagacatatgccgtgagcatgataagctactaagtgccgaggccatggttggctaatggaccataaagtcgtctctatcagtttcagggaattcattagagccctccatgatgaaacctggggcatatggtacttaaatgcagtaaggttttaaatagccggttatagtgaccaagatatatcctttttttagtagcaaaaagttatgctatttagcccgacatatcccgctatacccagatatatcccga

SEQ ID NO: 41751 - DNA, 2473 bp, Zea Mays
cacgcccagaccattaacagaacaagatttgcttaggcaaccagctttaaacacttaaaccagtccagtccagtccagcccgaccagctcagcccgtcgtgcatgtgagacgaaaatgaagcccaacccaacctcggtgacggcgacacgtgccaagccgcgtccccgccccccatctccggtgcttgccgaggcggcgctggagaccggccagagcacgggctgcggcgtcccaccttcgaactgaccctcttcaagtttcctaccaccaacgcggcctgcgccccccaattggcctggcctgctagctccgactccaatgcaggtagcacctgtacctcgaaccatgctttccacatggagattctctggcgtgcgccgcgttctctttgtcccgctgcaggggccgtcgtcgcggcacggcgcgcgtcgcgtggctcacacggtcacgcggttggtggcccgcgcatgggggaaggggaaggcaggcaagtggcagcagggtgctgttcctatcggcgaggagattcgtcgtgcgttttgcggctgtgcagatgaggatcaggcgaatcgcacgaacaatcatgggattgtcgtttcacctcatacgcaagggttcactatacgtaagcgaatcgcacggatgatcatggcctcgtgttcttgctgttctacccacgtgattcgtgacgggattctcgatcggatacaatcacgggtaggcgtgttgcgtagtaccatacatgctttacaatttttctttggctcaagtacctaatcgagagattcgattaagaaatagtagcagagaaaacatgccacactgctctagacacttgtgttttgctacggcttcagggaggcgatgagggtaacaaacaacaatgggcattggttaagaataaggtagaacttacctggtggaaatatcattccaatattgtttagaaagccaatccaagtttttccagggaagaggacctacatgatgccatctctttaatactaataatgtccagtccaagtcacgagtcattgcaacatcaactctgggaggaattaaatatttgattgaacattggagactgattgccttggaccttagcttgctaagcatgttagcaggaatctaccaagtgcagcaacttggtagtcattttgttttcagtaggtaggcagataggtcatgcaagtgactttaacaaagttttttttttgttggttaccatccctttctgcttatttgtagccgttgaaaacttgaatctttttctgctgtctggctaggacatcttttagtttcaggtacagcccagtattctgaaagagaaatcagttgaccatccattgccgcccttgtatcgtgatgtgctgcttcggtaaccaaacctgatttttcttgttgttccatgtgctaggatgaaaacgaactattcgccacagttgccagttgattttacttacatctaaacaggcacaatttgctctttacctagccaaaataccagttgtattctgctgctgctttgccactctaacattttggacttgatgctggaatctttaccattattccattagcatcttcatactgcattacgtcattggtggggccatgctgtaatcttaattttctaccccttagaaaatttgtgccgacaggggaaaaagccgatgtaatcatttgcgttttgataaactaaccactgaagtcgcaacatagaaaatagcatagcctttaacatgtgtcaatctagacttgccttttgtttacttagagtaagaagactagcttcttgaccaagaaccatgtttttattttcaaaagatacaggcaccgtgctcagcctgacaggctgtctgcatgatttcaactagttaatctatagcgtgtatctttttcatataaactgaaaggagactgtccaggtatcggtatggtcattttttctcattttttcagttcttcatcgtgtaatttatgctgtattaggaagtgtatattggtaatcaaaggtgatatactttaaggaaccttcagccttgctggtgataaggagatcacactgagctgatgctcagaatatacgagacagcagtttgaaagcaggaatggggaagaggagaggtgatgcacaaactgagaaactcctgcattataggagtagatattatgctccacccccaagctgctgccactgccattctctggaatcaatcatattccttgccaggttgaactccaggacaaaaggttcagattaatgggaagatgcagcttggagccaataataagcctgtggggccgatattgttttctttaagttcctctttgcaacaactctccactctttaaaacaagcagcattgttggattgtcttcattcaattccactgtattagcaacatctagtaattattaatatgatgagagaaaatgacttcaatgactattaagaatctgccaaaagat

SEQ ID NO: 41752 - DNA, 695 bp, Zea Mays
cacgcccagaccattaacagaacaagatttgcttaggcaaccagctttaaacacttaaaccagtccagtccagtccagcccgaccagctcagcccgtcgtgcatgtgagacgaaaatgaagcccaacccaacctcggtgacggcgacacgtgccaagccgcgtccccgccccccatctccggtgcttgccgaggcggcgctggagaccggccagagcacgggctgcggcgtcccaccttcgaactgaccctcttcaagtttcctaccaccaacgcggcctgcgccccccaattggcctggcctgctagctccgactccaatgcagaaagcaggaatggggaagaggagaggtgatgcacaaactgagaaactcctgcattataggagtagatattatgctccacccccaagctgctgccactgccattctctggaatcaatcatattccttgccaggttgaactccaggacaaaaggttcagattaatgggaagatgcagcttggagccaataataagcctgtggggccgatattgttttctttaagttcctctttgcaacaactctccactctttaaaacaagcagcattgttggattgtcttcattcaattccactgtattagcaacatctagtaattattaatatgatgagagaaaatgacttcaatgactattaagaatctgccaaaagat

SEQ ID NO: 41753 - DNA, 2127 bp, Zea Mays
aaaacagaattccacgacgtctcacctgcacacgcgctcgtcgtcgtctcatcggcgcttgctgcgacaactcacgccggtggcttgagcgcgccatcgaccagggttgttacaccaagcgatggcggcggtggccggggatggtggtggtgggcccgaggagggcgtcggcgagagctcgtccccgcctcgcaaccccgtgctcgcgcccgcacccgctgcctctggcgggagcgggagcggtggcggcggccgcggaggtggcctccgggacatctgccgcgaggtgttcgagcgcctcgtcaacgatggccacagggcgggctccgagctccttgcccagctcgaggcccacttcaatcgactccccatcagctacaagctggatgtgaatattgacaaagcagaagatgtgttaatccatcagaaagttttggcagaagcacaggatcctgataggcgcccagcattcactgtccgtttcctcaggcttgaagaggtaaatgtggacgagacaactaactctgatgcacatgaagaaggggctgatattggtgaagctctttctaccaggtcaaagacatcatatgcacacattcatgagatactattctccaccaaggataaacccaagctcctgagtcagttgtctgctttgctttctgacattggactgaacatcaaggaggcacatgtgttctcaacaacagatggttattctcttgatgtttttgttgttgacggttggcccgttgaggaaactgatggtttgcataaggcactagaagtatcaattttgagaaatgagctcataccatgttctggatctttgtaaaacaaataagggttcctggtctggctctgaatcctcagcttccaaaagatcactgccattcctagcacaggattttgaatcagatattgacacaagacttctgaagcttgtaaataagattgcttctggatcttgtggggacatgtttcttgggacctacagtggtgaggaggttgctgttaaagttcttaatcctcagaatttgaacaaaaatgtatggagtgaatttaagcaagaaatcaacatgttaagggaagttgatcatccgaatattgtccgattcattggttcatgcacaaagccacctcagttttacataattacagagtgcatgtctagaggaagtctgtttgatttcttgcacaatgagcataatgtgttggacctcccaacgcttctgaagtttgcactagatgtatgccaagggatgtcctacttgcatcagaaaggcattatccacagagatttaaagtctggcaaccttttattggataaaaatgatgttgttaaagtagccgattttggtctagctcgttttcaggatggagggggtgatatgactgctgaaactgggacctatagatggatggcacctgaggttataaatcatcagccctatgacagcaaagcagatgtatacagttttgctcttgtactttgggagctcatgacatccaagattccatataataccatgacccccctccaagcagctgttggtgtgaggcagggattgcgaccacaaattccagaaaatacgcatccgaggctcataaacttgatgcagagatgttgggaagctactccgactgatcgcccttcatttgaggagatcattcctgaactagaggatatccaggcacaagcacagagaacatcaggggaaacgagccagacagaggaggaccactcatgcagtaaagattgattgaccccctctgtacatacatgttgacaattctctcatctgatcactaaaatgctgagaaagtagcatatcatcagttttgatgccatagaaaaaaagtagcgaatcattttgtcaagttttgtcagaaccttttggggccgacggccaaagctcttggtattatccttgcttcactcttaggtcccatttttcttgatatgatgatatctttgagttgcggcttgatatatgtgaatatttgaatgagaaatttactgctgcttgtcacgcaaaatcgcatgtttttgtcggggcttgtgagtttgttgagcttgcatattgaggttttcatgattatgtcaggtcttacggatacttgaag

SEQ ID NO: 41754 - DNA, 2007 bp, Zea Mays
aaaacagaattccacgacgtctcacctgcacacgcgctcgtcgtcgtctcatcggcgcttgctgcgacaactcacgccggtggcttgagcgcgccatcgaccagggttgttacaccaagcgatggcggcggtggccggggatggtggtggtgggcccgaggagggcgtcggcgagagctcgtccccgcctcgcaaccccgtgctcgcgcccgcacccgctgcctctggcgggagcgggagcggtggcggcggccgcggaggtggcctccgggacatctgccgcgaggtgttcgagcgcctcgtcaacgatggccacagggcgggctccgagctccttgcccagctcgaggcccacttcaatcgactccccatcagctacaagctggatgtgaatattgacaaagcagaagatgtgttaatccatcagaaagttttggcagaagcacaggatcctgataggcgcccagcattcactgtccgtttcctcagggtcaaagacatcatatgcacacattcatgagatactattctccaccaaggataaacccaagctcctgagtcagttgtctgctttgctttctgacattggactgaacatcaaggaggcacatgtgttctcaacaacagatggttattctcttgatgtttttgttgttgacggttggcccgttgaggaaactgatggtttgcataaggcactagaagtatcaattttgagaaatgagggttcctggtctggctctgaatcctcagcttccaaaagatcactgccattcctagcacaggattttgaatcagatattgacacaagacttctgaagcttgtaaataagattgcttctggatcttgtggggacatgtttcttgggacctacagtggtgaggaggttgctgttaaagttcttaatcctcagaatttgaacaaaaatgtatggagtgaatttaagcaagaaatcaacatgttaagggaagttgatcatccgaatattgtccgattcattggttcatgcacaaagccacctcagttttacataattacagagtgcatgtctagaggaagtctgtttgatttcttgcacaatgagcataatgtgttggacctcccaacgcttctgaagtttgcactagatgtatgccaagggatgtcctacttgcatcagaaaggcattatccacagagatttaaagtctggcaaccttttattggataaaaatgatgttgttaaagtagccgattttggtctagctcgttttcaggatggagggggtgatatgactgctgaaactgggacctatagatggatggcacctgaggttataaatcatcagccctatgacagcaaagcagatgtatacagttttgctcttgtactttgggagctcatgacatccaagattccatataataccatgacccccctccaagcagctgttggtgtgaggcagggattgcgaccacaaattccagaaaatacgcatccgaggctcataaacttgatgcagagatgttgggaagctactccgactgatcgcccttcatttgaggagatcattcctgaactagaggatatccaggcacaagcacagagaacatcaggggaaacgagccagacagaggaggaccactcatgcagtaaagattgattgaccccctctgtacatacatgttgacaattctctcatctgatcactaaaatgctgagaaagtagcatatcatcagttttgatgccatagaaaaaaagtagcgaatcattttgtcaagttttgtcagaaccttttggggccgacggccaaagctcttggtattatccttgcttcactcttaggtcccatttttcttgatatgatgatatctttgagttgcggcttgatatatgtgaatatttgaatgagaaatttactgctgcttgtcacgcaaaatcgcatgtttttgtcggggcttgtgagtttgttgagcttgcatattgaggttttcatgattatgtcaggtcttacggatacttgaag

SEQ ID NO: 41755 - DNA, 2223 bp, Zea Mays
aaaacagaattccacgacgtctcacctgcacacgcgctcgtcgtcgtctcatcggcgcttgctgcgacaactcacgccggtggcttgagcgcgccatcgaccagggttgttacaccaagcgatggcggcggtggccggggatggtggtggtgggcccgaggagggcgtcggcgagagctcgtccccgcctcgcaaccccgtgctcgcgcccgcacccgctgcctctggcgggagcgggagcggtggcggcggccgcggaggtggcctccgggacatctgccgcgaggtgttcgagcgcctcgtcaacgatggccacagggcgggctccgagctccttgcccagctcgaggcccacttcaatcgactccccatcagctacaagctggatgtgaatattgacaaagcagaagatgtgttaatccatcagaaagttttggcagaagcacaggatcctgataggcgcccagcattcactgtccgtttcctcagggtcaaagacatcatatgcacacattcatgagatactattctccaccaaggataaacccaagctcctgagtcagttgtctgctttgctttctgacattggactgaacatcaaggaggcacatgtgttctcaacaacagatggttattctcttgatgtttttgttgttgacggttggcccgttgaggaaactgatggtttgcataaggcactagaagtatcaattttgagaaatgagggttcctggtctggctctgaatcctcagcttccaaaagatcactgccattcctagcacaggattttgaatcagatattgacacaagacttctgaagcttgtaaataagattgcttctggatcttgtggggacatgtttcttgggacctacagtggtgaggaggttgctgttaaagttcttaatcctcagaatttgaacaaaaatgtatggagtgaatttaagcaagaaatcaacatgttaagggaagttgatcatccgaatattgtccgattcattggttcatgcacaaagccacctcagttttacataattacagagtgcatgtctagaggaagtctgtttgatttcttgcacaatgagcataatgtgttggacctcccaacgcttctgaagtttgcactagatgtatgccaagggatgtcctacttgcatcagaaaggcattatccacagagatttaaagtctggcaaccttttattggataaaaatgatgttgttaaagtagccgattttggtctagctcgttttcaggatggagggggtgatatgactgctgaaactgggacctatagatggatggcacctgaggttataaatcatcagccctatgacagcaaagcagatgtatacagttttgctcttgtactttgggagctcatgacatccaagattccatataataccatgacccccctccaagcagctgttggtgtgaggcaggtcggttcttacaatcttgtgtagcagattttatctgttcatacagttcccactgtcaagttattctacatgaagggggaacaagagtttaattctcgatttgatttcaatgcatgcaaatgcaattctggctagctgtttgagaaggatacagttgtagaaacagtatgttttgaattgtgccaagtatgttgaagattgtactgactgtaccagggattgcgaccacaaattccagaaaatacgcatccgaggctcataaacttgatgcagagatgttgggaagctactccgactgatcgcccttcatttgaggagatcattcctgaactagaggatatccaggcacaagcacagagaacatcaggggaaacgagccagacagaggaggaccactcatgcagtaaagattgattgaccccctctgtacatacatgttgacaattctctcatctgatcactaaaatgctgagaaagtagcatatcatcagttttgatgccatagaaaaaaagtagcgaatcattttgtcaagttttgtcagaaccttttggggccgacggccaaagctcttggtattatccttgcttcactcttaggtcccatttttcttgatatgatgatatctttgagttgcggcttgatatatgtgaatatttgaatgagaaatttactgctgcttgtcacgcaaaatcgcatgtttttgtcggggcttgtgagtttgttgagcttgcatattgaggttttcatgattatgtcaggtcttacggatacttgaag

SEQ ID NO: 41756 - DNA, 1831 bp, Zea Mays
aaaacagaattccacgacgtctcacctgcacacgcgctcgtcgtcgtctcatcggcgcttgctgcgacaactcacgccggtggcttgagcgcgccatcgaccagggttgttacaccaagcgatggcggcggtggccggggatggtggtggtgggcccgaggagggcgtcggcgagagctcgtccccgcctcgcaaccccgtgctcgcgcccgcacccgctgcctctggcgggagcgggagcggtggcggcggccgcggaggtggcctccgggacatctgccgcgaggtgttcgagcgcctcgtcaacgatggccacagggcgggctccgagctccttgcccagctcgaggcccacttcaatcgactccccatcagctacaagctggatgtgaatattgacaaagcagaagatgtgttaatccatcagaaagttttggcagaagcacaggatcctgataggcgcccagcattcactgtccgtttcctcagggtcaaagacatcatatgcacacattcatgagatactattctccaccaaggataaacccaagctcctgagtcagttgtctgctttgctttctgacattggactgaacatcaaggaggcacatgtgttctcaacaacagatggttattctcttgatgtttttgttgttgacggttggcccgttgaggaaactgatggtttgcataaggcactagaagtatcaattttgagaaatgagggttcctggtctggctctgaatcctcagcttccaaaagatcactgccattcctagcacaggattttgaatcagatattgacacaagacttctgaagcttgtaaataagattgcttctggatcttgtggggacatgtttcttgggacctacagtggtgaggaggttgctgttaaagttcttaatcctcagaatttgaacaaaaatgtatggagtgaatttaagcaagaaatcaacatgttaagggaagttgatcatccgaatattgtccgattcattggttcatgcacaaagccacctcagttttacataattacaggttgttaaagtagccgattttggtctagctcgttttcaggatggagggggtgatatgactgctgaaactgggacctatagatggatggcacctgaggttataaatcatcagccctatgacagcaaagcagatgtatacagttttgctcttgtactttgggagctcatgacatccaagattccatataataccatgacccccctccaagcagctgttggtgtgaggcagggattgcgaccacaaattccagaaaatacgcatccgaggctcataaacttgatgcagagatgttgggaagctactccgactgatcgcccttcatttgaggagatcattcctgaactagaggatatccaggcacaagcacagagaacatcaggggaaacgagccagacagaggaggaccactcatgcagtaaagattgattgaccccctctgtacatacatgttgacaattctctcatctgatcactaaaatgctgagaaagtagcatatcatcagttttgatgccatagaaaaaaagtagcgaatcattttgtcaagttttgtcagaaccttttggggccgacggccaaagctcttggtattatccttgcttcactcttaggtcccatttttcttgatatgatgatatctttgagttgcggcttgatatatgtgaatatttgaatgagaaatttactgctgcttgtcacgcaaaatcgcatgtttttgtcggggcttgtgagtttgttgagcttgcatattgaggttttcatgattatgtcaggtcttacggatacttgaag

SEQ ID NO: 41757 - DNA, 1933 bp, Zea Mays
aaaacagaattccacgacgtctcacctgcacacgcgctcgtcgtcgtctcatcggcgcttgctgcgacaactcacgccggtggcttgagcgcgccatcgaccagggttgttacaccaagcgatggcggcggtggccggggatggtggtggtgggcccgaggagggcgtcggcgagagctcgtccccgcctcgcaaccccgtgctcgcgcccgcacccgctgcctctggcgggagcgggagcggtggcggcggccgcggaggtggcctccgggacatctgccgcgaggtgttcgagcgcctcgtcaacgatggccacagggcgggctccgagctccttgcccagctcgaggcccacttcaatcgactccccatcagctacaagctggatgtgaatattgacaaagcagaagatgtgttaatccatcagaaagttttggcagaagcacaggatcctgataggcgcccagcattcactgtccgtttcctcagggtcaaagacatcatatgcacacattcatgagatactattctccaccaaggataaacccaagctcctgagtcagttgtctgctttgctttctgacattggactgaacatcaaggaggcacatgtgttctcaacaacagatggttattctcttgatgtttttgttgttgacggttggcccgttgaggaaactgatggtttgcataaggcactagaagtatcaattttgagaaatgagggttcctggtctggctctgaatcctcagcttccaaaagatcactgccattcctagcacaggattttgaatcagatattgacacaagacttctgaagcttgtaaataagattgcttctggatcttgtggggacatgtttcttgggacctacagtggtgaggaggttgctgttaaagttcttaatcctcagaatttgaacaaaaatgtatggagtgaatttaagcaagaaatcaacatgttaagagtgcatgtctagaggaagtctgtttgatttcttgcacaatgagcataatgtgttggacctcccaacgcttctgaagtttgcactagatgtatgccaagggatgtcctacttgcatcagaaaggcattatccacagagatttaaagtctggcaaccttttattggataaaaatgatgttgttaaagtagccgattttggtctagctcgttttcaggatggagggggtgatatgactgctgaaactgggacctatagatggatggcacctgaggttataaatcatcagccctatgacagcaaagcagatgtatacagttttgctcttgtactttgggagctcatgacatccaagattccatataataccatgacccccctccaagcagctgttggtgtgaggcagggattgcgaccacaaattccagaaaatacgcatccgaggctcataaacttgatgcagagatgttgggaagctactccgactgatcgcccttcatttgaggagatcattcctgaactagaggatatccaggcacaagcacagagaacatcaggggaaacgagccagacagaggaggaccactcatgcagtaaagattgattgaccccctctgtacatacatgttgacaattctctcatctgatcactaaaatgctgagaaagtagcatatcatcagttttgatgccatagaaaaaaagtagcgaatcattttgtcaagttttgtcagaaccttttggggccgacggccaaagctcttggtattatccttgcttcactcttaggtcccatttttcttgatatgatgatatctttgagttgcggcttgatatatgtgaatatttgaatgagaaatttactgctgcttgtcacgcaaaatcgcatgtttttgtcggggcttgtgagtttgttgagcttgcatattgaggttttcatgattatgtcaggtcttacggatacttgaag

SEQ ID NO: 41758 - DNA, 2016 bp, Zea Mays
aaaacagaattccacgacgtctcacctgcacacgcgctcgtcgtcgtctcatcggcgcttgctgcgacaactcacgccggtggcttgagcgcgccatcgaccagggttgttacaccaagcgatggcggcggtggccggggatggtggtggtgggcccgaggagggcgtcggcgagagctcgtccccgcctcgcaaccccgtgctcgcgcccgcacccgctgcctctggcgggagcgggagcggtggcggcggccgcggaggtggcctccgggacatctgccgcgaggtgttcgagcgcctcgtcaacgatggccacagggcgggctccgagctccttgcccagctcgaggcccacttcaatcgactccccatcagctacaagctggatgtgaatattgacaaagcagaagatgtgttaatccatcagaaagttttggcagaagcacaggatcctgataggcgcccagcattcactgtccgtttcctcaggcttgaagaggtaaatgtggacgagacaactaactctgatgcacatgaagaaggggctgatattggtgaagctctttctaccaggtcaaagacatcatatgcacacattcatgagatactattctccaccaaggataaacccaagctcctgagtcagttgtctgctttgctttctgacattggactgaacatcaaggaggcacatgtgttctcaacaacagatggttattctcttgatgtttttgttgttgacggttggcccgttgaggaaactgatggtttgcataaggcactagaagtatcaattttgagaaatgagggttcctggtctggctctgaatcctcagcttccaaaagatcactgccattcctagcacaggattttgaatcagatattgacacaagacttctgaagcttgtaaataagattgcttctggatcttgtggggacatgtttcttgggacctacagtggtgaggaggttgctgttaaagttcttaatcctcagaatttgaacaaaaatgtatggagtgaatttaagcaagaaatcaacatgttaagagtgcatgtctagaggaagtctgtttgatttcttgcacaatgagcataatgtgttggacctcccaacgcttctgaagtttgcactagatgtatgccaagggatgtcctacttgcatcagaaaggcattatccacagagatttaaagtctggcaaccttttattggataaaaatgatgttgttaaagtagccgattttggtctagctcgttttcaggatggagggggtgatatgactgctgaaactgggacctatagatggatggcacctgaggttataaatcatcagccctatgacagcaaagcagatgtatacagttttgctcttgtactttgggagctcatgacatccaagattccatataataccatgacccccctccaagcagctgttggtgtgaggcagggattgcgaccacaaattccagaaaatacgcatccgaggctcataaacttgatgcagagatgttgggaagctactccgactgatcgcccttcatttgaggagatcattcctgaactagaggatatccaggcacaagcacagagaacatcaggggaaacgagccagacagaggaggaccactcatgcagtaaagattgattgaccccctctgtacatacatgttgacaattctctcatctgatcactaaaatgctgagaaagtagcatatcatcagttttgatgccatagaaaaaaagtagcgaatcattttgtcaagttttgtcagaaccttttggggccgacggccaaagctcttggtattatccttgcttcactcttaggtcccatttttcttgatatgatgatatctttgagttgcggcttgatatatgtgaatatttgaatgagaaatttactgctgcttgtcacgcaaaatcgcatgtttttgtcggggcttgtgagtttgttgagcttgcatattgaggttttcatgattatgtcaggtcttacggatacttgaag

SEQ ID NO: 41759 - DNA, 984 bp, Zea Mays
acccaccaagtctctcctgtcctgtccaagtaataaagcaccgaaaccggccgccgacgaccaagacctgcaaccgatggaaggcattcagcagctgccagcggacgtcctcgtgtcggtgatctcccgcgccgccgcggggccgagggatgcctgcatcgccgccacggtgtcgccggcgttccgcgccgcggccgactccgacaccgtgtggtcacgcttcctcccggctgacctcgccccgctcgtctacccgacgcctccgccaagatccaagaaggagctcttccttcgcctctctgaaacccatgccctcgttgaagatggcctcatgagcgcgtggctggacagggagaccggcgccaagtcctatatgattgcggccagggctatggctattatctgggtcgacacgccggactactggcgctggatagtgcgcgaagactcaaggatgctgtcaggtgacacgcgctatgcagcctacctggtattcaagatggccgatgactgctttggcctggattctcctcttcaggaggcatcggtcagcgtcggagaggggggcacatcaacggcccactggatcagactacagagctaccacgtcggcgacgaagagaacggcgtaaccgaggaaggagctccacctaggctcccacatgagaggcctgatggctggatggaggtggagctaggagactggtacaaccatggaggcgacgacgacctagtggttcgtgccagtgtgaaggaggccaggtttggaggcaactggaagaaagggcttattgttcagggccttgagattagacctaagaactgattgagggctggttgatcataaaattatatgtatatgtctcagtttggagtgcattcatgttggagctattatgtaataatacgcctgcaggctgcagccgttcctgatgcagggatttttttttcgtctctgcattccttgcgccaaaaataagcttt

SEQ ID NO: 41760 - DNA, 760 bp, Zea Mays
cgaagatttacaatagcttaatttctgaaagacactgcttctactgtgtttgcaaggtcatgtttagtttctgaaaaaaaaatgcaaggtcctgcttctactgtgtttgcaaggtcatacttaatttcttatttaaaattgtagtggtatacagagaattttctctactatataggtaaaaaggctacagaagccaattgaaccgcctgaactaattaagatgtcttctctttccaacagatgtcctatttccagttcatcctctcatgaagttaatacatcagaaaattcaattgctttatatctgctaggagaaaatccagttttccctatagaaatgtgaatacctaacctaaaacacagtttaaacacgaagacttgtgataacattgttgttcaaaggccttctgaaaacagagatagttcatgaaaaaattatctaaactatgtacatcagaggccaccttctgaatgcaataaccaatgccatggcattccaagagtaaaaatagtgctattaaccaaccagtaaaccaaaataaaggggcttcaaactttatcagagacctagatcatttatttacacagaaatgtggttatgcatgtaaaggggatcaaacataaaccaaatgcaatgaaacagcagaaaaacggtttgaagtgatgggttggactaggttagtcctttgaccaaggaatcatggcataatgtaatgaactatacatatgttcgtcaaaagtcagaaagtgaacctgttaa

SEQ ID NO: 41761 - DNA, 905 bp, Zea Mays
cgcacccgcccacagtttctgcccgccgccgtgcgtgacacgcgggttccacgtttcttgcccagcatgtcagagagagcggccggacggacacgcgcggcgcggtgctttcagttcgtgctccagcttttccgtctagtttaatggtttttcctagtcgtcctccgtcctcctcagctctggctgccaaccccaagaagagaacagccttgcctagtcactaggccctagtgtgcccattgcctagggaaggaggaacccaaggagaggtgcgcggctggtggcatgcgagtggcagcggtgccgcgggactcttctcctcgctggccgtgcgcgccgtgccccgacgcgtggtttgctgtgcttcatcgtctgggacttaatgtccctgcgccatcacatgacgatgataaattccaagcatggtggtgatgaagcatgaggagggtgcccaaggcagcaaggaagggactaaacacatagtcatcatcattgcttggacgatcttgaaacattggaatcagtgtgtgtttgatgtcatgtcactgtcggagctgacgatgttgcatgagtcgaacgagccatgtcacctctgggacatcagttgggctatgctgtttctatctaatttaaagggctgtactgagctctctcctaggacattagctgggctatgctgtttctatctactttaatgggggcagatgtacaagaaaactaaccaaagccgtggaatcagcatgtattcggactgttttgtctatctattaatgaaataatatgcagtcctcctgcgtgtttgagaaaaaaatgccgcctcactaatttaggaaaaaaaatcaatgacctaggtaaaatggctccccgcaacttcaattacagctctcattactttactcgatcca

SEQ ID NO: 41762 - DNA, 2032 bp, Zea Mays
cccagcatgtcagagagagcggccggacggacacgcgcggcgcggtgctttcagttcgtgctccagcttttccgtctagtttaatggtttttcctagtcgtcctccgtcctcctcagctctggctgccaaccccaagaagagaacagccttgcctagtcactaggccctagtgtgcccattgcctagggaaggaggaacccaaggagaggtgcgcggctggtggcatgcgagtggcagcggtgccgcgggactcttctcctcgctggccgtgcgcgccgtgccccgacggaatccaggtgacaccctgatattgatgtgaagttttgtggaacctcctgcatccttatatggtattaacaataatttaattgtctgggtgatccatttgagcaaatggaaggcaacgacctaccccctggaaacatgttgcaaggggctccctatgatagtttagacttacatggcgactctatggcaaaacatgccccaaactcaggaaaacagatcttcagcagctcccagatgccggggactttcacaatgtctatgaccagggctacagaacctgatgactttcctgggtttcagttcaaagaacatggaaagagtgatgaccaccaccaccaccaataccatagtcatcaccaaaagaactgcatgagtgatggtgaagaacatgatatggctgaagatgctactgataccccaagtggaaaaggcaagaagggctctgcatggcatcggatgaagtggacagattcaatggtaaaacttttgattacagcagtgtcttacactggagatgatcatggtgctgattctggtggtggcaggaggaacattgcaataacgcagaagaagggcaaatggaaggcgatatcgaaggttatgggagagagaggttgccatgtgtcaccgcaacagtgcgaggacaagttcaatgaccttaacaagagatacaaaaggctgatagacatccttggcatgggcactgcttgcaatgttgtggctaatccagcacttcttgatagcatgaatcatctttctgataagatgaaagacaatgcaaaaaagatacttagctcaaagcacttattttatgaggagatgtgttcctaccacaacaacaaccgtgcaaatttgcctgaagatcatgcacttcagcattcactactgcttgcccttagatgtaaagaggagcatgatcttcggagagcaagtggagatgctgatgaagacgatcgaagtgcggattctgattatggggagaatgatgaagagcaatatcctgtgcatacacgcatgagggagccctcaaccaccaaaaggaagcgccacagagatgtggctttggtcacatcaaactctcatgaaggcagtgagaggtctgatccccatgatgtaacagtggacatcaacaaggctttcacagatgcaaccaacatggttttgttgcaacaggacttggcttcacaagccatagagattcagaaacgtcgcttgcagattgaagcaaaggaactggaactcacaaagcaacgtcacaagtgggagcggttcaggaagaagaaggacagggagatagaaagaatggcactggagaatgaacatatggtgattgagaacaaacgcttggaacttgagctgagacataaggagttagagctagagcttaagctgaaaggcaaggggaaccatccataacttaattcttgatcaacactacaatatttaagatggtaaacaagtcacggttgagcttctggaagataaaggtggtagattagagcagaacctgacaaccatttctgtgcgtatgacttttgttctgtgtttttctgccctgtgtcatgtactggttgggcctcctgcatgtttaccctttctgcggcagtagtattgggcttgatgtgatctgtaagactgttacttccatcttgcccagtgtttcaatttttttcgtcagcatgtatatcgaggtgatgcgatgatgtgaaggtagtggaaggtctgctgatccacattggcttc

SEQ ID NO: 41763 - DNA, 1763 bp, Zea Mays
ggacggacacgcgcggcgcggtgctttcagttcgtgctccagcttttccgtctagtttaatggtttttcctagtcgtcctccgtcctcctcagctctggctgccaaccccaagaagagaacagccttgcctagtcactaggccctagtgtgcccattgcctagggaaggaggaacccaaggagaggtgcgcggctggtggcatgcgagtggcagcggtgccgcgggactcttctcctcgctggccgtgcgcgccgtgccccgacggaatccaggtgacaccctgatattgatgtgaagttttgtggaacctcctgcatccttatatggtattaacaataatttaattgtctgggtgatccatttgagcaaatggaaggcaacgacctaccccctggaaacatgttgcaaggggctccctatgatagtttagacttacatggcgactctatggcaaaacatgccccaaactcaggaaaacagatcttcagcagctcccagatgccggggactttcacaatgtctatgaccagggctacagaacctgatgactttcctgggtttcagttcaaagaacatggaaagagtgatgaccaccaccaccaccaataccatagtcatcaccaaaagaactgcatgagtgatggtgaagaacatgatatggctgaagatgctactgataccccaagtggaaaaggcaagaagggctctgcatggcatcggatgaagtggacagattcaatggtaaaacttttgattacagcagtgtcttacactggagatgatcatggtgctgattctggtggtggcaggaggaacattgcaataacgcagaagaagggcaaatggaaggcgatatcgaaggttatgggagagagaggttgccatgtgtcaccgcaacagtgcgaggacaagttcaatgaccttaacaagagatacaaaaggctgatagacatccttggcatgggcactgcttgcaatgttgtggctaatccagcacttcttgatagcatgaatcatctttctgataagatgaaagacaatgcaaaaaagatacttagctcaaagcacttattttatgaggagatgtgttcctaccacaacaacaaccgtgcaaatttgcctgaagatcatgcacttcagcattcactactgcttgcccttagatgtaaagaggagcatgatcttcggagagcaagtggagatgctgatgaagacgatcgaagtgcggattctgattatggggagaatgatgaagagcaatatcctgtgcatacacgcatgagggagccctcaaccaccaaaaggaagcgccacagagatgtggctttggtcacatcaaactctcatgaaggcagtgagaggtctgatccccatgatgtaacagtggacatcaacaaggctttcacagatgcaaccaacatggttttgttgcaacaggacttggcttcacaagccatagagattcagaaacgtcgcttgcagattgaagcaaaggaactggaactcacaaagcaacgtcacaagtgggagcggttcaggaagaagaaggacagggagatagaaagaatggcactggagaatgaacatatggtgattgagaacaaacgcttggaacttgagctgagacataaggagttagagctagagcttaagctgaaaggcaaggggaaccatccataacttaattcttgatcaacactacaatatttaagatggtaaacaagaataacagactatttacatcaagtgtggaagaattgtg

SEQ ID NO: 41764 - DNA, 2167 bp, Zea Mays
gttcgtgctccagcttttccgtctagtttaatggtttttcctagtcgtcctccgtcctcctcagctctggctgccaaccccaagaagagaacagccttgcctagtcactaggccctagtgtgcccattgcctagggaaggaggaacccaaggagaggtgcgcggctggtggcatgcgagtggcagcggtgccgcgggactcttctcctcgctggccgtgcgcgccgtgccccgacggaatccaggtgacaccctgatattgatgtgaagttttgtggaacctcctgcatccttatatggtattaacaataatttaattgtctgggtgatccatttgagcaaatggaaggcaacgacctaccccctggaaacatgttgcaaggggctccctatgatagtttagacttacatggcgactctatggcaaaacatgccccaaactcaggaaaacagatcttcagcagctcccagatgccggggactttcacaatgtctatgaccagggctacagaacctgatgactttcctgggtttcagttcaaagaacatggaaagagtgatgaccaccaccaccaccaataccatagtcatcaccaaaagaactgcatgagtgatggtgaagaacatgatatggctgaagatgctactgataccccaagtggaaaaggcaagaagggctctgcatggcatcggatgaagtggacagattcaatggtaaaacttttgattacagcagtgtcttacactggagatgatcatggtgctgattctggtggtggcaggaggaacattgcaataacgcagaagaagggcaaatggaaggcgatatcgaaggttatgggagagagaggttgccatgtgtcaccgcaacagtgcgaggacaagttcaatgaccttaacaagagatacaaaaggctgatagacatccttggcatgggcactgcttgcaatgttgtggctaatccagcacttcttgatagcatgaatcatctttctgataagatgaaagacaatgcaaaaaagatacttagctcaaagcacttattttatgaggagatgtgttcctaccacaacaacaaccgtgcaaatttgcctgaagatcatgcacttcagcattcactactgcttgcccttagatgtaaagaggagcatgatcttcggagagcaagtggagatgctgatgaagacgatcgaagtgcggattctgattatggggagaatgatgaagagcaatatcctgtgcatacacgcatgagggagccctcaaccaccaaaaggaagcgccacagagatgtggctttggtcacatcaaactctcatgaaggcagtgagaggtctgatccccatgatgtaacagtggacatcaacaaggctttcacagatgcaaccaacatggttttgttgcaacaggacttggcttcacaagccatagagattcagaaacgtcgcttgcagattgaagcaaaggaactggaactcacaaagcaacgtcacaagtgggagcggttcaggaagaagaaggacagggagatagaaagaatggcactggagaatgaacatatggtgattgagaacaaacgcttggaacttgagctgagacataaggagttagagctagagcttaagctgaaaggcaaggggaaccatccataacttaattcttgatcaacactacaatatttaagatggtaaacaagcatctcttcctaccagctacttcgcagaagccctgaacactgctacccatctccttaaccaccggagggagggcgtgcgggggcccctgtcgacagagggtgaggggccttgcctccggagggcgcccgaccaccagatggcacaccgtagagggctatggtggaggcaggggactaagtctccaaggtcacggttgagcttctggaagataaaggtggtagattagagcagaacctgacaaccatttctgtgcgtatgacttttgttctgtgtttttctgccctgtgtcatgtactggttgggcctcctgcatgtttaccctttctgcggcagtagtattgggcttgatgtgatctgtaagactgttacttccatcttgcccagtgtttcaatttttttcgtcagcatgtatatcgaggtgatgcgatgatgtgaaggtagtggaaggtctgctgatccacattggcttc

SEQ ID NO: 41765 - DNA, 2234 bp, Zea Mays
gttcgtgctccagcttttccgtctagtttaatggtttttcctagtcgtcctccgtcctcctcagctctggctgccaaccccaagaagagaacagccttgcctagtcactaggccctagtgtgcccattgcctagggaaggaggaacccaaggagaggtgcgcggctggtggcatgcgagtggcagcggtgccgcgggactcttctcctcgctggccgtgcgcgccgtgccccgacggaagatttgctgagctgaatggtctcactcgtataccactctgcaaaattatctctagagaaatatggaatccaggtgacaccctgatattgatgtgaagttttgtggaacctcctgcatccttatatggtattaacaataatttaattgtctgggtgatccatttgagcaaatggaaggcaacgacctaccccctggaaacatgttgcaaggggctccctatgatagtttagacttacatggcgactctatggcaaaacatgccccaaactcaggaaaacagatcttcagcagctcccagatgccggggactttcacaatgtctatgaccagggctacagaacctgatgactttcctgggtttcagttcaaagaacatggaaagagtgatgaccaccaccaccaccaataccatagtcatcaccaaaagaactgcatgagtgatggtgaagaacatgatatggctgaagatgctactgataccccaagtggaaaaggcaagaagggctctgcatggcatcggatgaagtggacagattcaatggtaaaacttttgattacagcagtgtcttacactggagatgatcatggtgctgattctggtggtggcaggaggaacattgcaataacgcagaagaagggcaaatggaaggcgatatcgaaggttatgggagagagaggttgccatgtgtcaccgcaacagtgcgaggacaagttcaatgaccttaacaagagatacaaaaggctgatagacatccttggcatgggcactgcttgcaatgttgtggctaatccagcacttcttgatagcatgaatcatctttctgataagatgaaagacaatgcaaaaaagatacttagctcaaagcacttattttatgaggagatgtgttcctaccacaacaacaaccgtgcaaatttgcctgaagatcatgcacttcagcattcactactgcttgcccttagatgtaaagaggagcatgatcttcggagagcaagtggagatgctgatgaagacgatcgaagtgcggattctgattatggggagaatgatgaagagcaatatcctgtgcatacacgcatgagggagccctcaaccaccaaaaggaagcgccacagagatgtggctttggtcacatcaaactctcatgaaggcagtgagaggtctgatccccatgatgtaacagtggacatcaacaaggctttcacagatgcaaccaacatggttttgttgcaacaggacttggcttcacaagccatagagattcagaaacgtcgcttgcagattgaagcaaaggaactggaactcacaaagcaacgtcacaagtgggagcggttcaggaagaagaaggacagggagatagaaagaatggcactggagaatgaacatatggtgattgagaacaaacgcttggaacttgagctgagacataaggagttagagctagagcttaagctgaaaggcaaggggaaccatccataacttaattcttgatcaacactacaatatttaagatggtaaacaagcatctcttcctaccagctacttcgcagaagccctgaacactgctacccatctccttaaccaccggagggagggcgtgcgggggcccctgtcgacagagggtgaggggccttgcctccggagggcgcccgaccaccagatggcacaccgtagagggctatggtggaggcaggggactaagtctccaaggtcacggttgagcttctggaagataaaggtggtagattagagcagaacctgacaaccatttctgtgcgtatgacttttgttctgtgtttttctgccctgtgtcatgtactggttgggcctcctgcatgtttaccctttctgcggcagtagtattgggcttgatgtgatctgtaagactgttacttccatcttgcccagtgtttcaatttttttcgtcagcatgtatatcgaggtgatgcgatgatgtgaaggtagtggaaggtctgctgatccacattggcttc

SEQ ID NO: 41766 - DNA, 1808 bp, Zea Mays
gttcgtgctccagcttttccgtctagtttaatggtttttcctagtcgtcctccgtcctcctcagctctggctgccaaccccaagaagagaacagccttgcctagtcactaggccctagtgtgcccattgcctagggaaggaggaacccaaggagaggtgcgcggctggtggcatgcgagtggcagcggtgccgcgggactcttctcctcgctggccgtgcgcgccgtgccccgacggaatccaggtgacaccctgatattgatgtgaagttttgtggaacctcctgcatccttatatggtattaacaataatttaattgtctgggtgatccatttgagcaaatggaaggcaacgacctaccccctggaaacatgttgcaaggggctccctatgatagtttagacttacatggcgactctatggcaaaacatgccccaaactcaggaaaacagatcttcagcagctcccagatgccggggactttcacaatgtctatgaccagggctacagaacctgatgactttcctgggtttcagttcaaagaacatggaaagagtgatgaccaccaccaccaccaataccatagtcatcaccaaaagaactgcatgagtgatggtgaagaacatgatatggctgaagatgctactgataccccaagtggaaaaggcaagaagggctctgcatggcatcggatgaagtggacagattcaatggtaaaacttttgattacagcagtgtcttacactggagatgatcatggtgctgattctggtggtggcaggaggaacattgcaataacgcagaagaagggcaaatggaaggcgatatcgaaggttatgggagagagaggttgccatgtgtcaccgcaacagtgcgaggacaagttcaatgaccttaacaagagatacaaaaggctgatagacatccttggcatgggcactgcttgcaatgttgtggctaatccagcacttcttgatagcatgaatcatctttctgataagatgaaagacaatgcaaaaaagatacttagctcaaagcacttattttatgaggagatgtgttcctaccacaacaacaaccgtgcaaatttgcctgaagatcatgcacttcagcattcactactgcttgcccttagatgtaaagaggagcatgatcttcggagagcaagtggagatgctgatgaagacgatcgaagtgcggattctgattatggggagaatgatgaagagcaatatcctgtgcatacacgcatgagggagccctcaaccaccaaaaggaagcgccacagagatgtggctttggtcacatcaaactctcatgaaggcagtgagaggtctgatccccatgatgtaacagtggacatcaacaaggctttcacagatgcaaccaacatggttttgttgcaacaggacttggcttcacaagccatagagattcagaaacgtcgcttgcagattgaagcaaaggaactggaactcacaaagcaacgtcacaagtgggagcggttcaggaagaagaaggacagggagatagaaagaatggcactggagaatgaacatatggtgattgagaacaaacgcttggaacttgagctgagacataaggagttagagctagagcttaagctgaaaggcaaggggaaccatccataacttaattcttgatcaacactacaatatttaagatggtaaacaagtcacggttgagcttctggaagataaaggtggtagattagagcagaacctgacaaccatttcttaggcacacgtggatcatcaatcaaatgaaaagcaagaccatgacctcgc

SEQ ID NO: 41767 - DNA, 2891 bp, Zea Mays
taataatgtgttatgcatctagtacggaaaatgacacgggaggaggcgcatccgctacgcgcacacgagctgtgcggtactgctcgctcatgcagccactgccacgctaccaccgcttcctttcctcttcggctgctccgcctcgcctcccagttcacagcccctcccaggctccgaatcggcggccacttctcattcctcacttccgtcctcgcgcaccaccccctccatccgttccggatggtgccttcgaaatcccgtccggcgccctagcgtagctcgggctcggccaggctccgggcccgccgcgccgttccgcagtccagctccacctccagaatggtacggttagtaaattgaggttggtggtgggttggtggccatactaggggaagatcttttcttgagtttaaggaagatgcttgcctttatttagaaggccctttttgagggaaatctcatggtgctgtccatgagctgcacgacccagtgcttgtggtacagagtagctgctgggctagcttgcctcctgaattacttcgagatgtgattgagaggttggagaccagtgaggatacatggccttctaggaaacatgtagttgcttgtgcagctgtctgcagaacatggagagagatgtgtagagagattgtcaagagcccagagttttctggaaaaatcacttttcctgtttccttgaagcagcctgggcctcgagatggaactattcagtgttttattaagagggatacatctacccaaatctacagtctgtaccttagttttagctctgccgtgcctgtcgaaaatggcaaattccttctatccgcaaaaaggaactgccgtgcaacatatacagaatatataatatcaataaattctggtgatacatctaggtgtacaagtaacaacacatacattgggaaattaaggtcaaatttccttggcacaaaatttgtaatatacgatactcatccgccatacaatggaactagtcaaacagtggcagggaaaacaagtcagagattctactccaagaagggatcaaccaaggtttcttgcaggtggtacagtattgcacaaatctcatacgagctgaatgtcttgggaactcgaggcccaaggcggatgaactgtgtaatgcactccatcccagcttcatgccttgaggctggtggcagtgtcccttgccagccggacagcattgcagcccactctgttggcggatcattcagcagtgtgtccttgtcaaagtcatcgactatggaccactctatgcatttcaccagttcccggctctctgatgccataacaggagatggcattgtgaacagaggccaggcattgaatgatgctgacgatgaagagtgcaaggacatgcctttgatcctccgcaacaaggccccaaggtggcacgagcagcttcagtgctggtgcctcaacttccggggccgggtgactgtcgcctcggtcaagaacttccagctagtcgcggcgacacagcctgccgccggagccctgaccccatcacaggcagccccgcagccagctccgcctcctccgccggaccaagagaaggtcatactgcagtttgggaaggtcggcaaggacatcttcaccatggactactgctacccgctgtcagccttccaggccttcgccatctgcctgagcagcttcgacaccaagttggcctgcgaataaatcctacctacaattctggtacctaccaaataatcaaaaacactgattgtcgtggtgttcgtccaagaaccgagtttagctgagacgccattgggcaccatgtgctggtgccttgttaactcagaaacgcgtgggggctgaatctgtttcagcagcttccttgtgataatctgtagctgctgcttcgctgctgttgtatcctatgctttcatttctttccggttccgctgtagcttcttaccccccggtgacattagttcggtacccgtatctggatatttttttagccttcttcgttggattgttcaccggtgatggcatgtattaacagagatagttacatacagatgtaatgaattcaggtctggataattttgctttcggttgctattggaaaaggatgtgatggctgctgtcatctttggactgctgatgtttcttttgctgtcaccttcagcagggtcatcagggaggtgactgatgaggtgtttatttgtttgttttgcttcaaagcgaggcctttagcacggacttttcgcgacgagtaaataaagctacacagataattgcaggcggagagagtaaccaaaatcttggggcgcaggtcgggagaaagatccgaaaggccaatgcaaatgcgatacagacgcacgctagttgctaatgctagctaccctcctcggtgctccccttgctcctgtggcgtgcgggaaaaaggcaacttaacaccagcatcgtccgaggcagcagcaacggacgactccacaagatcaaggtatctcaccgatagccaacagctgctgacatttttaatggaaccaacctctccacacctccagcatgggacaccaaatacttcactcggagatttatcaactgcgatgaagcaaacatctacaggtcttccaggctgcaagaattcgaaacaacacagcgcatgtactagctaatcaagcttatcactacacatctatgtacactcagcatacgagggcttcttgctccaatcaggctcatgtaaacagctgtcccttggcctcgtttggttgcaccgggatcagagagggctgaggggattaaatcatttccttaattttgaataggaaatgatttcatcccctataatcaccttcaatccctgccaaaccgaataaaccataagattttgtttggatactctcgtattt

SEQ ID NO: 41768 - DNA, 867 bp, Zea Mays
cgcatccgctacgcgcacacgagctgtgcggtactgctcgctcatgcagccactgccacgctaccaccgcttcctttcctcttcggctgctccgcctcgcctcccagttcacagcccctcccaggctccgaatcggcggccacttctcattcctcacttccgtcctcgcgcaccaccccctccatccgttccggatggtgccttcgaaatcccgtccggcgccctagcgtagctcgggctcggccaggctccgggcccgccgcgccgttccgcagtccagctccacctccagatcttttcttgagtttaaggaagatgcttgcctttatttagaaggccctttttggtacgtcagcagtgttctttcctataggagtaaatgccattccgtagcatcgtgcgtgatgtaagggatggtttcgggagcttgtctaggaggggatttgaggtcaggtttctgagtcatcgcagagggaaatctcatggtgctgtccatgagctgcacgacccagtgcttgtggtacagagtagctgctgggctagcttgcctcctgaattacttcgagatgtgattgagaggttggagaccagtgaggatacatggccttctaggaaacatgtagttgcttgtgcagctgtctgcagaacatggagagagatgtgtagagagattgtcaagagcccagagttttctggaaaaatcacttttcctgtttccttgaagcagcctgggcctcgagatggaactattcagtgttttattaagagggatacatctacccaaatctacagtctgtaccttagttttagctctgttgtcacagactcacagtatcaggctcaatattccatagaaaaagggagacg

SEQ ID NO: 41769 - DNA, 4163 bp, Zea Mays
cgcatccgctacgcgcacacgagctgtgcggtactgctcgctcatgcagccactgccacgctaccaccgcttcctttcctcttcggctgctccgcctcgcctcccagttcacagcccctcccaggctccgaatcggcggccacttctcattcctcacttccgtcctcgcgcaccaccccctccatccgttccggatggtgccttcgaaatcccgtccggcgccctagcgtagctcgggctcggccaggctccgggcccgccgcgccgttccgcagtccagctccacctccaggtgcgtgccacgcagatccgtgccgcctccgccgattgtagagggtttgcgttgttgcgcgttttcagtttggtttacgcggaaaagagaggtttctttagtgcttttctccagccgattcagccggtttggtggatgctgatggatactagctcgttttaggtaaatttggcgcgatttgtgtgaaaagtaggcgcttttgactgttcacttcgttattatgtttcgtacagatgcggttgctagagaaagattttctactcattttggggcagccttcattcatcgaatgtagtggttagtgaaacgcaatactagatagatgttgttgtacccctgcccggcgtaaataattgtgcctgtgggctgtggtcattttcgtgtgcctcctaagttaaatctgaactgtttctctttaggcaatctctagtagcactgttggtctgatatgaactttatttacatgtgatgcatatgcttctgctattattgtactgtcttgtccttttttttctgtagtggttactagtggaagtttagcacactgattccgtcatagtgggatccttgccaaatgaagtgtccatccaaccaacccaactaactgtactgaaatctcattgctttcagaatggtacggttagtaaattgaggttggtggtgggttggtggccatactaggggaaggtacgtgtttgttctttatagatggtgacttggtttcaacctgagggttttgcccttgatgataggttgtcatagaattagtgggatatatgatggtttaatcacagtgactaaaatctggattctaaattgctaatagtagaaacagtagctatctagtgccggtagtgtttgggggtgtcttttgggctatgctgatgtggtgggttggagttgatattgtggttgttttgtatggcacattgttcaaatactgccaatatgagctactttttatgtttcatttttcctcgaggtaggttagtagatgtctggaatggatattgccaactaaatgtttttcctgtttcttaatgaaataaatgttttcctgttccagggatatttttgaattgttactaacagactaattttatcttctagatcttttcttgagtttaaggaagatgcttgcctttatttagaaggccctttttggtacgtcagcagtgttctttcctataggagtaaatgccattccgtagcatcgtgcgtgatgtaagggatggtttcgggagcttgtctaggaggggatttgaggtcaggtttctgagtcatcgcagagggaaatctcatggtgctgtccatgagctgcacgacccagtgcttgtggtacagagtagctgctgggctagcttgcctcctgaattacttcgagatgtgattgagaggttggagaccagtgaggatacatggccttctaggaaacatgtagttgcttgtgcagctgtctgcagaacatggagagagatgtgtagagagattgtcaagagcccagagttttctggaaaaatcacttttcctgtttccttgaagcaggtaatcatgcagctatgttataccttattatccatatatactgattccgttaccgttgtcaatactccatgtacagtattggtatgccaatcatatttggataatctaataagctcatgctgttcctcttctgtctacagcctgggcctcgagatggaactattcagtgttttattaagagggatacatctacccaaatctacagtctgtaccttagttttagctctgccgtgcctgtcgaaaatggcaaattccttctatccgcaaaaaggaactgccgtgcaacatatacagaatatataatatcaataaattctggtgatacatctaggtgtacaagtaacaacacatacattgggaaattaaggtcaaatttccttggcacaaaatttgtaatatacgatactcatccgccatacaatggaactagtcaaacagtggcagggaaaacaagtcagagattctactccaagaagggatcaaccaaggtttcttgcaggtggtacagtattgcacaaatctcatacgagctgaatgtcttgggaactcgaggcccaaggcggatgaactgtgtaatgcactccatcccagcttcatgccttgaggctggtggcagtgtcccttgccagccggacagcattgcagcccactctgttggcggatcattcagcagtgtgtccttgtcaaagtcatcgactatggaccactctatgcatttcaccagttcccggctctctgatgccataacaggagatggcattgtgaacagaggccaggcattgaatgatgctgacgatgaagagtgcaaggacatgcctttgatcctccgcaacaaggccccaaggtggcacgagcagcttcagtgctggtgcctcaacttccggggccgggtgactgtcgcctcggtcaagaacttccagctagtcgcggcgacacagcctgccgccggagccctgaccccatcacaggcagccccgcagccagctccgcctcctccgccggaccaagagaaggtcatactgcagtttgggaaggtcggcaaggacatcttcaccatggactactgctacccgctgtcagccttccaggccttcgccatctgcctgagcagcttcgacaccaagttggcctgcgaataaatcctacctacaattctggtacctaccaaataatcaaaaacactgattgtcgtggtgttcgtccaagaaccgagtttagctgagacgccattgggcaccatgtgctggtgccttgttaactcagaaacgcgtgggggctgaatctgtttcagcagcttccttgtgataatctgtagctgctgcttcgctgctgttgtatcctatgctttcatttctttccggttccgctgtagcttcttaccccccggtgacattagttcggtacccgtatctggatatttttttagccttcttcgttggattgttcaccggtgatggcatgtattaacagagatagttacatacagatgtaatgaattcaggtctggataattttgctttcggttgctattggaaaaggatgtgatggctgctgtcatctttggactgctgatgtttcttttgctgtcaccttcagcagggtcatcagggaggtgactgatgaggtgtttatttgtttgttttgcttcaaagcgaggcctttagcacggacttttcgcgacgagtaaataaagctacacagataattgcaggcggagagagtaaccaaaatcttggggcgcaggtcgggagaaagatccgaaaggccaatgcaaatgcgatacagacgcacgctagttgctaatgctagctaccctcctcggtgctccccttgctcctgtggcgtgcgggaaaaaggcaacttaacaccagcatcgtccgaggcagcagcaacggacgactccacaagatcaaggtatctcaccgatagccaacagctgctgacatttttaatggaaccaacctctccacacctccagcatgggacaccaaatacttcactcggagatttatcaactgcgatgaagcaaacatctacaggtcttccaggctgcaagaattcgaaacaacacagcgcatgtactagctaatcaagcttatcactacacatctatgtacactcagcatacgagggcttcttgctccaatcaggctcatgtaaacagctgtcccttggcctcgtttggttgcaccgggatcagagagggctgaggggattaaatcatttccttaattttgaataggaaatgatttcatcccctataatcaccttcaatccctgccaaaccgaataaaccataagattttgtttggatactctcgtattt

SEQ ID NO: 41770 - DNA, 2926 bp, Zea Mays
gtctcgccggcgtcgattcgccgccgtgtggcgatccctgcacggacgtcggtcggtcgccatggagacggcgcatgaggtggccatttacatcgaccgcttccacaacctggacctgttccagcaagggtatcaaggattcggagagagaccaaaaaaaaaaaaatccccagtccctttctttttttccctttgaagaacatgttaactttctcgtatttttttaacggcattcgtttttcgactcccctcgatgggtagaaaaagatatgcattgcattgtttgtcgatttggagagcaaatatttttggcctttgattttttttttgttcgcatgcagatggtaccgcgtgaagattagtgccctgtgggaggatgacgagaatcgagcacccatctcgccggccagggtcacgcaatacgaagctattgatattggtgtgaagagctcatttggcttttggaaaatagacgatgttgacaatagcttctacacacagccgtttcttgttaaatattctaggcaagatatttatctatcagttatggtgtccttctacatacccaacagcgaagacgagggtccagcaacttcttctgttatattgaagttcgagctcatatatatcccaacactggggaatgcatggactgacgttcaagattcaagtgatgatacagatttgatccctgtccatgaatttaggatcccacatagagcactcctaggcttacactcgtattgccctgtccattttgacgcattacactcggcgctagtggatctgacaatacacattgtctacctgaaagctgctgtgactaaatcatcactgaaggtacacagccgctggaacaaagttttggctcaaagtcatatggtattgtgaaagcatcactaatatctagggaaatacttcttgaagaagtgaagaagatcagtaatgctgttggtagcactcttgaggatttggatcgcactgacttaacccttggtaaatatgagacagttcaaccatcaaagtcagcttcgcccagttacagttatgggcagggtacgcccacaaagtgtagtccccagatgactggcatcttacgtgattttcttgagagttctggggttgtggttggaagcactgatgatatcttgctgtatactctatctgaggaagaattgtttgaactatttcaaattgtcagcagccaactctcatttatatggaatgagttcttgaaattccataggacacataaagacaaggtaatgggttatttgcatgatatgtgggatattaatcggaaagcagaatggtcaatatggattattcattcaaagattgagattccacatcgctatttgagaagcatgaatgacgactctcctcgccatttgattcggatttccagttcaagaaagcctatacaaaattcgatgtcacaggctgaactgcacaggaaaagtatagcacaaatgaagattaacacgccgtctgttcaagatatgcatatttatgctgatccttcatgtatacctgttgtccgcatagagcagcatgtcatggttattccgcaacattgttctagcaaggattttctaacagatgcttcagaaccagctcgtactattgtgccaccacctctactacaaggacaatcattgggggaagaaacttgtggtttcaagagtggacgcattttacgagctgtcatttttgtgcatggatttcaggggcatcatctggatttacgtcttgttaagaaccaatggcttttgcttgatcctggggctgagtgcctattgtctcagataaatgaggatagaacgtctggggattttaaagaaatgggtagaaggctcgctaatgaagtagtggcattcctcaaaaggaaggtggacaagtactccagaaatggaggttgcaaagagattaagctcagttttgtcggtcattctattgggaacattatcctcagaagtgccctcacaggtagattcaaactggcggcttcaaaaatatttcccccttcctagcagttgtgtgaatatggctaatctgttccttccatctcaaaagaacccaaattgcagccatttttgaagaacctgtatacatacatgtccatatcgggacctcacttgggttactggtacagcccaaattctctgttcaactctggcctctggctcatgaaacggctcaagggcatgcagtgcatgcatcagctcactttcagtgatgaccacgacccacagaacacgttcttttacaagctctgcaagctgaagacactggagaacttcaagaacatcatcctggtatcgtcaccgcaggatggttacgtcccataccattcagcaagaatcgacctctgccacgcctcgtcgtcagataactcgaaacgcgggcaggtgttcactgagatgctgaacaattgcttggaccagatccgggcaccaacgtcggaaactcgggtattcatgcgttgtgacgtgatattcgaccagtccgcccaaggacggaacctgaacaccatgatcggcagagctgcgcacatagagttcctggagaacgacatctatgcaaggttcatcatgtggtccttcccagagttgtttcggtgatgatggtgatgatgtgctcctggacctggagatgatctgaatacgtatcacacaagtcattatccattacagtatataaccgcagcattcgtgttgtttttaatgaattttagatgcgagacacaattttttgctctgttgccccgtcacctagcaatcgcagagcataaaattcatctggacagacaaattatggtttggtatcaacaactagtccgattgggatatgtacaaatacgagtgatgtttgtgaaacaaatggtggcgtgtcatgtgttgtgagaataatggggtgtttgaat

SEQ ID NO: 41771 - DNA, 2629 bp, Zea Mays
ctcgccggcgtcgattcgccgccgtgtggcgatccctgcacggacgtcggtcggtcgccatggagacggcgcatgaggtggccatttacatcgaccgcttccacaacctggacctgttccagcaaggatggtaccgcgtgaagattagtgccctgtgggaggatgacgagaatcgagcacccatctcgccggccagggtcacgcaatacgaagctattgatattggtgtgaagagctcatttggcttttggaaaatagacgatgttgacaatagcttctacacacagccgtttcttgttaaatattctaggcaagatatttatctatcagttatggtgtccttctacatacccaacagcgaagacgagggtccagcaacttcttctgttatattgaagttcgagctcatatatatcccaacactggggaatgcatggactgacgttcaagattcaagtgatgatacagatttgatccctgtccatgaatttaggatcccacatagagcactcctaggcttacactcgtattgccctgtccattttgacgcattacactcggcgctagtggatctgacaatacacattgtctacctgaaagctgctgtgactaaatcatcactgaagccgctggaacaaagttttggctcaaagtcatatggtattgtgaaagcatcactaatatctagggaaatacttcttgaagaagtgaagaagatcagtaatgctgttggtagcactcttgaggatttggatcgcactgacttaacccttggtaaatatgagacagttcaaccatcaaagtcagcttcgcccagttacagttatgggcagggtacgcccacaaagtgtagtccccagatgactggcatcttacgtgattttcttgagagttctggggttgtggttggaagcactgatgatatcttgctgtatactctatctgaggaagaattgtttgaactatttcaaattgtcagcagccaactctcatttatatggaatgagttcttgaaattccataggacacataaagacaaggtaatgggttatttgcatgatatgtgggatattaatcggaaagcagaatggtcaatatggattattcattcaaagattgagattccacatcgctatttgagaagcatgaatgacgactctcctcgccatttgattcggatttccagttcaagaaaggtccatcatgatcctatacaaaattcgatgtcacaggctgaactgcacaggaaaagtatagcacaaatgaagattaacacgccgtctgttcaagatatgcatatttatgctgatccttcatgtatacctgttgtccgcatagagcagcatgtcatggttattccgcaacattgttctagcaaggattttctaacagatgcttcagaaccagctcgtactattgtgccaccacctctactacaaggacaatcattgggggaagaaacttgtggtttcaagagtggacgcattttacgagctgtcatttttgtgcatggatttcaggggcatcatctggatttacgtcttgttaagaaccaatggcttttgcttgatcctggggctgagtgcctattgtctcagataaatgaggatagaacgtctggggattttaaagaaatgggtagaaggctcgctaatgaagtagtggcattcctcaaaaggaaggtggacaagtactccagaaatggaggttgcaaagagattaagctcagttttgtcggtcattctattgggaacattatcctcagaagtgccctcacagaacccaaattgcagccatttttgaagaacctgtatacatacatgtccatatcgggacctcacttgggttactggtacagcccaaattctctgttcaactctggcctctggctcatgaaacggctcaagggcatgcagtgcatgcatcagctcactttcagtgatgaccacgacccacagaacacgttcttttacaagctctgcaagctgaagacactggagaacttcaagaacatcatcctggtatcgtcaccgcaggatggttacgtcccataccattcagcaagaatcgacctctgccacgcctcgtcgtcagataactcgaaacgcgggcaggtgttcactgagatgctgaacaattgcttggaccagatccgggcaccaacgtcggaaactcgggtattcatgcgttgtgacgtgatattcgaccagtccgcccaaggacggaacctgaacaccatgatcggcagagctgcgcacatagagttcctggagaacgacatctatgcaaggttcatcatgtggtccttcccagagttgtttcggtgatgatggtgatgatgtgctcctggacctggagatgatctgaatacgtatcacacaagtcattatccattacagtatataaccgcagcattcgtgttgtttttaatgaattttagatgcgagacacaattttttgctctgttgccccgtcacctagcaatcgcagagcataaaattcatctggacagacaaattatggtttggtatcaacaactagtccgattgggatatgtacaaatacgagtgatgtttgtgaaacaaatggtggcgtgtcatgtgttgtgagaataatggggtgtttgaat

SEQ ID NO: 41772 - DNA, 2802 bp, Zea Mays
ccggcgtcgattcgccgccgtgtggcgatccctgcacggacgtcggtcggtcgccatggagacggcgcatgaggtggccatttacatcgaccgcttccacaacctggacctgttccagcaagggtatcaaggattcggagagagaccaaaaaaaaaaaaatccccagtccctttctttttttccctttgaagaacatgttaactttctcgtatttttttaacggcattcgtttttcgactcccctcgatgggtagaaaaagatatgcattgcattgtttgtcgatttggagagcaaatatttttggcctttgattttttttttgttcgcatgcagatggtaccgcgtgaagattagtgccctgtgggaggatgacgagaatcgagcacccatctcgccggccagggtcacgcaatacgaaggtggattatgcagctattgatattggtgtgaagagctcatttggcttttggaaaatagacgatgttgacaatagcttctacacacagccgtttcttgttaaatattctaggcaagatatttatctatcagttatggtgtccttctacatacccaacagcgaagacgagggtccagcaacttcttctgttatattgaagttcgagctcatatatatcccaacactggggaatgcatggactgacgttcaagattcaagtgatgatacagatttgatccctgtccatgaatttaggatcccacatagagcactcctaggcttacactcgtattgccctgtccattttgacgcattacactcggcgctagtggatctgacaatacacattgtctacctgaaagctgctgtgactaaatcatcactgaagccgctggaacaaagttttggctcaaagtcatatggtattgtgaaagcatcactaatatctagggaaatacttcttgaagaagtgaagaagatcagtaatgctgttggtagcactcttgaggatttggatcgcactgacttaacccttggtaaatatgagacagttcaaccatcaaagtcagcttcgcccagttacagttatgggcagggtacgcccacaaagtgtagtccccagatgactggcatcttacgtgattttcttgagagttctggggttgtggttggaagcactgatgatatcttgctgtatactctatctgaggaagaattgtttgaactatttcaaattgtcagcagccaactctcatttatatggaatgagttcttgaaattccataggacacataaagacaaggtaatgggttatttgcatgatatgtgggatattaatcggaaagcagaatggtcaatatggattattcattcaaagattgagattccacatcgctatttgagaagcatgaatgacgactctcctcgccatttgattcggatttccagttcaagaaaggtccatcatgatcctatacaaaattcgatgtcacaggctgaactgcacaggaaaagtatagcacaaatgaagattaacacgccgtctgttcaagatatgcatatttatgctgatccttcatgtatacctgttgtccgcatagagcagcatgtcatggttattccgcaacattgttctagcaaggattttctaacagatgcttcagaaccagctcccttatcacatatatctgcaacatatctagttgaaacttctgctgatccctaaaataaacaggggcatcatctggatttacgtcttgttaagaaccaatggcttttgcttgatcctggggctgagtgcctattgtctcagataaatgaggatagaacgtctggggattttaaagaaatgggtagaaggctcgctaatgaagtagtggcattcctcaaaaggaaggtggacaagtactccagaaatggaggttgcaaagagattaagctcagttttgtcggtcattctattgggaacattatcctcagaagtgccctcacagaacccaaattgcagccatttttgaagaacctgtatacatacatgtccatatcgggacctcacttgggttactggtacagcccaaattctctgttcaactctggcctctggctcatgaaacggctcaagggcatgcagtgcatgcatcagctcactttcagtgatgaccacgacccacagaacacgttcttttacaagctctgcaagctgaagacactggagaacttcaagaacatcatcctggtatcgtcaccgcaggatggttacgtcccataccattcagcaagaatcgacctctgccacgcctcgtcgtcagataactcgaaacgcgggcaggtgttcactgagatgctgaacaattgcttggaccagatccgggcaccaacgtcggaaactcgggtattcatgcgttgtgacgtgatattcgaccagtccgcccaaggacggaacctgaacaccatgatcggcagagctgcgcacatagagttcctggagaacgacatctatgcaaggttcatcatgtggtccttcccagagttgtttcggtgatgatggtgatgatgtgctcctggacctggagatgatctgaatacgtatcacacaagtcattatccattacagtatataaccgcagcattcgtgttgtttttaatgaattttagatgcgagacacaattttttgctctgttgccccgtcacctagcaatcgcagagcataaaattcatctggacagacaaattatggtttggtatcaacaactagtccgattgggatatgtacaaatacgagtgatgtttgtgaaacaaatggtggcgtgtcatgtgttgtgagaataatggggtgtttgaat

SEQ ID NO: 41773 - DNA, 2550 bp, Zea Mays
ccggcgtcgattcgccgccgtgtggcgatccctgcacggacgtcggtcggtcgccatggagacggcgcatgaggtggccatttacatcgaccgcttccacaacctggacctgttccagcaaggatggtaccgcgtgaagattagtgccctgtgggaggatgacgagaatcgagcacccatctcgccggccagggtcacgcaatacgaagctattgatattggtgtgaagagctcatttggcttttggaaaatagacgatgttgacaatagcttctacacacagccgtttcttgttaaatattctaggcaagatatttatctatcagttatggtgtccttctacatacccaacagcgaagacgagggtccagcaacttcttctgttatattgaagttcgagctcatatatatcccaacactggggaatgcatggactgacgttcaagattcaagtgatgatacagatttgatccctgtccatgaatttaggatcccacatagagcactcctaggcttacactcgtattgccctgtccattttgacgcattacactcggcgctagtggatctgacaatacacattgtctacctgaaagctgctgtgactaaatcatcactgaagccgctggaacaaagttttggctcaaagtcatatggtattgtgaaagcatcactaatatctagggaaatacttcttgaagaagtgaagaagatcagtaatgctgttggtagcactcttgaggatttggatcgcactgacttaacccttggtaaatatgagacagttcaaccatcaaagtcagcttcgcccagttacagttatgggcagggtacgcccacaaagtgtagtccccagatgactggcatcttacgtgattttcttgagagttctggggttgtggttggaagcactgatgatatcttgctgtatactctatctgaggaagaattgtttgaactatttcaaattgtcagcagccaactctcatttatatggaatgagttcttgaaattccataggacacataaagacaaggtaatgggttatttgcatgatatgtgggatattaatcggaaagcagaatggtcaatatggattattcattcaaagattgagattccacatcgctatttgagaagcatgaatgacgactctcctcgccatttgattcggatttccagttcaagaaaggtccatcatgatcctatacaaaattcgatgtcacaggctgaactgcacaggaaaagtatagcacaaatgaagcatgtcatggttattccgcaacattgttctagcaaggattttctaacagatgcttcagaaccagctcgtactattgtgccaccacctctactacaaggacaatcattgggggaagaaacttgtggtttcaagagtggacgcattttacgagctgtcatttttgtgcatggatttcaggggcatcatctggatttacgtcttgttaagaaccaatggcttttgcttgatcctggggctgagtgcctattgtctcagataaatgaggatagaacgtctggggattttaaagaaatgggtagaaggctcgctaatgaagtagtggcattcctcaaaaggaaggtggacaagtactccagaaatggaggttgcaaagagattaagctcagttttgtcggtcattctattgggaacattatcctcagaagtgccctcacagaacccaaattgcagccatttttgaagaacctgtatacatacatgtccatatcgggacctcacttgggttactggtacagcccaaattctctgttcaactctggcctctggctcatgaaacggctcaagggcatgcagtgcatgcatcagctcactttcagtgatgaccacgacccacagaacacgttcttttacaagctctgcaagctgaagacactggagaacttcaagaacatcatcctggtatcgtcaccgcaggatggttacgtcccataccattcagcaagaatcgacctctgccacgcctcgtcgtcagataactcgaaacgcgggcaggtgttcactgagatgctgaacaattgcttggaccagatccgggcaccaacgtcggaaactcgggtattcatgcgttgtgacgtgatattcgaccagtccgcccaaggacggaacctgaacaccatgatcggcagagctgcgcacatagagttcctggagaacgacatctatgcaaggttcatcatgtggtccttcccagagttgtttcggtgatgatggtgatgatgtgctcctggacctggagatgatctgaatacgtatcacacaagtcattatccattacagtatataaccgcagcattcgtgttgtttttaatgaattttagatgcgagacacaattttttgctctgttgccccgtcacctagcaatcgcagagcataaaattcatctggacagacaaattatggtttggtatcaacaactagtccgattgggatatgtacaaatacgagtgatgtttgtgaaacaaatggtggcgtgtcatgtgttgtgagaataatggggtgtttgaat

SEQ ID NO: 41774 - DNA, 2398 bp, Zea Mays
cgtcgattcgccgccgtgtggcgatccctgcacggacgtcggtcggtcgccatggagacggcgcatgaggtggccatttacatcgaccgcttccacaacctggacctgttccagcaaggatggtaccgcgtgaagattagtgccctgtgggaggatgacgagaatcgagcacccatctcgccggccagggtcacgcaatacgaaggactgacgttcaagattcaagtgatgatacagatttgatccctgtccatgaatttaggatcccacatagagcactcctaggcttacactcgtattgccctgtccattttgacgcattacactcggcgctagtggatctgacaatacacattgtctacctgaaagctgctgtgactaaatcatcactgaagccgctggaacaaagttttggctcaaagtcatatggtattgtgaaagcatcactaatatctagggaaatacttcttgaagaagtgaagaagatcagtaatgctgttggtagcactcttgaggatttggatcgcactgacttaacccttggtaaatatgagacagttcaaccatcaaagtcagcttcgcccagttacagttatgggcagggtacgcccacaaagtgtagtccccagatgactggcatcttacgtgattttcttgagagttctggggttgtggttggaagcactgatgatatcttgctgtatactctatctgaggaagaattgtttgaactatttcaaattgtcagcagccaactctcatttatatggaatgagttcttgaaattccataggacacataaagacaaggtaatgggttatttgcatgatatgtgggatattaatcggaaagcagaatggtcaatatggattattcattcaaagattgagattccacatcgctatttgagaagcatgaatgacgactctcctcgccatttgattcggatttccagttcaagaaaggtccatcatgatcctatacaaaattcgatgtcacaggctgaactgcacaggaaaagtatagcacaaatgaagattaacacgccgtctgttcaagatatgcatatttatgctgatccttcatgtatacctgttgtccgcatagagcagcatgtcatggttattccgcaacattgttctagcaaggattttctaacagatgcttcagaaccagctcgtactattgtgccaccacctctactacaaggacaatcattgggggaagaaacttgtggtttcaagagtggacgcattttacgagctgtcatttttgtgcatggatttcaggggcatcatctggatttacgtcttgttaagaaccaatggcttttgcttgatcctggggctgagtgcctattgtctcagataaatgaggatagaacgtctggggattttaaagaaatgggtagaaggctcgctaatgaagtagtggcattcctcaaaaggaaggtggacaagtactccagaaatggaggttgcaaagagattaagctcagttttgtcggtcattctattgggaacattatcctcagaagtgccctcacagaacccaaattgcagccatttttgaagaacctgtatacatacatgtccatatcgggacctcacttgggttactggtacagcccaaattctctgttcaactctggcctctggctcatgaaacggctcaagggcatgcagtgcatgcatcagctcactttcagtgatgaccacgacccacagaacacgttcttttacaagctctgcaagctgaagacactggagaacttcaagaacatcatcctggtatcgtcaccgcaggatggttacgtcccataccattcagcaagaatcgacctctgccacgcctcgtcgtcagataactcgaaacgcgggcaggtgttcactgagatgctgaacaattgcttggaccagatccgggcaccaacgtcggaaactcgggtattcatgcgttgtgacgtgatattcgaccagtccgcccaaggacggaacctgaacaccatgatcggcagagctgcgcacatagagttcctggagaacgacatctatgcaaggttcatcatgtggtccttcccagagttgtttcggtgatgatggtgatgatgtgctcctggacctggagatgatctgaatacgtatcacacaagtcattatccattacagtatataaccgcagcattcgtgttgtttttaatgaattttagatgcgagacacaattttttgctctgttgccccgtcacctagcaatcgcagagcataaaattcatctggacagacaaattatggtttggtatcaacaactagtccgattgggatatgtacaaatacgagtgatgtttgtgaaacaaatggtggcgtgtcatgtgttgtgagaataatggggtgtttgaat

SEQ ID NO: 41775 - DNA, 2583 bp, Zea Mays
atggagacggcgcatgaggtggccatttacatcgaccgcttccacaacctggacctgttccagcaaggatggtaccgcgtgaagattagtgccctgtgggaggatgacgagaatcgagcacccatctcgccggccagggtcacgcaatacgaaggtggattatgcagctattgatattggtgtgaagagctcatttggcttttggaaaatagacgatgttgacaatagcttctacacacagccgtttcttgttaaatattctaggcaagatatttatctatcagttatggtgtccttctacatacccaacagcgaagacgagggtccagcaacttcttctgttatattgaagttcgagctcatatatatcccaacactggggaatgcatggactgacgttcaagattcaagtgatgatacagatttgatccctgtccatgaatttaggatcccacatagagcactcctaggcttacactcgtattgccctgtccattttgacgcattacactcggcgctagtggatctgacaatacacattgtctacctgaaagctgctgtgactaaatcatcactgaagccgctggaacaaagttttggctcaaagtcatatggtattgtgaaagcatcactaatatctagggaaatacttcttgaagaagtgaagaagatcagtaatgctgttggtagcactcttgaggatttggatcgcactgacttaacccttggtaaatatgagacagttcaaccatcaaagtcagcttcgcccagttacagttatgggcagggtacgcccacaaagtgtagtccccagatgactggcatcttacgtgattttcttgagagttctggggttgtggttggaagcactgatgatatcttgctgtatactctatctgaggaagaattgtttgaactatttcaaattgtcagcagccaactctcatttatatggaatgagttcttgaaattccataggacacataaagacaaggtaatgggttatttgcatgatatgtgggatattaatcggaaagcagaatggtcaatatggattattcattcaaagattgagattccacatcgctatttgagaagcatgaatgacgactctcctcgccatttgattcggatttccagttcaagaaaggtccatcatgatcctatacaaaattcgatgtcacaggctgaactgcacaggaaaagtatagcacaaatgaagattaacacgccgtctgttcaagatatgcatatttatgctgatccttcatgtatacctgttgtccgcatagagcagcatgtcatggttattccgcaacattgttctagcaaggattttctaacagatgcttcagaaccagctcgtactattgtgccaccacctctactacaaggacaatcattgggggaagaaacttgtggtttcaagagtggacgcattttacgagctgtcatttttgtgcatggatttcaggggcatcatctggatttacgtcttgttaagaaccaatggcttttgcttgatcctggggctgagtgcctattgtctcagataaatgaggatagaacgtctggggattttaaagaaatgggtagaaggctcgctaatgaagtagtggcattcctcaaaaggaaggtggacaagtactccagaaatggaggttgcaaagagattaagctcagttttgtcggtcattctattgggaacattatcctcagaagtgccctcacagaacccaaattgcagccatttttgaagaacctgtatacatacatgtccatatcgggacctcacttgggttactggtacagcccaaattctctgttcaactctggcctctggctcatgaaacggctcaagggcatgcagtgcatgcatcagctcactttcagtgatgaccacgacccacagaacacgttcttttacaagctctgcaagctgaagacactggagaacttcaagaacatcatcctggtatcgtcaccgcaggatggttacgtcccataccattcagcaagaatcgacctctgccacgcctcgtcgtcagataactcgaaacgcgggcaggtgttcactgagatgctgaacaattgcttggaccagatccgggcaccaacgtcggaaactcgggtattcatgcgttgtgacgtgatattcgaccagtccgcccaaggacggaacctgaacaccatgatcggcagagctgcgcacatagagttcctggagaacgacatctatgcaaggttcatcatgtggtccttcccagagttgtttcggtgatgatggtgatgatgtgctcctggacctggagatgatctgaatacgtatcacacaagtcattatccattacagtatataaccgcagcattcgtgttgtttttaatgaattttagatgcgagacacaattttttgctctgttgccccgtcacctagcaatcgcagagcataaaattcatctggacagacaaattatggtttggtatcaacaactagtccgattgggatatgtacaaatacgagtgatgtttgtgaaacaaatggtggcgtgtcatgtgttgtgagaataatggggtgtttgaat

SEQ ID NO: 41776 - DNA, 2502 bp, Zea Mays
atggagacggcgcatgaggtggccatttacatcgaccgcttccacaacctggacctgttccagcaaggatggtaccgcgtgaagattagtgccctgtgggaggatgacgagaatcgagcacccatctcgccggccagggtcacgcaatacgaagctattgatattggtgtgaagagctcatttggcttttggaaaatagacgatgttgacaatagcttctacacacagccgtttcttgttaaatattctaggcaagatatttatctatcagttatggtgtccttctacatacccaacagcgaagacgaggactgacgttcaagattcaagtgatgatacagatttgatccctgtccatgaatttaggatcccacatagagcactcctaggcttacactcgtattgccctgtccattttgacgcattacactcggcgctagtggatctgacaatacacattgtctacctgaaagctgctgtgactaaatcatcactgaagccgctggaacaaagttttggctcaaagtcatatggtattgtgaaagcatcactaatatctagggaaatacttcttgaagaagtgaagaagatcagtaatgctgttggtagcactcttgaggatttggatcgcactgacttaacccttggtaaatatgagacagttcaaccatcaaagtcagcttcgcccagttacagttatgggcagggtacgcccacaaagtgtagtccccagatgactggcatcttacgtgattttcttgagagttctggggttgtggttggaagcactgatgatatcttgctgtatactctatctgaggaagaattgtttgaactatttcaaattgtcagcagccaactctcatttatatggaatgagttcttgaaattccataggacacataaagacaaggtaatgggttatttgcatgatatgtgggatattaatcggaaagcagaatggtcaatatggattattcattcaaagattgagattccacatcgctatttgagaagcatgaatgacgactctcctcgccatttgattcggatttccagttcaagaaaggtccatcatgatcctatacaaaattcgatgtcacaggctgaactgcacaggaaaagtatagcacaaatgaagattaacacgccgtctgttcaagatatgcatatttatgctgatccttcatgtatacctgttgtccgcatagagcagcatgtcatggttattccgcaacattgttctagcaaggattttctaacagatgcttcagaaccagctcgtactattgtgccaccacctctactacaaggacaatcattgggggaagaaacttgtggtttcaagagtggacgcattttacgagctgtcatttttgtgcatggatttcaggggcatcatctggatttacgtcttgttaagaaccaatggcttttgcttgatcctggggctgagtgcctattgtctcagataaatgaggatagaacgtctggggattttaaagaaatgggtagaaggctcgctaatgaagtagtggcattcctcaaaaggaaggtggacaagtactccagaaatggaggttgcaaagagattaagctcagttttgtcggtcattctattgggaacattatcctcagaagtgccctcacagaacccaaattgcagccatttttgaagaacctgtatacatacatgtccatatcgggacctcacttgggttactggtacagcccaaattctctgttcaactctggcctctggctcatgaaacggctcaagggcatgcagtgcatgcatcagctcactttcagtgatgaccacgacccacagaacacgttcttttacaagctctgcaagctgaagacactggagaacttcaagaacatcatcctggtatcgtcaccgcaggatggttacgtcccataccattcagcaagaatcgacctctgccacgcctcgtcgtcagataactcgaaacgcgggcaggtgttcactgagatgctgaacaattgcttggaccagatccgggcaccaacgtcggaaactcgggtattcatgcgttgtgacgtgatattcgaccagtccgcccaaggacggaacctgaacaccatgatcggcagagctgcgcacatagagttcctggagaacgacatctatgcaaggttcatcatgtggtccttcccagagttgtttcggtgatgatggtgatgatgtgctcctggacctggagatgatctgaatacgtatcacacaagtcattatccattacagtatataaccgcagcattcgtgttgtttttaatgaattttagatgcgagacacaattttttgctctgttgccccgtcacctagcaatcgcagagcataaaattcatctggacagacaaattatggtttggtatcaacaactagtccgattgggatatgtacaaatacgagtgatgtttgtgaaacaaatggtggcgtgtcatgtgttgtgagaataatggggtgtttgaat

SEQ ID NO: 41777 - DNA, 2573 bp, Zea Mays
aaaatacctccgacagaggagcgacgggtcaaaaaacacggacggtggtggttcaagagctattgatattggtgtgaagagctcatttggcttttggaaaatagacgatgttgacaatagcttctacacacagccgtttcttgttaaatattctaggcaagatatttatctatcagttatggtgtccttctacatacccaacagcgaagacgagggtccagcaacttcttctgttatattgaagttcgagctcatatatatcccaacactggggaatgcatggactgacgttcaagattcaagtgatgatacagatttgatccctgtccatgaatttaggatcccacatagagcactcctaggcttacactcgtattgccctgtccattttgacgcattacactcggcgctagtggatctgacaatacacattgtctacctgaaagctgctgtgactaaatcatcactgaagccgctggaacaaagttttggctcaaagtcatatggtattgtgaaagcatcactaatatctagggaaatacttcttgaagaagtgaagaagatcagtaatgctgttggtagcactcttgaggatttggatcgcactgacttaacccttggtaaatatgagacagttcaaccatcaaagtcagcttcgcccagttacagttatgggcagggtacgcccacaaagtgtagtccccagatgactggcatcttacgtgattttcttgagagttctggggttgtggttggaagcactgatgatatcttgctgtatactctatctgaggaagaattgtttgaactatttcaaattgtcagcagccaactctcatttatatggaatgagttcttgaaattccataggacacataaagacaaggtaatgggttatttgcatgatatgtgggatattaatcggaaagcagaatggtcaatatggattattcattcaaagattgagattccacatcgctatttgagaagcatgaatgacgactctcctcgccatttgattcggatttccagttcaagaaaggtccatcatgatcctatacaaaattcgatgtcacaggctgaactgcacaggaaaagtatagcacaaatgaaggttagtgggggtatatcttcaagtcagcaatactattcgagtcctacacttatggtactttttaaagaaaattgaaactaacggaaagcatacttcagattaacacgccgtctgttcaagatatgcatatttatgctgatccttcatgtatacctgttgtccgcatagagcagcatgtcatggttattccgcaacattgttctagcaaggattttctaacagatgcttcagaaccagctcgtactattgtgccaccacctctactacaaggacaatcattgggggaagaaacttgtggtttcaagagtggacgcattttacgagctgtcatttttgtgcatggatttcaggggcatcatctggatttacgtcttgttaagaaccaatggcttttgcttgatcctggggctgagtgcctattgtctcagataaatgaggatagaacgtctggggattttaaagaaatgggtagaaggctcgctaatgaagtagtggcattcctcaaaaggaaggtggacaagtactccagaaatggaggttgcaaagagattaagctcagttttgtcggtcattctattgggaacattatcctcagaagtgccctcacagaacccaaattgcagccatttttgaagaacctgtatacatacatgtccatatcgggacctcacttgggttactggtacagcccaaattctctgttcaactctggcctctggctcatgaaacggctcaagggcatgcagtgcatgcatcagctcactttcagtgatgaccacgacccacagaacacgttcttttacaagctctgcaagctgaagacactggagaacttcaagaacatcatcctggtatcgtcaccgcaggatggttacgtcccataccattcagcaagaatcgacctctgccacgcctcgtcgtcagataactcgaaacgcgggcaggtgttcactgagatgctgaacaattgcttggaccagatccgggcaccaacgtcggaaactcgggtattcatgcgttgtgacgtgatattcgaccagtccgcccaaggacggaacctgaacaccatgatcggcagagctgcgcacatagagttcctggagaacgacatctatgcaaggttcatcatgtggtccttcccagagttgtttcggtgatgatggtgatgatgtgctcctggacctggagatgatctgaatacgtatcacacaagtcattatccattacagtatataaccgcagcattcgtgttgtttttaatgaattttagatgcgagacacaattttttgctctgttgccccgtcacctagcaatcgcagagcataaaattcatctggacagacaaattatggtttggtatcaacaactagtccgattgggatatgtacaaatacgagtgatgtttgtgaaacaaatggtggcgtgtcatgtgttgtgagaataatggggtgtttgaat

SEQ ID NO: 41778 - DNA, 2495 bp, Zea Mays
cagcctcccaccatgatccaaactctcacctcgtccttgattttctaaagcaccgtaaagtttgcggccaagcattcagctattgatattggtgtgaagagctcatttggcttttggaaaatagacgatgttgacaatagcttctacacacagccgtttcttgttaaatattctaggcaagatatttatctatcagttatggtgtccttctacatacccaacagcgaagacgagggtccagcaacttcttctgttatattgaagttcgagctcatatatatcccaacactggggaatgcatggactgacgttcaagattcaagtgatgatacagatttgatccctgtccatgaatttaggatcccacatagagcactcctaggcttacactcgtattgccctgtccattttgacgcattacactcggcgctagtggatctgacaatacacattgtctacctgaaagctgctgtgactaaatcatcactgaagccgctggaacaaagttttggctcaaagtcatatggtattgtgaaagcatcactaatatctagggaaatacttcttgaagaagtgaagaagatcagtaatgctgttggtagcactcttgaggatttggatcgcactgacttaacccttggtaaatatgagacagttcaaccatcaaagtcagcttcgcccagttacagttatgggcagggtacgcccacaaagtgtagtccccagatgactggcatcttacgtgattttcttgagagttctggggttgtggttggaagcactgatgatatcttgctgtatactctatctgaggaagaattgtttgaactatttcaaattgtcagcagccaactctcatttatatggaatgagttcttgaaattccataggacacataaagacaaggtaatgggttatttgcatgatatgtgggatattaatcggaaagcagaatggtcaatatggattattcattcaaagattgagattccacatcgctatttgagaagcatgaatgacgactctcctcgccatttgattcggatttccagttcaagaaaggtccatcatgatcctatacaaaattcgatgtcacaggctgaactgcacaggaaaagtatagcacaaatgaagattaacacgccgtctgttcaagatatgcatatttatgctgatccttcatgtatacctgttgtccgcatagagcagcatgtcatggttattccgcaacattgttctagcaaggattttctaacagatgcttcagaaccagctcgtactattgtgccaccacctctactacaaggacaatcattgggggaagaaacttgtggtttcaagagtggacgcattttacgagctgtcatttttgtgcatggatttcaggggcatcatctggatttacgtcttgttaagaaccaatggcttttgcttgatcctggggctgagtgcctattgtctcagataaatgaggatagaacgtctggggattttaaagaaatgggtagaaggctcgctaatgaagtagtggcattcctcaaaaggaaggtggacaagtactccagaaatggaggttgcaaagagattaagctcagttttgtcggtcattctattgggaacattatcctcagaagtgccctcacagaacccaaattgcagccatttttgaagaacctgtatacatacatgtccatatcgggacctcacttgggttactggtacagcccaaattctctgttcaactctggcctctggctcatgaaacggctcaagggcatgcagtgcatgcatcagctcactttcagtgatgaccacgacccacagaacacgttcttttacaagctctgcaagctgaagacactggagaacttcaagaacatcatcctggtatcgtcaccgcaggatggttacgtcccataccattcagcaagaatcgacctctgccacgcctcgtcgtcagataactcgaaacgcgggcaggtgttcactgagatgctgaacaattgcttggaccagatccgggcaccaacgtcggaaactcgggtattcatgcgttgtgacgtgatattcgaccagtccgcccaaggacggaacctgaacaccatgatcggcagagctgcgcacatagagttcctggagaacgacatctatgcaaggttcatcatgtggtccttcccagagttgtttcggtgatgatggtgatgatgtgctcctggacctggagatgatctgaatacgtatcacacaagtcattatccattacagtatataaccgcagcattcgtgttgtttttaatgaattttagatgcgagacacaattttttgctctgttgccccgtcacctagcaatcgcagagcataaaattcatctggacagacaaattatggtttggtatcaacaactagtccgattgggatatgtacaaatacgagtgatgtttgtgaaacaaatggtggcgtgtcatgtgttgtgagaataatggggtgtttgaat

SEQ ID NO: 41779 - DNA, 2480 bp, Zea Mays
ccatattatggcttcaaaattatagcgggttgcgcctataaactgggcctggtggattatgcagctattgatattggtgtgaagagctcatttggcttttggaaaatagacgatgttgacaatagcttctacacacagccgtttcttgttaaatattctaggcaagatatttatctatcagttatggtgtccttctacatacccaacagcgaagacgagggtccagcaacttcttctgttatattgaagttcgagctcatatatatcccaacactggggaatgcatggactgacgttcaagattcaagtgatgatacagatttgatccctgtccatgaatttaggatcccacatagagcactcctaggcttacactcgtattgccctgtccattttgacgcattacactcggcgctagtggatctgacaatacacattgtctacctgaaagctgctgtgactaaatcatcactgaagccgctggaacaaagttttggctcaaagtcatatggtattgtgaaagcatcactaatatctagggaaatacttcttgaagaagtgaagaagatcagtaatgctgttggtagcactcttgaggatttggatcgcactgacttaacccttggtaaatatgagacagttcaaccatcaaagtcagcttcgcccagttacagttatgggcagggtacgcccacaaagtgtagtccccagatgactggcatcttacgtgattttcttgagagttctggggttgtggttggaagcactgatgatatcttgctgtatactctatctgaggaagaattgtttgaactatttcaaattgtcagcagccaactctcatttatatggaatgagttcttgaaattccataggacacataaagacaaggtaatgggttatttgcatgatatgtgggatattaatcggaaagcagaatggtcaatatggattattcattcaaagattgagattccacatcgctatttgagaagcatgaatgacgactctcctcgccatttgattcggatttccagttcaagaaaggtccatcatgatcctatacaaaattcgatgtcacaggctgaactgcacaggaaaagtatagcacaaatgaagattaacacgccgtctgttcaagatatgcatatttatgctgatccttcatgtatacctgttgtccgcatagagcagcatgtcatggttattccgcaacattgttctagcaaggattttctaacagatgcttcagaaccagctcgtactattgtgccaccacctctactacaaggacaatcattgggggaagaaacttgtggtttcaagagtggacgcattttacgagctgtcatttttgtgcatggatttcaggggcatcatctggatttacgtcttgttaagaaccaatggcttttgcttgatcctggggctgagtgcctattgtctcagataaatgaggatagaacgtctggggattttaaagaaatgggtagaaggctcgctaatgaagtagtggcattcctcaaaaggaaggtggacaagtactccagaaatggaggttgcaaagagattaagctcagttttgtcggtcattctattgggaacattatcctcagaagtgccctcacagaacccaaattgcagccatttttgaagaacctgtatacatacatgtccatatcgggacctcacttgggttactggtacagcccaaattctctgttcaactctggcctctggctcatgaaacggctcaagggcatgcagtgcatgcatcagctcactttcagtgatgaccacgacccacagaacacgttcttttacaagctctgcaagctgaagacactggagaacttcaagaacatcatcctggtatcgtcaccgcaggatggttacgtcccataccattcagcaagaatcgacctctgccacgcctcgtcgtcagataactcgaaacgcgggcaggtgttcactgagatgctgaacaattgcttggaccagatccgggcaccaacgtcggaaactcgggtattcatgcgttgtgacgtgatattcgaccagtccgcccaaggacggaacctgaacaccatgatcggcagagctgcgcacatagagttcctggagaacgacatctatgcaaggttcatcatgtggtccttcccagagttgtttcggtgatgatggtgatgatgtgctcctggacctggagatgatctgaatacgtatcacacaagtcattatccattacagtatataaccgcagcattcgtgttgtttttaatgaattttagatgcgagacacaattttttgctctgttgccccgtcacctagcaatcgcagagcataaaattcatctggacagacaaattatggtttggtatcaacaactagtccgattgggatatgtacaaatacgagtgatgtttgtgaaacaaatggtggcgtgtcatgtgttgtgagaataatggggtgtttgaat

SEQ ID NO: 41780 - DNA, 2452 bp, Zea Mays
aaaattatagcgggttgcgcctataaactgggcctgctattgatattggtgtgaagagctcatttggcttttggaaaatagacgatgttgacaatagcttctacacacagccgtttcttgttaaatattctaggcaagatatttatctatcagttatggtgtccttctacatacccaacagcgaagacgagggtccagcaacttcttctgttatattgaagttcgagctcatatatatcccaacactggggaatgcatggactgacgttcaagattcaagtgatgatacagatttgatccctgtccatgaatttaggatcccacatagagcactcctaggcttacactcgtattgccctgtccattttgacgcattacactcggcgctagtggatctgacaatacacattgtctacctgaaagctgctgtgactaaatcatcactgaagccgctggaacaaagttttggctcaaagtcatatggtattgtgaaagcatcactaatatctagggaaatacttcttgaagaagtgaagaagatcagtaatgctgttggtagcactcttgaggatttggatcgcactgacttaacccttggtaaatatgagacagttcaaccatcaaagtcagcttcgcccagttacagttatgggcagggtacgcccacaaagtgtagtccccagatgactggcatcttacgtgattttcttgagagttctggggttgtggttggaagcactgatgatatcttgctgtatactctatctgaggaagaattgtttgaactatttcaaattgtcagcagccaactctcatttatatggaatgagttcttgaaattccataggacacataaagacaaggtaatgggttatttgcatgatatgtgggatattaatcggaaagcagaatggtcaatatggattattcattcaaagattgagattccacatcgctatttgagaagcatgaatgacgactctcctcgccatttgattcggatttccagttcaagaaaggtccatcatgatcctatacaaaattcgatgtcacaggctgaactgcacaggaaaagtatagcacaaatgaagattaacacgccgtctgttcaagatatgcatatttatgctgatccttcatgtatacctgttgtccgcatagagcagcatgtcatggttattccgcaacattgttctagcaaggattttctaacagatgcttcagaaccagctcgtactattgtgccaccacctctactacaaggacaatcattgggggaagaaacttgtggtttcaagagtggacgcattttacgagctgtcatttttgtgcatggatttcaggggcatcatctggatttacgtcttgttaagaaccaatggcttttgcttgatcctggggctgagtgcctattgtctcagataaatgaggatagaacgtctggggattttaaagaaatgggtagaaggctcgctaatgaagtagtggcattcctcaaaaggaaggtggacaagtactccagaaatggaggttgcaaagagattaagctcagttttgtcggtcattctattgggaacattatcctcagaagtgccctcacagaacccaaattgcagccatttttgaagaacctgtatacatacatgtccatatcgggacctcacttgggttactggtacagcccaaattctctgttcaactctggcctctggctcatgaaacggctcaagggcatgcagtgcatgcatcagctcactttcagtgatgaccacgacccacagaacacgttcttttacaagctctgcaagctgaagacactggagaacttcaagaacatcatcctggtatcgtcaccgcaggatggttacgtcccataccattcagcaagaatcgacctctgccacgcctcgtcgtcagataactcgaaacgcgggcaggtgttcactgagatgctgaacaattgcttggaccagatccgggcaccaacgtcggaaactcgggtattcatgcgttgtgacgtgatattcgaccagtccgcccaaggacggaacctgaacaccatgatcggcagagctgcgcacatagagttcctggagaacgacatctatgcaaggttcatcatgtggtccttcccagagttgtttcggtgatgatggtgatgatgtgctcctggacctggagatgatctgaatacgtatcacacaagtcattatccattacagtatataaccgcagcattcgtgttgtttttaatgaattttagatgcgagacacaattttttgctctgttgccccgtcacctagcaatcgcagagcataaaattcatctggacagacaaattatggtttggtatcaacaactagtccgattgggatatgtacaaatacgagtgatgtttgtgaaacaaatggtggcgtgtcatgtgttgtgagaataatggggtgtttgaat

SEQ ID NO: 41781 - DNA, 2296 bp, Zea Mays
tgaaggttgatgtcgtgtatccaattgttggcagtcaagtcttggtgcagtgttctgtttcttctcgtggagatgaaagagagagatttggggaagagtccaggatggactgacgttcaagattcaagtgatgatacagatttgatccctgtccatgaatttaggatcccacatagagcactcctaggcttacactcgtattgccctgtccattttgacgcattacactcggcgctagtggatctgacaatacacattgtctacctgaaagctgctgtgactaaatcatcactgaaggtacacagccgctggaacaaagttttggctcaaagtcatatggtattgtgaaagcatcactaatatctagggaaatacttcttgaagaagtgaagaagatcagtaatgctgttggtagcactcttgaggatttggatcgcactgacttaacccttggtaaatatgagacagttcaaccatcaaagtcagcttcgcccagttacagttatgggcagggtacgcccacaaagtgtagtccccagatgactggcatcttacgtgattttcttgagagttctggggttgtggttggaagcactgatgatatcttgctgtatactctatctgaggaagaattgtttgaactatttcaaattgtcagcagccaactctcatttatatggaatgagttcttgaaattccataggacacataaagacaaggtaatgggttatttgcatgatatgtgggatattaatcggaaagcagaatggtcaatatggattattcattcaaagattgagattccacatcgctatttgagaagcatgaatgacgactctcctcgccatttgattcggatttccagttcaagaaagcctatacaaaattcgatgtcacaggctgaactgcacaggaaaagtatagcacaaatgaagattaacacgccgtctgttcaagatatgcatatttatgctgatccttcatgtatacctgttgtccgcatagagcagcatgtcatggttattccgcaacattgttctagcaaggattttctaacagatgcttcagaaccagctcgtactattgtgccaccacctctactacaaggacaatcattgggggaagaaacttgtggtttcaagagtggacgcattttacgagctgtcatttttgtgcatggatttcaggggcatcatctggatttacgtcttgttaagaaccaatggcttttgcttgatcctggggctgagtgcctattgtctcagataaatgaggatagaacgtctggggattttaaagaaatgggtagaaggctcgctaatgaagtagtggcattcctcaaaaggaaggtggacaagtactccagaaatggaggttgcaaagagattaagctcagttttgtcggtcattctattgggaacattatcctcagaagtgccctcacagaacccaaattgcagccatttttgaagaacctgtatacatacatgtccatatcgggacctcacttgggttactggtacagcccaaattctctgttcaactctggcctctggctcatgaaacggctcaagggcatgcagtgcatgcatcagctcactttcagtgatgaccacgacccacagaacacgttcttttacaagctctgcaagctgaagacactggagaacttcaagaacatcatcctggtatcgtcaccgcaggatggttacgtcccataccattcagcaagaatcgacctctgccacgcctcgtcgtcagataactcgaaacgcgggcaggtgttcactgagatgctgaacaattgcttggaccagatccgggcaccaacgtcggaaactcgggtattcatgcgttgtgacgtgatattcgaccagtccgcccaaggacggaacctgaacaccatgatcggcagagctgcgcacatagagttcctggagaacgacatctatgcaaggttcatcatgtggtccttcccagagttgtttcggtgatgatggtgatgatgtgctcctggacctggagatgatctgaatacgtatcacacaagtcattatccattacagtatataaccgcagcattcgtgttgtttttaatgaattttagatgcgagacacaattttttgctctgttgccccgtcacctagcaatcgcagagcataaaattcatctggacagacaaattatggtttggtatcaacaactagtccgattgggatatgtacaaatacgagtgatgtttgtgaaacaaatggtggcgtgtcatgtgttgtgagaataatggggtgtttgaat

SEQ ID NO: 41782 - DNA, 1250 bp, Zea Mays
gacttttatccttcggactgtgctaaggcccccgcaaaccgccgccacggcgaggtcgtgccgccgccatgtacgcctcgcgctcccgccactttctcctcagcgttcgaaccgccaaccatggcatcctcctccgcagcccgacctcctacgtgtcccctaccgggtgcggcgtcagcgcgcagcggcactacaaccaccagcagcgggaggacgagtgggaggagtccaaggcggtgaaggtgacggtctggtgggacttccagaggtgccgcctccctcgccgcgccagcccgcgccacctctccccgcgcgtcacggaagcgctgcggtgcgccggcatccgagggcccgtcgagatcaccgccttcggcgacgtcagccacatcccgctcaccgagcaggaggcgctcgctgacaccggcgtcatcttgtcgcacgtcccttccaatcctctaccagatgatggaggtcctgctgtggttggggttttcaagagatctgaggattctgctcaaagtcacattcaagaaaaatgccacaaggaaggtgagagtgaggagccatcaccacgtccaaaaaagagaactcttcaagtggaagtcccatcatccccaccagatgagtcatctagagacaacaggaaagcacctgggtctactcaacgaccggagccaccttccatacatgtggaagctgatgttactcggactgtggaagttccatcaccaccgtctgattcaccatgtatggaccaaaggaatgatgtagctgttgatcctgttatgcaaacagaacgaccagtcaacttgatggaagctgataaggcgaatgctgctggtggtccttcctcgtcaggggggcaaggtaatatcagcaagaaaaggggtttcttggaacgcatatcatctttatggaatggccaaaaggattaggtttcatgtcatctcttctaaagcatcaatgaataagtagaatagataatgtagaatagtcgttcagaggtgtagtgactacagcacaggaacaagatgagtgttcatctgaatatatgcttagcaaagcgagaattggtatggaaagatcattgtgtttcttttcttttttgttttttgggtgaggaagaggagtttattattcatgtatgctaatcaaggtttaacatatgctgtaaaaagaggattgtattcatttactactcagtgtacgtaaaaccttgttttcataaggatagatgctaatgcagcgag

SEQ ID NO: 41783 - DNA, 1808 bp, Zea Mays
gacttttatccttcggactgtgctaaggcccccgcaaaccgccgccacggcgaggtcgtgccgccgccatgtacgcctcgcgctcccgccactttctcctcagcgttcgaaccgccaaccatggcatcctcctccgcagcccgacctcctacgtgtcccctaccgggtgcggcgtcagcgcgcagcggcactacaaccaccagcagcgggaggacgagtgggaggagtccaaggcggtgaaggtgacggtctggtgggacttccagaggtgccgcctccctcgccgcgccagcccgcgccacctctccccgcgcgtcacggaagcgctgcggtgcgccggcatccgagggcccgtcgagatcaccgccttcggcgacgtcagccacatcccgctcaccgagcaggaggcgctcgctgacaccggcgtcatcttgtcgcacgtcccttccagtggaaaagatggttgtggccgatcattcatgtctgatcttatctcttggattgctcagaaccctcctccatctcatttcttccttctatcgggggataaagacttcacaaacatcctgcatcgtcttaggatgagcaattataacgtattgctttcttgccctgattctggctccaagatgttacgcagtgcagcaacttatttgtggacatgggaggatctagctacaggggtggatctcaaacccaaatatttaaatcatccacctgatggtttatccaattcttggtatggtcaatacagtgaacctggtcgtgactttctcctgaaaccaaagaaccccatggctttaccaaggaaaaccaaggaacctaaggttcccagattcgctgtcgttggaattaagagagtgctgtggttttatcctcaagggatcagtgtttcggaactaagaaaagagcttaaaaggattaatgtgtatattgatgcaagtgcatttggcttcaaagatttctctgcttttctcctctccatgtctgatgttgtgaaatttatagatcctctaccagatgatggaggtcctgctgtggttggggttttcaagagatctgaggattctgctcaaagtcacattcaagaaaaatgccacaaggaaggtgagagtgaggagccatcaccacgtccaaaaaagagaactcttcaagtggaagtcccatcatccccaccagatgagtcatctagagacaacaggaaagcacctgggtctactcaacgaccggagccaccttccatacatgtggaagctgatgttactcggactgtggaagttccatcaccaccgtctgattcaccatgtatggaccaaaggaatgatgtagctgttgatcctgttatgcaaacagaacgaccagtcaacttgatggaagctgataaggcgaatgctgctggtggtccttcctcgtcaggggggcaaggtaatatcagcaagaaaaggggtttcttggaacgcatatcatctttatggaatggccaaaaggattaggtttcatgtcatctcttctaaagcatcaatgaataagtagaatagataatgtagaatagtcgttcagaggtgtagtgactacagcacaggaacaagatgagtgttcatctgaatatatgcttagcaaagcgagaattggtatggaaagatcattgtgtttcttttcttttttgttttttgggtgaggaagaggagtttattattcatgtatgctaatcaaggtttaacatatgctgtaaaaagaggattgtattcatttactactcagtgtacgtaaaaccttgttttcataaggatagatgctaatgcagcgag

SEQ ID NO: 41784 - DNA, 388 bp, Zea Mays
ctgaaatcgatactaaaacatcgattaaggatcttactatcagttccaacgagaagtttcttgctgtgaataggagcagtggcccatgtattgattggattactgcagatgctttggctgatgggaaacaaagcactggagagcctgagacttgctttgtttcctaacacttaatccttctttggtttcttattgaattgttgggaacggttaacagatggatctgtaattgttttggaaattgattctacagtagcaagtatgtgcatataaatgtgaccatgcaagtaatttctataagactttgggatacatacttattgcgaagcctaaatttatgctacaaaaggataagttgaatctcatagagacaacactctcttctgag

SEQ ID NO: 41785 - DNA, 1427 bp, Zea Mays
ggcaccccaccccagccttatctcctctgcagtacacgtctccttcatccctatcatgttcatctccaagccgcacagctgcgggcgacctactgctcgctcaattcgctggcatgccactctggccgcggcgccgcgtgtcctcatcgcagcgccccttctccaggtccgaccggcgcctcccctcgtccctcccatgggccatggcacgctcgcccagccatctcccatggcccagcaacctcgcttccacacagtgcccccctactcgtgcctggactttgctcgcccaggtcttcctccccatcacgcgcagcacccaatcagtcgccgctctgcctcttcatcctgacgtggccacggcgagcatctgccccgccgtccgcggctgctggacgccgcccactgtagctcgccggcgtcgtgcttcctcaccatgactgcgtccctgccgcagtgccggcaagctcgcctctgtgctcaggttctcctccagccgctcccccctccatggacgctactctttcctctccgtgaaactctgtcgtgctcagtgttgtccaagtcgagttatttggagccgaggtatcccgaacggcgggcttcggaagtttggtacccccaaccttgcaattggaatcttagtattataataggcttccgtttggaaatttgtcatcgtgggcgctttaatccgtcgccagctgctgttacgttgaagatttggatttcccgttcgtcaaaacggatcggccttccaacctccttcagaacggatcgcgagctgagttcgctcctttcttcctctcgctctctgtccggctccccgacggctcctccccgactgctcccagcaccccggcgctcgtcgagctcgccagtttgcggtgctcctcgtcgagctccagactgattccggcgctcccctcgccggactgattcctctccgtctctccgtctccgtctctttcttcgtcccaatggaaactccgacagtcccctcgccggacggactctcgccggacctcgcagtccaatcagccggcgagttagcctcgtcgttgcctccaggcgatgtcgtaggcagcgacacagggttgagcctcaatccgtcgccgttcgtcgatgctgctttgacgatcgccgacgttgacaacttttggttggaggcaccaccagattgtcgtgaagatcatgttgaaacggtaactgatttgtgcccagtggtcaacaatttctgtttgtgaatgacatgaaaatgtagtcaacattttctgtttgtgcccatgcgatgtcaacttgactgggccaaaattattcagttaacagttaacttcactgctcctcataatttttgtagggcactgtcaattttcagttaacagtgtttgacccatcgcaagtatttgattttgagggtattggac

SEQ ID NO: 41786 - DNA, 949 bp, Zea Mays
cgtctccttcatccctatcatgttcatctccaagccgcacagctgcgggcgacctactgctcgctcaattcgctggcatgccactctggccgcggcgccgcgtgtcctcatcgcagcgccccttctccaggtccgaccggcgcctcccctcgtccctcccatgggccatggcacgctcgcccagccatctcccatggcccagcaacctcgcttccacacagtgcccccctactcgtgcctggactttgctcgcccaggtcttcctccccatcacgcgcagcacccaatcagtcgccgctctgcctcttcatcctgacgtggccacggcgagcatctgccccgccgtccgcggctgctggacgccgcccactgtagctcgccggcgtcgtgcttcctcaccatgactgcgtccctgccgcagtgccggcaagctcgcctctgtgctcaggaaaaggaaaccaagaaagaactcaacaaagaaatggtttcctaaggagccagctgaagcttcttcatcacagccagaactaggggattctggtcaacaccaacttgtctccactgatgttccaaaagaaatagttggtactaccccacagaggagagtgaggtgtgctgtcaaaaagaagattactcccaagaagaagatctgcttctgagtagctgcttaagtatggaagttgtgtctatattttaagtatgaattatggcagttgtgtttgtattttaagtatgaattatgggtattgtttctggcagctgtcaacaatttctgtttgtgcctgagatgaaaatgtagtactgggtgtgtttagaaatgtgacaggcaacagcccagtagtgattgaagtagtgaactatttctgtttgtgcccagtggtcaacaatttctgtttgtgaatgacatgaaaatgtagtcaacattttctgtttgtgcccagctgtcaac

SEQ ID NO: 41787 - DNA, 1219 bp, Zea Mays
gcgactatgtaacaaataacattgctgaggtgttcaataactggataaaggactacaaggacctccctgtttgtgacctggctgacaaaattaggataatgatcatgcaactattctacaagaggaggcggataggaaggaggttggagggaaagattttaccttctatcatagcacaactaaatgcaagaactagaggacttggacacttggaggtcataaaaggcgatgactatgttgcagaggtgagagacaatggtgattgtttttctagatatgtggtgaaggctcatcttagagaatgttcatgtaaggaatggcaacatacagggaagccctgccaccatgcattatgtctaattaccgcacagcaatatagaaatgtaatgatggaggagtttgtcgacgattactactcagttgacatgtttaggaaagcttatgagagattggtggagccaattgaaagcaaattattttggccaaaggtggattttgcaaaggaggttggtgctccactaggcaagagaggcgtgggacgtcaaaggaaaaataggttcaagagttgtctagaaggtgggagtagtaagaaaaagcctgccaacgaaagtgagaaagctaagaagattattcgaggcaaattcaagtgccctaattgtggggagttagggcataggaaggctagctacaaatgccccctaaatggaacgaagaaaaggaaaaggaaaccaagaaagaactcaacaaagaaatggtttcctaaggagccagctgaagcttcttcatcacagccagaactaggggattctggtcaacaccaacttgtctccactgatgttccaaaagaaatagttggtactaccccacagaggagagtgaggtgtgctgtcaaaaagaagattactcccaagaagaagatctgcttctgagtagctgcttaagtatggaagttgtgtctatattttaagtatgaattatggcagttgtgtttgtattttaagtatgaattatgggtattgtttctggcagctgtcaacaatttctgtttgtgcctgagatgaaaatgtagtactgggtgtgtttagaaatgtgacaggcaacagcccagtagtgattgaagtagtgaactatttctgtttgtgcccagtggtcaacaatttctgtttgtgaatgacatgaaaatgtagtcaacattttctgtttgtgcccagctgtcaac

SEQ ID NO: 41788 - DNA, 1950 bp, Zea Mays
gctactctaccccacccacacccttccgcccgccgccactaaaccctagcgggacacccgccttgctcgcgccgcctcatcctctcactcctctcggacccccggtggccggtgcagagctgcgcgaccgagaaccgaatctggaagaagaaggaggtgaagaaggagacgaagctcgggatggcctataagaaggacgacaacttcggggagtggtactccgaggttgttgttaacagtgaaatgattgagtactatgacatttctggttgttatatattgaggccatgggcgatggaaatctgggagctactgaaagaattctttgatgcagaaattaaaaagctgaagctcaaaccatattatttccctttgtttgttactgagaatgttctacagaaggaaaaggaccacattgagggctttgcacctgaggtagcttgggttactaaatctgggaaatctgacctggaagcaccgattgcaatccgccccacaagtgagactgtcatgtatccatacttctccaaatggataagaagccaccgagacttacccttgaggtgtaatcaatggtgtaatgttgttagatgggagtttagcaatccaactcctttcataaggagccgtgaatttctgtggcaagaggggcatactgcttttgcgactaaagaagaggcagatgaagaggttctccaaatattggaactgtacagaaggatatacgaagaatttttagcagttccagtttccaaagggagaaaaagtgagatggaaaaatttgcaggtggcctttataccaccagcgttgaggccttcattccaaacactggtcgtggcatacaaggcgcaacctcacactgtcttggtcaaaactttgccaagatgtttgatatcacttttgagaatgagaaaggtgttagggaaatggtttggcaaaactcttgggcctacacaacccgctcgattggagtgatggtgatgacacatggtgatgacaaaggcttagtattaccaccaaaggtggcgccaatccaggtaattgtgattccagtgccttataaggatgctgacacaactgccataaagggagcctgcgaatcaactgtttacacactcgatcaatctggaattagagcggatcaggacacccgtgaaaattactctccaggttggaagtattcccactgggaaatgaaaggtgttccattgagaattgagattggtccaaaagatctggcaaacaaacaggtgcgtgttgtccgccgggacaacggtgcaaaggttgacatccctgtgaccaatttggttgaagaggttaaagtgttactggatgagattcaaaaaaatctgttcaaaacagcccaagaaaagagagatgcctgtgttcatgtcgtgaacacttgggatgaattcacaactgctctgaataacaaaaagttgatcttggctccatggtgtgatgaggaggaaattgagaaaaatgtaaaaactcggacaaaaggggaacttggagctgcaaaaacattgtgtactccatttgagcagccagaacttccagaaggtaccctgtgctttgcatctggaaagccagcgaagaagtggtcgttctggggccgcagctactgattgcctgtgctgggattatttccggattcagttctagtgagttatgtagctttgaagtgtcggatacaaatccaaaaatccatttacattgcgttttacatcgacttgcagttctcatgtcatcactgctgacaaaagccatcgatttcctgtggaccatgctattcgagtttgaatgttgcaaggatgagaatacgtacattcttttactggcgtgcagtgttataattagaaaaaaacgcttcatatttgattgcaacacataattctgactggaatttaactggatctctttatctcttattaaagtagaatttgtta

SEQ ID NO: 41789 - DNA, 1909 bp, Zea Mays
acccacacccttccgcccgccgccactaaaccctagcgggacacccgccttgctcgcgccgcctcatcctctcactcctctcggacccccggtggccggtgcagagctgcgcgaccgagaaccgaatctgtgagccatgtcgaccaacaagggcagcgcggccaagggcggcggagggaagaagaaggaggtgaagaaggagacgaagctcgggatggcctataagaaggacgacaacttcggggagtggtactccgaggttgttgttaacagtgaaatgattgagtactatgacatttctggttgttatatattgaggccatgggcgatggaaatctgggagctactgaaagaattctttgatgcagaaattaaaaagctgaagctcaaaccatattatttccctttgtttgttactgagaatgttctacagaaggaaaaggaccacattgagggctttgcacctgaggtagcttgggttactaaatctgggaaatctgacctggaagcaccgattgcaatccgccccacaagtgagactgtcatgtatccatacttctccaaatggataagaagccaccgagacttacccttgaggtgtaatcaatggtgtaatgttgttagatgggagtttagcaatccaactcctttcataaggagccgtgaatttctgtggcaagaggggcatactgcttttgcgactaaagaagaggcagatgaagaggttctccaaatattggaactgtacagaaggatatacgaagaatttttagcagttccagtttccaaagggagaaaaagtgagatggaaaaatttgcaggtggcctttataccaccagcgttgaggccttcattccaaacactggtcgtggcatacaaggcgcaacctcacactgtcttggtcaaaactttgccaagatgtttgatatcacttttgagaatgagaaaggtgttagggaaatggtttggcaaaactcttgggcctacacaacccgctcgattggagtgatggtgatgacacatggtgatgacaaaggcttagtattaccaccaaaggtggcgccaatccaggtaattgtgattccagtgccttataaggatgctgacacaactgccataaagggagcctgcgaatcaactgtttacacactcgatcaatctggaattagagcggatcaggacacccgtgaaaattactctccaggttggaagtattcccactgggaaatgaaaggtgttccattgagaattgagattggtccaaaagatctggcaaacaaacaggtgcgtgttgtccgccgggacaacggtgcaaaggttgacatccctgtgaccaatttggttgaagaggttaaagtgttactggatgagattcaaaaaaatctgttcaaaacagcccaagaaaagagagatgcctgtgttcatgtcgtgaacacttgggatgaattcacaactgctctgaataacaaaaagttgatcttggctccatggtgtgatgaggaggaaattgagaaaaatgtaaaaactcggacaaaaggggaacttggagctgcaaaaacattgtgtactccatttgagcagccagaacttccagaaggtaccctgtgctttgcatctggaaagccagcgaagaagtggtcgttctggggccgcagctactgattgcctgtgctgggattatttccggattcagttctattctcatgtcatcactgctgacaaaagccatcgatttcctgtggaccatgctattcgagtttgaatgttgcaaggatgagaatacgtacattcttttactggcgtgcagtgttataattagaaaaaaacgcttcatatttgattgcaacacataattctgactggaatttaactggatctctttatctcttattaaagtagaatttgtta

SEQ ID NO: 41790 - DNA, 433 bp, Zea Mays
acgaccgactccctcaattacctgcccgtcccaattgtttccgcaagtcgcccagaccagatttgccagaacgcaacctcggctccgaaaccctagccgcacgcagttgtccacttctactcccctcgcctcgccacacccgccgcgcggcacgatcagacgccatggccgccgagaactactggaggtacgctgatgcgcggcagcagcagcaggcgatggtggccgccgcggcggccgcagcggggatggctcccgcggcgaccgtcgccgcggcccagacggtcgggagtgcggcggcggctatgaaccagcaggctgccgccgccgccatggcgcagcaggccgccgctgcgccgcctctcaagcgtgcgcgccccgacttcggtgttgtcttctgtaacaaaatcctgaactttctggtgaaatcgtt

SEQ ID NO: 41791 - DNA, 4700 bp, Zea Mays
  misc_feature (1)..(1): n is a, c, g, or t
naatccatatatattgaggtggattggggtgtggattggggtacacctcaatacatgtggattatggtgactagagtacccaaacaatgcctaaatcttcatattgttcatcttctctggtttctttctgtttatatgcttcaagtcttgtttaatctgaagtactgattggcggtacctgtgtatgttgccattctcttaaaatatttttgttccttaaccttttgattccttagatatatttcgcccatttgttggttttcgtgaagttcgtcttgtcaacaaggagtccagacatcctggtggagatccacatgtgttgtgtttcgttgattttgacaaccctgctcaggctacaattgctctggaagcattacaaggtgaaacttcttatatatgtggatatggactgtgtagttgtgttgatttcctgattctttgctttgttgactttaaattttgcatgtatatgtttgttaaattctatcatgcatgttgcatgtctatagtttgtcgtgaagcttgttttggaattggtaaattcttgttcattccgcatctaacttaatgcgtgtggtaatagtttttgaattagttcatatattagttatagcaggaagctgggtaaacccatctattattcaaagcactgaggcaagtggcaacaccactcagcatttcctaacaagctaatattttcgtgcatttaataggactggtgagtcatgaatttttgcgctttgcttcctattcaagtgcacattatgccctttctaatacattacatctaggaattgttaccaagttgagaaactcatgaccagagtatggaacctaggcgttcttaggttctacactttgagcttgctttgtgtcagcatccctgccaatttaagaagatttgcattagcattctgatctactggatctaagatttgtatttccatcttgatctgcatgggggagtaggcctttggttgaaggcaaaaaacacaactcttcctattcttattacggtccgatctcttgttcacgcgacgacctgagcaatataaaccatcacgattcgttttgcaggttataagtttgacgaacacgagcgtgattcagcccatttgcgtctgcaattctcacgctttcccggtccaaggtcagctggtgggcctcgcggtaggcgttaagacgtgcggacctcgtggttgccgaacctatcgtttatacgagcgatccaactacggtgggctaacgcttcgatatgcgctgaatttcggggcggtggctttttagggttcgtcagctcatttcgtgaatgcgtgaaagggacaatgcaataagtgatattctgccatatgttattagatgccgtataatgtgttaggcatggaaagttattcgacatactgtatctgctgccttagctattgtggtctactgtaacttcattaccttgcttcacatccgagacaatttgagtttgttatcatgtggattatctgttttgaaaatgaaaactagatgatgttagcctattttagtaatgcatattgccccattggtgtttcttgcccatataccaaaatcgtgtactttaatctaggattagtaaaactgtggttgcctaggaactatgttgtaacccactgacacccttagttaagcaccaaaggatgtcaggggctactgtgcctatttctgactttattttgtaaggctaagttcctcgaagatcagctatactaaatggatattagttgctgattgaaactttgatagtgaacttttgaaattttcgttggcataataaatctgagtacatttctcttaaagaagcaaattgattttccttaagtttgatgtgattgttgttggtccaaattactgtgaactgctttggagcttttggggtatctgtagtaatttgtgagaaataactcaataactgagatttgatcaagatgcaaagttaatgaaatgtaatacattctgggatagaggtagtattttgatctgcatgtgtttctaagctacaaataacatggagtgcgagggtattgtttgcatatagtgaactaaattgggatgcagcaatgccagtccaatcctgtttccataagcattgttgaagtagccatgcactgttcagtcatgcatctgtactcaggtaatacaaagttcagttgtgttcatgcattgaaatggtctgctctagaacatgtagcttttggtttaatttagatccactgcatgtcacttgggcgaaatcttctgttcattgattcctttcatctgtcttcctaaagatgtactctctctgttcttttttatttgttgcattttagttcaaaaatggactagcggaccacaaatattcgagaacggaagtagtatatgccaatccgtgtcattttactaattaaattcttggtattatttgtgttcattctcagatggctgttatattgtatatgcgtattgcttaatgggttgaatgtcttacgaattgcttcacatgatgtgttgaaactggctgtgcaatttatttacccaataggtatgcttattccttaacagtttaatgcatggccttatgtgtttactgcagtggtttgcattaataactacatttcggtgtgtgctaatttgcctttctaacccctgtcgacctatcggaatgtgctaatttgcctttctaacccctgttgacctatcggattgtgccttcgccttttgcaattctttgaagtccctgcttattgcgtgccagatgtgtgttgctgttgccattttttcgactgctttgtcgtttctgcgtcagtctgtgtgtttgcatgtctgctgcgtcgtgaacgtttttttttatcagtcgtgcgttattgcactttgcctgttccattttttttaatatttagagctagtttggcaacttcatttttccaaaggattttaagaaatggaagggaaatgagttcattttctctttgggaaaatgagaatcccttagaggaatggagttcctaaattagcccttatacgatatttacatgtgtttgccatcagtgtgaatcttcatactaagggttaatttggaaacttaaatcccctttcggaatcctagagattgagtggagattgactaatatcgcactcaatccccggaatcccctaagttctggaactagccctaaatggtttatatgaatattctcttctaccgagttgtgaactgctgaactctagttctgtgtatctgttacgacacctagcactgtgacacttgaaattgttacagattaagacgcactgacgataccctgcgctcagttgctcgatactcgaggcttgtaggtgattgtatccagtagtttgaagaactggttatctaattatttatgtactgtggatccaccattttggatacgcttcatcaatataaaagagctccaattatgaaagttaggagaaaatggcgatctctaaactattcttgagttgtcgtccagctcccaagactaatggaattgcagtttaatgtctctgatattatattgtaacgtgtcatctcgctccaagcttatacgttggtctgctgttacatgccagttctgtaaggagaaatggcaccgattactggaaattttacaaattggccctactacttgtttagattggacaagctctctcctcgtctctatttaatctcttcctctgtttttctctatttgccccttcgttcactctttctcctcccttttcttgtctcgttatcgtctgctacgccaaaccctagccccaaatcagtagcttgaagctgcccacagcgctccaaattgggatccacagattctgcattcatgaagtgggtggggtaaacggcttggggaattgtgtgtgctatcgtcatttaggcgcaggacgaaagggaagccaccgttgattactcctagactgaattgtaggcaaattgttgaggttcacgcggccatagtcgctatgacaatttctacatggccccagacacaggttgcttgtatgctttgcaggatagctaaggaaaaggacattcttgcactgggacgacaacaaaggaagcgcacggagctgggcaattctcagtttagatgctcaagttgggactttggtgggtttaggttatggtcgttaaaatgcctcgtatttgctaggcagaactgttctttggatgttgttggctgtggtgattgagaaggaataaatgtcatgtaatataaagagtactatgtaacgcacaccaccttttgttagaatgtgaactaccttttgctacaatgtgagatcaaatgtttgagtgaaaaaatgtcttgccattagtgaatatgaggtgatggacacaagtaggtgttggagataacaagagagttgccaatagcagcatctgttttgcttgccttcgtagtagcacggccaccttttcttgttggtcttcacatcatcacttttcttgttagtcttgacatccttgattttcccaactttgttgcagttgtcacaggagtacgcaagcttgctggtttttctataaatgcagagtcatgtgcaaccaataggtccatcatgcttgtgtgagttggctataaaggataatgtaataaagtgaagcatttgtgcaatatgaagtaaaaacatggaattgtatgtctggttaaatgctcaaaaggatctgg

SEQ ID NO: 41792 - DNA, 2656 bp, Zea Mays
agagtacccaaacaatgcctaaatcttcatattgttcatcttctctggtttctttctgtttatatgcttcaagtcttgtttaatctgaagtactgattggcggtacctgtgtatgttgccattctcttaaaatatttttgttccttaaccttttgattccttagatatatttcgcccatttgttggttttcgtgaagttcgtcttgtcaacaaggagtccagacatcctggtggagatccacatgtgttgtgtttcgttgattttgacaaccctgctcaggctacaattgctctggaagcattacaagatggctgttatattgtatatgcgtattgcttaatgggttgaatgtcttacgaattgcttcacatgatgtgttgaaactggctgtgcaatttatttacccaataggtatgcttattccttaacagtttaatgcatggccttatgtgtttactgcagtggtttgcattaataactacatttcggtgtgtgctaatttgcctttctaacccctgtcgacctatcggaatgtgctaatttgcctttctaacccctgttgacctatcggattgtgccttcgccttttgcaattctttgaagtccctgcttattgcgtgccagatgtgtgttgctgttgccattttttcgactgctttgtcgtttctgcgtcagtctgtgtgtttgcatgtctgctgcgtcgtgaacgtttttttttatcagtcgtgcgttattgcactttgcctgttccattttttttaatatttagagctagtttggcaacttcatttttccaaaggattttaagaaatggaagggaaatgagttcattttctctttgggaaaatgagaatcccttagaggaatggagttcctaaattagcccttatacgatatttacatgtgtttgccatcagtgtgaatcttcatactaagggttaatttggaaacttaaatcccctttcggaatcctagagattgagtggagattgactaatatcgcactcaatccccggaatcccctaagttctggaactagccctaaatggtttatatgaatattctcttctaccgagttgtgaactgctgaactctagttctgtgtatctgttacgacacctagcactgtgacacttgaaattgttacagattaagacgcactgacgataccctgcgctcagttgctcgatactcgaggcttgtaggtgattgtatccagtagtttgaagaactggttatctaattatttatgtactgtggatccaccattttggatacgcttcatcaatataaaagagctccaattatgaaagttaggagaaaatggcgatctctaaactattcttgagttgtcgtccagctcccaagactaatggaattgcagtttaatgtctctgatattatattgtaacgtgtcatctcgctccaagcttatacgttggtctgctgttacatgccagttctgtaaggagaaatggcaccgattactggaaattttacaaattggccctactacttgtttagattggacaagctctctcctcgtctctatttaatctcttcctctgtttttctctatttgccccttcgttcactctttctcctcccttttcttgtctcgttatcgtctgctacgccaaaccctagccccaaatcagtagcttgaagctgcccacagcgctccaaattgggatccacagattctgcattcatgaagtgggtggggtaaacggcttggggaattgtgtgtgctatcgtcatttaggcgcaggacgaaagggaagccaccgttgattactcctagactgaattgtaggcaaattgttgaggttcacgcggccatagtcgctatgacaatttctacatggccccagacacagggtaagttgaactgaagagctctgctccaaagaagctttgttaactacgttgtgttctttgttaacctcctgcccattttggcaccgggaggaaagttgcttgtatgctttgcaggatagctaaggaaaaggacattcttgcactgggacgacaacaaaggaagcgcacggagctgggcaattctcagtttagatgctcaagttgggactttggtgggtttaggttatggtcgttaaaatgcctcgtatttgctaggcagaactgttctttggatgttgttggctgtggtgattgagaaggaataaatgtcatgtaatataaagagtactatgtaacgcacaccaccttttgttagaatgtgaactaccttttgctacaatgtgagatcaaatgtttgagtgaaaaaatgtcttgccattagtgaatatgaggtgatggacacaagtaggtgttggagataacaagagagttgccaatagcagcatctgttttgcttgccttcgtagtagcacggccaccttttcttgttggtcttcacatcatcacttttcttgttagtcttgacatccttgattttcccaactttgttgcagttgtcacaggagtacgcaagcttgctggtttttctataaatgcagagtcatgtgcaaccaataggtccatcatgcttgtgtgagttggctataaaggataatgtaataaagtgaagcatttgtgcaatatgaagtaaaaacatggaattgtatgtctggttaaatgctcaaaaggatctgg

SEQ ID NO: 41793 - DNA, 3923 bp, Zea Mays
caaacaatgcctaaatcttcatattgttcatcttctctggtttctttctgtttatatgcttcaagtcttgtttaatctgaagtactgattggcggtacctgtgtatgttgccattctcttaaaatatttttgttccttaaccttttgattccttagatatatttcgcccatttgttggttttcgtgaagttcgtcttgtcaacaaggagtccagacatcctggtggagatccacatgtgttgtgtttcgttgattttgacaaccctgctcaggctacaattgctctggaagcattacaaggttataagtttgacgaacacgagcgtgattcagcccatttgcgtctgcaattctcacgctttcccggtccaaggtcagctggtgggcctcgcggtaggcgttaagacgtgcggacctcgtggttgccgaacctatcgtttatacgagcgatccaactacggtgggctaacgcttcgatatgcgctgaatttcggggcggtggctttttagggttcgtcagctcatttcgtgaatgcgtgaaagggacaatgcaataagtgatattctgccatatgttattagatgccgtataatgtgttaggcatggaaagttattcgacatactgtatctgctgccttagctattgtggtctactgtaacttcattaccttgcttcacatccgagacaatttgagtttgttatcatgtggattatctgttttgaaaatgaaaactagatgatgttagcctattttagtaatgcatattgccccattggtgtttcttgcccatataccaaaatcgtgtactttaatctaggattagtaaaactgtggttgcctaggaactatgttgtaacccactgacacccttagttaagcaccaaaggatgtcaggggctactgtgcctatttctgactttattttgtaaggctaagttcctcgaagatcagctatactaaatggatattagttgctgattgaaactttgatagtgaacttttgaaattttcgttggcataataaatctgagtacatttctcttaaagaagcaaattgattttccttaagtttgatgtgattgttgttggtccaaattactgtgaactgctttggagcttttggggtatctgtagtaatttgtgagaaataactcaataactgagatttgatcaagatgcaaagttaatgaaatgtaatacattctgggatagaggtagtattttgatctgcatgtgtttctaagctacaaataacatggagtgcgagggtattgtttgcatatagtgaactaaattgggatgcagcaatgccagtccaatcctgtttccataagcattgttgaagtagccatgcactgttcagtcatgcatctgtactcaggtaatacaaagttcagttgtgttcatgcattgaaatggtctgctctagaacatgtagcttttggtttaatttagatccactgcatgtcacttgggcgaaatcttctgttcattgattcctttcatctgtcttcctaaagatgtactctctctgttcttttttatttgttgcattttagttcaaaaatggactagcggaccacaaatattcgagaacggaagtagtatatgccaatccgtgtcattttactaattaaattcttggtattatttgtgttcattctcagatggctgttatattgtatatgcgtattgcttaatgggttgaatgtcttacgaattgcttcacatgatgtgttgaaactggctgtgcaatttatttacccaataggtatgcttattccttaacagtttaatgcatggccttatgtgtttactgcagtggtttgcattaataactacatttcggtgtgtgctaatttgcctttctaacccctgtcgacctatcggaatgtgctaatttgcctttctaacccctgttgacctatcggattgtgccttcgccttttgcaattctttgaagtccctgcttattgcgtgccagatgtgtgttgctgttgccattttttcgactgctttgtcgtttctgcgtcagtctgtgtgtttgcatgtctgctgcgtcgtgaacgtttttttttatcagtcgtgcgttattgcactttgcctgttccattttttttaatatttagagctagtttggcaacttcatttttccaaaggattttaagaaatggaagggaaatgagttcattttctctttgggaaaatgagaatcccttagaggaatggagttcctaaattagcccttatacgatatttacatgtgtttgccatcagtgtgaatcttcatactaagggttaatttggaaacttaaatcccctttcggaatcctagagattgagtggagattgactaatatcgcactcaatccccggaatcccctaagttctggaactagccctaaatggtttatatgaatattctcttctaccgagttgtgaactgctgaactctagttctgtgtatctgttacgacacctagcactgtgacacttgaaattgttacagattaagacgcactgacgataccctgcgctcagttgctcgatactcgaggcttgtaggtgattgtatccagtagtttgaagaactggttatctaattatttatgtactgtggatccaccattttggatacgcttcatcaatataaaagagctccaattatgaaagttaggagaaaatggcgatctctaaactattcttgagttgtcgtccagctcccaagactaatggaattgcagtttaatgtctctgatattatattgtaacgtgtcatctcgctccaagcttatacgttggtctgctgttacatgccagttctgtaaggagaaatggcaccgattactggaaattttacaaattggccctactacttgtttagattggacaagctctctcctcgtctctatttaatctcttcctctgtttttctctatttgccccttcgttcactctttctcctcccttttcttgtctcgttatcgtctgctacgccaaaccctagccccaaatcagtagcttgaagctgcccacagcgctccaaattgggatccacagattctgcattcatgaagtgggtggggtaaacggcttggggaattgtgtgtgctatcgtcatttaggcgcaggacgaaagggaagccaccgttgattactcctagactgaattgtaggcaaattgttgaggttcacgcggccatagtcgctatgacaatttctacatggccccagacacaggttgcttgtatgctttgcaggatagctaaggaaaaggacattcttgcactgggacgacaacaaaggaagcgcacggagctgggcaattctcagtttagatgctcaagttgggactttggtgggtttaggttatggtcgttaaaatgcctcgtatttgctaggcagaactgttctttggatgttgttggctgtggtgattgagaaggaataaatgtcatgtaatataaagagtactatgtaacgcacaccaccttttgttagaatgtgaactaccttttgctacaatgtgagatcaaatgtttgagtgaaaaaatgtcttgccattagtgaatatgaggtgatggacacaagtaggtgttggagataacaagagagttgccaatagcagcatctgttttgcttgccttcgtagtagcacggccaccttttcttgttggtcttcacatcatcacttttcttgttagtcttgacatccttgattttcccaactttgttgcagttgtcacaggagtacgcaagcttgctggtttttctataaatgcagagtcatgtgcaaccaataggtccatcatgcttgtgtgagttggctataaaggataatgtaataaagtgaagcatttgtgcaatatgaagtaaaaacatggaattgtatgtctggttaaatgctcaaaaggatctgg

SEQ ID NO: 41794 - DNA, 2304 bp, Zea Mays
cccttcctctccagggaaggaggccagaatcccccgtcgacgcgcacgcgccgtcgcgcagagctccgcgtccgcatcggccaccgcccacccgcgccggccgccggcggcgtggatggggaagctcgccgccctgaagcgggaagcggtcggggtggactaggtgctcggcgaattcctagtttagactttagaagcagtaggtggaggtgatgcggggcggagcgatgaaggctctgcggcgatccagcacctcctcgccgccgtcttccccgcattttcattcgtggatccaccgccggtacctcctcgttacctcgtcggcgacgtcctctttgtctgcatcggcgaattcggccgcggagggttcggattcagcgtcagtggtggcagcttcctcgtcgccctcgttggatccttcgtctccgaacatggaccggggtgtaattaaatctccatggtctcgaagaaaaaggaaacgagcgctcacttgtcaacactggatttgtctattttcagcgaacgggaagtttcgtgatgggggaagaaagtttctaaagaaggttcgcagtgggggaattgagccaggcataagggctgaagtttggccatttctgcttggagtctatgatttgaacagctctgaggaggacaggaataccatcaagataaagaaaagaatatgaaaaattgaggcgacagtgccaccatgttctgcattgcaatagaggaaatggtctgaatgttataaatgagttcctgaatgaggacttctctgatggggctgaaggttcagagtcaccatattccaatggtgctagtaagagggcttgtgtgatgcccagagaattgaaatctttaggcagtaaggcagaagagtcagagagttctaactgggatgttgtggaatccatagatgaagatacaagtgagttaacttctgttgatccatgcatgatagaatcagaatcttctgaatctgagtcttcatatgaagaggaccctgatagaacacctgtctctaccaatatggaagagagctgtgatcccaaacctagatttgtccggactgcttcagcaaagtcagacatttttctttcagacagaactcctgaggattttaccacatggcagcgcattatacgtgtagatgctattcgagcaaatacagaatgggttctatttgcccgtaaccaggctgaagtctctaaagagaaagcactgcagtctgcaatatctgttggattgaaagattttgaccatttggagccttacatgatttatcatgcggcacgattagttgcactgcttgaggcatatgcagtctatgatccagagatcgggtactgtcaaggaatgagcgatctcttgtcaccaatagttgcagtcatggaggaagatcatgaagcattttggtgctttgtgggtttcatgaggaaagccagacacaacttcagacttgatgaggttggaataagaagacagctgaaaaccgtctcgcagatcatcaagcttaaagattcacagctctacaggcacctgcagcaacttcaggccgaagactgcttctttctgtaccgaatggtggtggttctcttcaggagggagctcacttttgagcagactatgtgtctgtgggaggttatgtgggccgaccaggccgcgattcgagctgggattggaaggtccacttgggcaaggataaggcttcacgcccctccaacagacgacttgctgctctacgctatcgcagcctgtgtcctgcagaggaggaagctgataatcgagaagtacagtagcatggatgagatactgcgggagtgtaatagcatggccgggcagctagatgtctggaagctcctagatgatgcacaccacttggttgtcgaccttcatcacagaatctgatgcgacggcttccctcagttatgtttggtagagtatgcagacatgaaccacttttccgaggtgtatttagtaatctgttgtgtactgttcatcacccggaattatgggcatatatctagagaaccgtgtggcttcaagtgaggacgaagttatctccacttcggttaagctgataaaccattggatagcacaatggtttatgcaagccatccatagtttaacttgatgtaaaatttcgtttttttgcttccagtatctgtcctaggcgaaaacatcattttccatcaagccttttatagcaaaatttaaagttcccagattttggggtgtaatgcggagtaatatatgatggattcaaagtctttgctgcgtcattgcacacaccaagttcttcca

SEQ ID NO: 41795 - DNA, 1925 bp, Zea Mays
tccatgactacatcaagcacctccactagtggactaggatttaatacaaattcaagaagaaagggaggaggaaggaagagtagaaatctctactactacataagacactactgtagacgtccacaatcgtttggtgcacggttctgccgaggttgccgaggatccccaccgtcctccccacgccgatccggcccaccctcctccccaccgtcgatggaactctcctctgctctgccattaacgaccgtctccaatagcggaaggtggccgaggatccccgccatcaacgcccgccatcggacccttacgcgatatcagcaccgcctgtcatggaaggttgccgaggccgccatcaacgccccattcccgtagacgtcaccagcgccacaccaattcctccccggcttgccacaccaattcctcccctgttcaagcccggatccatggcgcacctctccctttcccccttcaacaccggatccctcggtacggcgctggagatcgcgcccttcccaccttccccaccggatccggcatggcggtgcagcgcactagactacggctcgccgacggtggcacgcatcccgacatcgtcgctcgatctcagtcccttcatcggcgacgacgaagagcctggcaggccagccaccggcgacctgctccccgcacgccctgttaacgaagctgggccgcggtcgtcaagcgacgagcgggagcgcctctcccatcgggccggcttctcccgactgctctgtcttcctggcgtccggcgacctcatgcgccgccgcgggcgctggcggctcgtgcggaattctcctgtgctgctgcgggaaccggcagctcaagcgactgtggcaggtggtcgaggctaggcgtggaggggcggccgtgggaggcaccttactggtcaccggggtcgcctcatggagctacagttgcgcagtggagagatggacaggaacactgtgcccccgcctccgtcgcggcggcggcgaaccggatccggacgctcgccagggccttctgcggcgcgccggcctcgcgagcggatgcgggggccaacggggacgcccagcccgcaggatgcgcgcacggaaacaagcaggtgaagggtttcatgtttgaaaaaccggttgatctgaaagtaggtgtgaaccatgtcatattgctgtcatcaactatgggaatgaaggatagtggtggtgaacttgctgaagtaaagggcggcattcaggagtgcctaatccaaggtctcaacactgggacgttggatttacaagtcaatggctggggccataaattttggttgcaaccctcaccctcggtgtcactatgttcactgccatgccagagatactttgatgagccagatggagatgatcccgttgtacttgacatgagctcaatgaaactgatctaccatgcaactttttcttgcccaccatggttttcttctggagcaaggaagtttattaagtgcattctcgatcctaaccatgataccaggataaaaattgcagaaattttggaagatgaatggttcaaaaaaggctataaccttgacgacgttgatgctgcattcaatggttcagagcaaagagcaacagggaagaaggccagcactggattgcaaacgggctcggttcgctatgaaggatactggaagctttggtgtcatatactagcaattgaaacatcaaattcaaatcagatggcaccggcgaagaggaagcgcacatcagcttcccggatgaatgtgtgggtagagcctgtgtccaccagcgccaccaatgtccgatccttgaccctgacctggagctacatggtgctgctgatgtcaatgcccgtgagggcatgaagagaaatgcccaggtcctccgctgctgcatcttcctccatgttgtcgtccatctccagcaagaat

SEQ ID NO: 41796 - DNA, 1650 bp, Zea Mays
atggcgcacctctccctttcccccttcaacaccggatccctcggtacggcgctggagatcgcgcccttcccaccttccccaccggatccggcatggcggtgcagcgcactagactacggctcgccgacggtggcacgcatcccgacatcgtcgctcgatctcagtcccttcatcggcgacgacgaagagcctggcaggccagccaccggcgacctgctccccgcacgccctgttaacgaagctgggccgcggtcgtcaagcgacgagcgggagcgcctctcccatcgggccggcttctcccgactgctctgtcttcctggcgtccggcgacctcatgcgccgccgcgggcgctggcggctcgtgcggaattctcctgtgctgctgcgggaaccggcagctcaagcgactgtggcaggtggtcgaggctaggcgtggaggggcggccgtgggaggcaccttactggtcaccggggtcgcctcatggagctacagttgcgcagtggagagatggacaggaacactgtgcccccgcctccgtcgcggcggcggcgaaccggatccggacgctcgccagggccttctgcggcgcgccggcctcgcgagcggatgcgggggccaacggggacgcccagcccgcaggatgcgcgcacggaaacaagcaggtgaagggtttcatgtttgaaaaaccggttgatctgaaagtaggtgtgaaccatgtcatattgctgtcatcaactatgggaatgaaggtaaaattttgtcggaattgtggaatgtgtttggaatgtaagatggctgattatactatcctgtccgatatccaggatagtggtggtgaacttgctgaagtaaagggcggcattcaggagtgcctaatccaaggtctcaacactgggacgttggatttacaagtcaatggctggggccataaattttggttgcaaccctcaccctcggtgtcactatgttcactgccatgccagagatactttgatgagccagatggagatgatcccgttgtacttgacatgagctcaatgaaactgatctaccatgcaactttttcttgcccaccatggttttcttctggagcaaggaagtttattaagtgcattctcgatcctaaccatgataccaggataaaaattgcagaaattttggaagatgaatggttcaaaaaaggctataaccttgacgacgttgatgctgcattcaatggttcagagcaaagagcaacagggaagaaggccagcactggattgcaaacgggctcggttcgctatgaaggatactggaaggtaaattgtttgctaggcaaaaaccttcctatagatctccagaaatattatctaaatgtgatgaataccttctgcttttatcttgtacatgagctttggtgtcatatactagcaattgaaacatcaaattcaaatcagatggcaccggcgaagaggaagcgcacatcagcttcccggatgaatgtgtgggtagagcctgtgtccaccagcgccaccaatgtccgatccttgaccctgacctggagctacatggtgctgctgatgtcaatgcccgtgagggcatgaagagaaatgcccaggtcctccgctgctgcatcttcctccatgttgtcgtccatctccagcaagaat

SEQ ID NO: 41797 - DNA, 1585 bp, Zea Mays
atggcgcacctctccctttcccccttcaacaccggatccctcggtacggcgctggagatcgcgcccttcccaccttccccaccggatccggcatggcggtgcagcgcactagactacggctcgccgacggtggcacgcatcccgacatcgtcgctcgatctcagtcccttcatcggcgacgacgaagagcctggcaggccagccaccggcgacctgctccccgcacgccctgttaacgaagctgggccgcggtcgtcaagcgacgagcgggagcgcctctcccatcgggccggcttctcccgactgctctgtcttcctggcgtccggcgacctcatgcgccgccgcgggcgctggcggctcgtgcggaattctcctgtgctgctgcgggaaccggcagctcaagcgactgtggcaggtggtcgaggctaggcgtggaggggcggccgtgggaggcaccttactggtcaccggggtcgcctcatggagctacagttgcgcagtggagagatggacaggaacactgtgcccccgcctccgtcgcggcggcggcgaaccggatccggacgctcgccagggccttctgcggcgcgccggcctcgcgagcggatgcgggggccaacggggacgcccagcccgcaggatgcgcgcacggaaacaagcaggtgaagggtttcatgtttgaaaaaccggttgatctgaaagtaggtgtgaaccatgtcatattgctgtcatcaactatgggaatgaaggatagtggtggtgaacttgctgaagtaaagggcggcattcaggagtgcctaatccaaggtctcaacactgggacgttggatttacaagtcaatggctggggccataaattttggttgcaaccctcaccctcggtgtcactatgttcactgccatgccagagatactttgatgagccagatggagatgatcccgttgtacttgacatgagctcaatgaaactgatctaccatgcaactttttcttgcccaccatggttttcttctggagcaaggaagtttattaagtgcattctcgatcctaaccatgataccaggataaaaattgcagaaattttggaagatgaatggttcaaaaaaggctataaccttgacgacgttgatgctgcattcaatggttcagagttagccaagcagtgggatgctacaatctgctgaaggagcatagggacattcaggttctctaccatgatgatggagtgaaagacaacccctctacaaatggcagcaaagagcaacagggaagaaggccagcactggattgcaaacgggctcggttcgctatgaaggatactggaagctttggtgtcatatactagcaattgaaacatcaaattcaaatcagatggcaccggcgaagaggaagcgcacatcagcttcccggatgaatgtgtgggtagagcctgtgtccaccagcgccaccaatgtccgatccttgaccctgacctggagctacatggtgctgctgatgtcaatgcccgtgagggcatgaagagaaatgcccaggtcctccgctgctgcatcttcctccatgttgtcgtccatctccagcaagaat

SEQ ID NO: 41798 - DNA, 1738 bp, Zea Mays
tggaatggtggatgagccagatggatcgatcgccagccagtccaggtcgtcgttgccgttttccaatcatgcagcagagagagagagagctttcgcttggagtcggatgatttgccctttagaaatgacatccggcctgtgcttcaggtcaaaagtagtgcacacgcaatgatgggatttgctaatgatgctttcgatgcgcgcacggaaacaagcaggtgaagggtttcatgtttgaaaaaccggttgatctgaaagtaggtgtgaaccatgtcatattgctgtcatcaactatgggaatgaaggatagtggtggtgaacttgctgaagtaaagggcggcattcaggagtgcctaatccaaggtctcaacactgggacgttggatttacaagtcaatggctggggccataaattttggttgcaaccctcaccctcggtgtcactatgttcactgccatgccagagatactttgatgagccagatggagatgatcccgttgtacttgacatgagctcaatgaaactgatctaccatgcaactttttcttgcccaccatggttttcttctggagcaaggaagtttattaagtgcattctcgatcctaaccatgataccaggataaaaattgcagaaattttggaagatgaatggttcaaaaaaggctataaccttgacgacgttgatgctgcattcaatggttcagagcaaagagcaacagggaagaaggccagcactggattgcaaacgggctcggttcgctatgaaggatactggaaggttaatcctcatacccatcagctaaaactgtgtgactttggcagcgcaaaagttctggtaaaaggcgaaccaaacatttcttacatctgttctagatactacagagctcgagagctcatatttggtgctactgaatacacaacagccattgatgtttggtctgctggctgtgtgctcgctgagctgcttctaggacagcctctgttccctggagaaagcggtgttgatcagattgttgaaatcatcaaggttctgggcacacccacacgtgaagaaattaagtgcatgaatccaaattataccgagtttaaattcccgcaaatcaaagctcactcgtggcataagatattccataaaaggatgcctgctgaagcagtagatcttgtgcccaggcttctgcagtactcaccaaaacttcgatcgactgctggggtgaaccaaacacaaaaacatcagctcatgctcgtgtggtattttaagccctgcctctacatggacgccggcctcgcttccgcggtcaccacgctccggacctgcaccgatgtcgcgcacgtgctcgagcagtttcgtctcgcctggtgcggcaagctcgttcgggacgcccgcaccgtcgttccgtcaaggacctctgcttcgacctcttcatcattaggggtggaaacagagctttcaatgcatgctggaggtgcgcgatgtgatcaatattatccatgcttgataaatgatgacaatggtgatggccatgatatatggtcaatattgtattgatctttttccgagttttaggctgtcatgttgtttgctggaatggagatatttcattgttcacttggttcatgtgacagagttaattaccttatttacgtgctttcttagtaccctttttctgagatttgagttgtaagtaatacttccctaatcgtgttgtcattataactcaatgacattattaaaatcat

SEQ ID NO: 41799 - DNA, 1363 bp, Zea Mays
gtgagttaaaggagatctactcagaaaaaggtttgggcaaagtttagtggaaactggctgagaacgaccgagcagccacttggtataagagatactttgatgagccagatggagatgatcccgttgtacttgacatgagctcaatgaaactgatctaccatgcaactttttcttgcccaccatggttttcttctggagcaaggaagtttattaagtgcattctcgatcctaaccatgataccaggataaaaattgcagaaattttggaagatgaatggttcaaaaaaggctataaccttgacgacgttgatgctgcattcaatggttcagagcaaagagcaacagggaagaaggccagcactggattgcaaacgggctcggttcgctatgaaggatactggaaggttaatcctcatacccatcagctaaaactgtgtgactttggcagcgcaaaagttctggtaaaaggcgaaccaaacatttcttacatctgttctagatactacagagctcgagagctcatatttggtgctactgaatacacaacagccattgatgtttggtctgctggctgtgtgctcgctgagctgcttctaggacagcctctgttccctggagaaagcggtgttgatcagattgttgaaatcatcaaggttctgggcacacccacacgtgaagaaattaagtgcatgaatccaaattataccgagtttaaattcccgcaaatcaaagctcactcgtggcataagatattccataaaaggatgcctgctgaagcagtagatcttgtgcccaggcttctgcagtactcaccaaaacttcgatcgactgctggggtgaaccaaacacaaaaacatcagctcatgctcgtgtggtattttaagccctgcctctacatggacgccggcctcgcttccgcggtcaccacgctccggacctgcaccgatgtcgcgcacgtgctcgagcagtttcgtctcgcctggtgcggcaagctcgttcgggacgcccgcaccgtcgttccgtcaaggacctctgcttcgacctcttcatcattaggggtggaaacagagctttcaatgcatgctggaggtgcgcgatgtgatcaatattatccatgcttgataaatgatgacaatggtgatggccatgatatatggtcaatattgtattgatctttttccgagttttaggctgtcatgttgtttgctggaatggagatatttcattgttcacttggttcatgtgacagagttaattaccttatttacgtgctttcttagtaccctttttctgagatttgagttgtaagtaatacttccctaatcgtgttgtcattataactcaatgacattattaaaatcat

SEQ ID NO: 41800 - DNA, 1111 bp, Zea Mays
attgtctctgttggagatgtactgttgatttaaatactgaatatttgcagtactccctttatccaaaaaagagtacaattctaggtttgagactaaaactttcctgactttgacatattttataggaaattcgagaatcagtgattgaaccagaagagaaagactcttggagttatatttgggggaatagcacctactcgtcagctaaactttaccactacactttcaaaaatgttgaacaccagaaacatcttaaagagaaagaacttcaaggttcaaggcgacaactacatatgtgttctttgtcaacttcaaagagaagaaactgccttccattttttcttcaattgccctttcagccaggactattggagacatctgaatattcagtggaactaccagattgacttctttgcaacctttcaacaagctagggacttgcacggttcaccattctttatggaggtctttatcatagtagcttggcaaatctggaagcaaagaaacaattttatctttgacaggggacgactatctttccttggctggaataaagaattctgcgccgaagcccttctgcaagctaaccgcttttctgaagagaaatcaactcttttctcctcatttgtaaattcctatagatagcagatatttcatttccgtgtgcctagttagtttacttctggtttatgtcttgggagcgactgctcatgctctttgtccactttcttctttatattaataaatatctaccacaacaggggaagccccgatgtacattttcaaaaaaaaatcaacatttgtatctcctgatagatttacaatagagatatctaatgatacttatttaatataaaaaatgttagtactttttttgtaggtacagaggtggtgaaagttaaaaaaatgtttgactcctcgaaaagtgagtgttgggggtctgcttcttcgccgaaggtcctgtaagaagaaacatcttcgaaggatcagcacagaagtaacgccgaagctaccttctagggagcttcggcataacgacacgccttaagacgaagggttgcaccgacttaaagattaaaagacagatcggaacatgataatttgtgtcatg

SEQ ID NO: 41801 - DNA, 1852 bp, Zea Mays
caccctataactccaccgcctcgcccatccggccgtcccaggcttccccagctcaggagtcaggtcctcacgccgcgcacgggccagagacgacgagagcgcgcccatccggacccggacagagctcgcctgcgcctgcgcctccaccgatcggcaagcgggaggggagatgaggggttcgtcgcggaggccggtcgccgtggtgatggcctgggtgcggcgccagccgcccaaggtcaaggccttcctcgccgtcgtcgcggggatggctgcgctcgtcttcatccgcttcatcgtccacgaccacgacaacctcttcgtcgccgccgaggccgcgcacgcgctcgggatcgccgtgctcatctacaagctcaccaaggagaagacctgcgccggattgtcactcaagtctcaggatttgactgcattatttctggccgttaggttgtattgtagttttgttatggagtatgacatccatacaattctggatacagctgcacttgcagctactctttttgttatttacatgattcggttcaaactgaggtcaacatatatgctggacaaagacaactttgccttgtactatgtgatattgccttgtgctctgctagcgctacttgttcatccttcaacatcgcacaacatagtgaacagaatctgctgggccttctgtgtttatttggaagcagtttcagtgctgccccagttgcgcctgatgcaaaataccaagattgttgagccgttcacagctcattatgtgtttgcactgggtgttgcaaggtttcttagctgtgcacattgggtccttcaggttcttttttttttgtctcccttcctgttttatttaccattaaaagaactaccatgctagttcatactttctggaacaaagtgtcaattggtcatctgtttttgaggccctaatgttagtagagtattaaaaaatgtcttccccgttagttagactatggaccaaatcattgcaaaggtctggactcccaagatatcctagtctgaaaagaacaggatggaaacacaattatacaaaacaaattcagtacatcataaggtatagatgagtaatgattaatgaaacagcaatttttttttaatttaggtgtgatttttttgttattgatatcatcggctgtgtttgtgtccattgcaaaatgtgctgggatgtactttactttgttctacctcatcccgtgctgtatgtatctccagtttatggctgtctactaggagacttgtgtctcgtggtgttcatgcatggaagcatggagatggaggaaatatcctccttacccgttttggatacccgaggccgtttgttgactgctctgggctatggtttgtggccttcaatggtgcttctctccgaaattgttcagacattcatccttgcagatttctgctactactatgtgaagagtgtttttggtggccaactggtgctgcggcttccgtccggggtggtgtgaacactgcagcgcgatagaagaagcataccgtccatttcttctgtgttaaatcacacaaagcaacagtcatgctcctagtgcccaaactttttcactctctcaaagtggattagcagagccccgttaatcttttttacttgtaaactgtttacgtgaatactgtaccaacaccgtggaacgtaggccgtccatctgactttttcatccaggctagagttgaagcttgtcgcatttccagaatagagaccagattctcccatttcattgactggtagtctattgtagaaacagacggaacgctatgatagattgttactccatttcaaattaattataaatcattttaattttcttgaagagtt

SEQ ID NO: 41802 - DNA, 2381 bp, Zea Mays
ccgcgcgcatgccaacagacccctcatccgccgtgcgcctgacgcccaccccgacactacccacctccatcgtgctccgctccccgtccttcgtcccctcgcctgtcgcctcagcctccacgcgacgcgaccacggctcgccttcaaaattcaaatcctcgccgctagacgcgcccactgccatccagcctctggggtctggctcactgcccggccgtcaggccacctggcactggccacgcccagtcggtgcggaagaggaggccgcggacctggccgagctcccttgtgaggtggtcccggggcgcgcgggcctcacggtggcccatggacgccgggcggaagtcacgccgagcggaagtcacgctgagccatccatgcctaccctggcttcttccctgcctacgcggaagttggagctgagtcttgagtgcccatgaagctcatatcgacatgttggccttgttgggtagcaggttggagcaggttactccgttactgccgatgtgcattcacagtatgaaaatgagatccaggaattgatggatgtgatttctgttgaataagaggagaaaaatgacattcacaggaagcttcagaatgtggaaaatgagtgtaaatgcaagctggattgatgagttgaaaaggaagacgagtttcttcaaacagaaaacgtcatgaaccaattctaataggaaaacagaaacaagatttgtatcctcaacatgcttattaagtagcgttccatgggcttgtctttcagttctgaaaagggagcagaagatatgaaccatgacccccttatctaatcttcagaaactgcaactgtttcccttacggcgtagctttatctcatactgccggatttagaaaaatccactgctccaaattccaaaaatgacatatcactgccagttgcattagaaccaactgtgctctaaatatgtaatatagtcatttcagtttgtttctgatcgcaatcttcctgcatacttgagacaaaagaagcttgtttctgaacctttttgagtcatgcaatgttgtcaggataacctgtccaaaaatcattcctggtcatgaacttccactaattagtagtaagtagtttattctataattatattggagcctaaaaatgcattagcttgtccaaaaaccatcactttatctactcttgatcagttttgataatttgttctttggatctagaacacagtagaggtatgcctgaaaatgcattagcttgtagtcaactgtgctaacgaaagcatagcagatcatagatagtgtttaaaatttaaataatgtacttcgcttatttttgctgcttttatagccttgaagactttgaataaaaaaacatagttcaggtacataataaaaaagagcttcctgcatacttgacacaaaaagattccatcccgcccaccctttaattcggtcttcagagagtttgaataaaaaaatggaaaacaagagcttcaggttgcagatgtaggccattcctgaagaatgatggtcagttgctgctacgtctaatcattgggttccgtattactacatacacggagaaaacagattttccacatatattctttgttttgttctacaaacaaagttaagtgcttcgacaacatattcctaccttctagctctctctgaagcaaatttatttcctttcttttggggggagaagatctcttcaaacatgtgaggatgtttctgctgggcaagaaaatgctttagatgtttctattgggtagagagaaaaatggtgctggatcgatttaaatacagtacatgttctatgctgccatagctaaaacagcgttcgttgtttagaatcctaggtatcttaaactgtcttgtcattgctattagtattttccaatgcccatattgatgtatttatcctaattttcgtctcatgatgatctccagggccggtcctggaggggggcaagtggagcggccgcaccgggcccccgattttagaagggcccccaagtagtgtacatgtatataggttttatatgttgggtccggcctgttaaagttacaatagacctattttttaattgtctaactaactaaaattgcatctgtaactccagacattcaagagtatatttgggtttttattgagctcgacaacattgaagacgttaaatgatactgaactagaagcatgttgcagtgaattcgcaaaaacattctcttcacaagccagttctgacattgagcttttcaaagttaaaattgtagaagaactattcaagatggatcacgagagaacacccaagcctaatatgacatgaagtcacacacagcgcaactctccgagtaccacctcgatcgttggatgaggacgagcaacgaag

SEQ ID NO: 41803 - DNA, 2561 bp, Zea Mays
ccgcgcgcatgccaacagacccctcatccgccgtgcgcctgacgcccaccccgacactacccacctccatcgtgctccgctccccgtccttcgtcccctcgcctgtcgcctcagcctccacgcgacgcgaccacggctcgccttcaaaattcaaatcctcgccgctagacgcgcccactgccatccagcctctggggtctggctcactgcccggccgtcaggccacctggcactggccacgcccagtcggtgcggaagaggaggccgcggacctggccgagctcccttgtgaggtggtcccggggcgcgcgggcctcacggtggcccatggacgccgggcggaagtcacgccgagcggaagtcacgctgagccatccatgcctaccctggcttcttccctgcctacgcggaagttggagctgagtcttgagtgcccatgaagctcatatcgacatgttggccttgttgggtagcaggttggagcaggttactccgttactgccgatgtgcattcacagtatgaaaatgagatccaggaattgatggatgtgatttctgttgaataagaggagaaaaatgacattcacaggaagcttcagaatgtggaaaatgagtgtaaatgcaagctggattgatgagttgaaaaggaagacgagtttcttcaaacagaaaacgtcatgaaccaattctaataggaaaacagaaacaagatttgtatcctcaacatgcttattaagtagcgttccatgggcttgtctttcagttctgaaaagggagcagaagatatgaaccatgacccccttatctaatcttcagaaactgcaactgtttcccttacggcgtagctttatctcatactgccggatttagaaaaatccactgctccaaattccaaaaatgacatatcactgccagttgcattagaaccaactgtgctctaaatatgtaatatagtcatttcagtttgtttctgatcgcaatcttcctgcatacttgagacaaaagaagcttgtttctgaacctttttgagtcatgcaatgttgtcaggataacctgtccaaaaatcattcctggtcatgaacttccactaattagtagtaagtagtttattctataattatattggagcctaaaaatgcattagcttgtccaaaaaccatcactttatctactcttgatcagttttgataatttgttctttggatctagaacacagtagaggtatgcctgaaaatgcattagcttgtagtcaactgtgctaacgaaagcatagcagatcatagatagtgtttaaaatttaaataatgtacttcgcttatttttgctgcttttatagccttgaagactttgaataaaaaaacatagttcaggtacataataaaaaagagcttcctgcatacttgacacaaaaagattccatcccgcccaccctttaattcggtcttcagagagtttgaataaaaaaatggaaaacaagagcttcaggtaactcctttgtacaaaggagcttctcttcaatagcatcaagttaattgttagttaagaaaacatatcaagtatcttttgtggagggcagttatggactgagacatctcatctcacttgtagagttaagtaaactaaaatagcatcaagttaattgttagtttacacaatattttgaaatgcgcccagcaacatgcattttagtacgtgtttatgccatgtgatgcatgttcaactgcattatcttcattttcatcccttctacaaagtttccaacatctgaaccatctgttacttctcagcaggttgcagatgtaggccattcctgaagaatgatggtcagttgctgctacgtctaatcattgggttccgtattactacatacacggagaaaacagattttccacatatattctttgttttgttctacaaacaaagttaagtgcttcgacaacatattcctaccttctagctctctctgaagcaaatttatttcctttcttttggggggagaagatctcttcaaacatgtgaggatgtttctgctgggcaagaaaatgctttagatgtttctattgggtagagagaaaaatggtgctggatcgatttaaatacagtacatgttctatgctgccatagctaaaacagcgttcgttgtttagaatcctagggccggtcctggaggggggcaagtggagcggccgcaccgggcccccgattttagaagggcccccaagtagtgtacatgtatataggttttatatgttgggtccggcctgttaaagttacaatagacctattttttaattgtctaactaactaaaattgcatctgtaactccagacattcaagagtatatttgggtttttattgagctcgacaacattgaagacgttaaatgatactgaactagaagcatgttgcagtgaattcgcaaaaacattctcttcacaagccagttctgacattgagcttttcaaagttaaaattgtagaagaactattcaaggttcaacatcattggcgcatggagccgaacgccataacagacccctagaggaactaatcccatctttg

SEQ ID NO: 41804 - DNA, 2682 bp, Zea Mays
ccgcgcgcatgccaacagacccctcatccgccgtgcgcctgacgcccaccccgacactacccacctccatcgtgctccgctccccgtccttcgtcccctcgcctgtcgcctcagcctccacgcgacgcgaccacggctcgccttcaaaattcaaatcctcgccgctagacgcgcccactgccatccagcctctggggtctggctcactgcccggccgtcaggccacctggcactggccacgcccagtcggtgcggaagaggaggccgcggacctggccgagctcccttgtgaggtggtcccggggcgcgcgggcctcacggtggcccatggacgccgggcggaagtcacgccgagcggaagtcacgctgagccatccatgcctaccctggcttcttccctgcctacgcggaagttggagctgagtcttgagtgcccatgaagctcatatcgacatgttggccttgttgggtagcaggttggagcaggttactccgttactgccgatgtgcattcacagtatgaaaatgagatccaggaattgatggatgtgatttctgttgaataagaggagaaaaatgacattcacaggaagcttcagaatgtggaaaatgagtgtaaatgcaagctggattgatgagttgaaaaggaagacgagtttcttcaaacagaaaacgtcatgaaccaattctaataggaaaacagaaacaagatttgtatcctcaacatgcttattaagtagcgttccatgggcttgtctttcagttctgaaaagggagcagaagatatgaaccatgacccccttatctaatcttcagaaactgcaactgtttcccttacggcgtagctttatctcatactgccggatttagaaaaatccactgctccaaattccaaaaatgacatatcactgccagttgcattagaaccaactgtgctctaaatatgtaatatagtcatttcagtttgtttctgatcgcaatcttcctgcatacttgagacaaaagaagcttgtttctgaacctttttgagtcatgcaatgttgtcaggataacctgtccaaaaatcattcctggtcatgaacttccactaattagtagtaagtagtttattctataattatattggagcctaaaaatgcattagcttgtccaaaaaccatcactttatctactcttgatcagttttgataatttgttctttggatctagaacacagtagaggtatgcctgaaaatgcattagcttgtagtcaactgtgctaacgaaagcatagcagatcatagatagtgtttaaaatttaaataatgtacttcgcttatttttgctgcttttatagccttgaagactttgaataaaaaaacatagttcaggtacataataaaaaagagcttcctgcatacttgacacaaaaagattccatcccgcccaccctttaattcggtcttcagagagtttgaataaaaaaatggaaaacaagagcttcaggtaactcctttgtacaaaggagcttctcttcaatagcatcaagttaattgttagttaagaaaacatatcaagtatcttttgtggagggcagttatggactgagacatctcatctcacttgtagagttaagtaaactaaaatagcatcaagttaattgttagtttacacaatattttgaaatgcgcccagcaacatgcattttagtacgtgtttatgccatgtgatgcatgttcaactgcattatcttcattttcatcccttctacaaagtttccaacatctgaaccatctgttacttctcagcaggttgcagatgtaggccattcctgaagaatgatggtcagttgctgctacgtctaatcattgggttccgtattactacatacacggagaaaacagattttccacatatattctttgttttgttctacaaacaaagttaagtgcttcgacaacatattcctaccttctagctctctctgaagcaaatttatttcctttcttttggggggagaagatctcttcaaacatgtgaggatgtttctgctgggcaagaaaatgctttagatgtttctattgggtagagagaaaaatggtgctggatcgatttaaatacagtacatgttctatgctgccatagctaaaacagcgttcgttgtttagaatcctagggccggtcctggaggggggcaagtggagcggccgcaccgggcccccgattttagaagggcccccaagtagtgtacatgtatataggttttatatgttgggtccggcctgttaaagttacaatagacctattttttaattgtctaactaactaaaattgcatctgtaactccagacattcaagagtatatttgggtttttattgagctcgacaacattgaagacgttaaatgatactgaactagaagcatgttgcagtgaattcgcaaaaacattctcttcacaagccagttctgacattgagcttttcaaagttaaaattgtagaagaactattcaagatggatcacgagagaacacccaagcctaatatgacatgaagtcacacacagcgcaactctccgagtaccacctcgatcgttggatgaggacgagcaacgaagcaagctataaaaggggcaggttcaacatcattggcgcatggagccgaacgccataacagacccctagaggaactaatcccatctttg

SEQ ID NO: 41805 - DNA, 2311 bp, Zea Mays
ccgcgcgcatgccaacagacccctcatccgccgtgcgcctgacgcccaccccgacactacccacctccatcgtgctccgctccccgtccttcgtcccctcgcctgtcgcctcagcctccacgcgacgcgaccacggctcgccttcaaaattcaaatcctcgccgctagacgcgcccactgccatccagcctctggggtctggctcactgcccggccgtcaggccacctggcactggccacgcccagtcggtgcggaagaggaggccgcggacctggccgagctcccttgtgaggtggtcccggggcgcgcgggcctcacggtggcccatggacgccgggcggaagtcacgccgagcggaagtcacgctgagccatccatgcctaccctggcttcttccctgcctacgcggaagttggagctgagtcttgagtgcccatgaagctcatatcgacatgttggccttgttgggtagcaggttggagcaggttactccgttactgccgatgtgcattcacagtatgaaaatgagatccaggaattgatggatgtgatttctgttgaataagaggagaaaaatgacattcacaggaagcttcagaatgtggaaaatgagtgtaaatgcaagctggattgatgagttgaaaaggaagacgagtttcttcaaacagaaaacgtcatgaaccaattctaataggaaaacagaaacaagatttgtatcctcaacatgcttattaagtagcgttccatgggcttgtctttcagttctgaaaagggagcagaagatatgaaccatgacccccttatctaatcttcagaaactgcaactgtttcccttacggcgtagctttatctcatactgccggatttagaaaaatccactgctccaaattccaaaaatgacatatcactgccagttgcattagaaccaactgtgctctaaatatgtaatatagtcatttcagtttgtttctgatcgcaatcttcctgcatacttgagacaaaagaagcttgtttctgaacctttttgagtcatgcaatgttgtcaggataacctgtccaaaaatcattcctggtcatgaacttccactaattagtagtaagtagtttattctataattatattggagcctaaaaatgcattagcttgtccaaaaaccatcactttatctactcttgatcagttttgataatttgttctttggatctagaacacagtagaggtatgcctgaaaatgcattagcttgtagtcaactgtgctaacgaaagcatagcagatcatagatagtgtttaaaatttaaataatgtacttcgcttatttttgctgcttttatagccttgaagactttgaataaaaaaacatagttcaggtacataataaaaaagagcttcctgcatacttgacacaaaaagattccatcccgcccaccctttaattcggtcttcagagagtttgaataaaaaaatggaaaacaagagcttcaggttgcagatgtaggccattcctgaagaatgatggtcagttgctgctacgtctaatcattgggttccgtattactacatacacggagaaaacagattttccacatatattctttgttttgttctacaaacaaagttaagtgcttcgacaacatattcctaccttctagctctctctgaagcaaatttatttcctttcttttggggggagaagatctcttcaaacatgtgaggatgtttctgctgggcaagaaaatgctttagatgtttctattgggtagagagaaaaatggtgctggatcgatttaaatacagtacatgttctatgctgccatagctaaaacagcgttcgttgtttagaatcctaggtatcttaaactgtcttgtcattgctattagtattttccaatgcccatattgatgtatttatcctaattttcgtctcatgatgatctccagggccggtcctggaggggggcaagtggagcggccgcaccgggcccccgattttagaagggcccccaagtagtgtacatgtatataggttttatatgttgggtccggcctgttaaagttacaatagacctattttttaattgtctaactaactaaaattgcatctgtaactccagacattcaagagtatatttgggtttttattgagctcgacaacattgaagacgttaaatgatactgaactagaagcatgttgcagtgaattcgcaaaaacattctcttcacaagccagttctgacattgaggttcaacatcattggcgcatggagccgaacgccataacagacccctagaggaactaatcccatctttg

SEQ ID NO: 41806 - DNA, 3472 bp, Zea Mays
aaacgaatattacaactttactatataatagaagttctgtataaaataaataaataattacatcgtaagaagagagcgatccagcaatccaaagttgactggaagacgacgacctagacctctcacgaacacatcgtagcatcctccctgcgcctcatcctgtggcctgttcttgacctgtgggggtgtaagacattaagggtgagctcacatatgttcatcgctcaacaagttgtaggtaataatgtgcatgaacttgccaaaagagaatggttaaagctgagcattgcttttaaaatttgtcaaaattttattagcagttactaactgtaagtagataccgaaccataataataatagaacaaaattaataataaatctcatgcaatgcagatgataaattgaatttagttctataatttaatcatgcgggagtcttaagctgctcattcggctcaattaaatttagccaccgagataaagaatcaaagtattttaaaaatgcaggtactttaaagggactatacttcaatttaggtgacatgcacatgcacgcaagcaagcaagcgccggttgtttgcccattcggcttattccagagcgtcttccggaccacggccacgaaagtcatggccgtccctccaatatggacggaaaatgcccagaaccaagctatcgcatgcaagaccgcagtacgcccggagttgaatccgtctagtcgacgactgcctgcctgaggagacgaaccagcttgccgatcgccgtacctactgtcgaagaagttccggaggtagcaaggccatctagcactcgatcggcgccctcggcggcggcggccgactgccggggctgcacaatggctagatcgttcaacatttgtccgcagatcgaccccttggtggtcacgcgcgtccccggcgtggccctcgacatgctgttcctcgtaatcatccaagcgcttgccgtcatcctcctcgccaagttcatccacctcttcctccaacgctacaaccagccgagcgcagtctctcagatcctcgccggagttgcggtgggcggcatgggcctgcgcaacgccatcctgcacgtggacgtggacgacgtcgaggacatgtacggcggctacatcaccttggcgcgcgtcgtgtacatgttcctcgtcggcctcgacctggacctcgccgcgctgcggaactccacgcgccggtgcgtcgccctggcctacgcgaccgtggccgccagcctgctcgtggccgccatcgtgtccagcgggatgtacggcagcatgatgcactccccggtgaagacgcccgagctgctcgccgccactctcatgctggcgctcaccaacacctcatccatcaccatctcgcggatcgccggcgagctcaacctcacagtgacggagaatggccggctcctcgttgccgcggccatcatcacgaacctcatctgcgtcgtcggcgacagcgtcctgtcgtccacggcactggccaaggagaagagccaggacctgtaccacacctcgccccagatcaagaagggcttcctggcgctcgccgtggcaggcgtcgctgtgtggcaggtgcgccccgttgtgacgcgcatcaaccagcgcaacgttgggcagcaccacgtcaggagccgcgacctggtgatcatactcctgggcatctggttcatcagcaacatacagcagctgctgggtttcgacgggatgccgacgagcctcgcgctggggatggcgttcccgagggaaggccccgccgcgcgttccgtcgccgacgcgcttatgccccccgtcaacggcttggtcctgcccttctacttcgctaccatcgggatgaggctcgactacaactccatgtccggcgccatcatcgtgcccggcctgctactgacgctgctcggcctggtggcgaaggccatcggcgccacggccgcctccacgtacctcaacgtcaagggccacgtcgacaccatgaacatgaagttcgccaaatcggaaggggtgtgggcggagcaggcgctgtacgcgatgatcatcggcaaccttatcagcaccatcatcgccgggccggccgccgccgcggttctgagcagggaaaaggaagagtacaagacaaggcaccaagccatggaatcgttgagcgcagagaaagagctgcgcatgctcgtctgcgcccacagcgcgcacgccgcgcccggcgtcctcagcctagtcgagctcctggtgatcacgccccacgagcagccggccgtgccagtcctccatttcttcgaggccccccgagaccgatccgcccggacgccgtaccaccagcggacgcggggtgacgaaggcgccgaggacaaaggcggccccgatcccgttacgcagatgaacatggtggtcgacgtgttctccaagacgacgggcatctccttccgccagatcgacgtggtgagcctcggcgcgtctcgggacgcggccgtcgcctgccgtggcgcggaggaagcgcacgccagcctgctactcctcccctgctacaaggagcagcggttcgacggcaagatggcgtgccgcctcgaggagcggtggaagctgaaccacgacgtgctggagcgggcgccctgcaccgtggggctcctcgtggaccgcccgtaccgtggcggcggcactagcttccaaacgcccatcgacatcgccccggagaccgggaggacgctggtgcatccgtgcagcgaccgtacggtgacccacgtgatagcggccgtgttcctgggcgggcccgacgaccgcgaggcggtgtccttcgcgtgccggcttgcggagcacccggccatcgggctgacggtgttccgtttcgtgaagcgcagcacgtacgacaccgtgacgtcctccacctcacgcgccgccgcggcggtggcggccggcggcgacgagcttgacgtgccgttcaaggaaggccacgtggacgagcggttcctgtggcggttctacgagaactacgcgtcacgagagctggccatgtacgtggagaaggtggtggagagccccgcggacgtggtagagacgctagaagggatgtccggaatgttctcgctggtggtgctggggcggggcggtcggcagccggtggagctgatggccgggctggagcggtggtcggaggccggcagcgaaatagggcctgtgggagagatcctggcgtcccacgagtcgctagagatgggctccgtgctcgtcatgcagcagcacacggtggcgctctcgccgccatgccaatgatgtcagatttcacaggacagcagcagaacggtttgtgatagatatctggactaggaaaaatggattttcttctgatgccctttcaggtcagtttcaagagtagtggatatcctcctacatattggacttgttgtactgtggcatttgtatcattgtaagaaaacagttacttaggactcttctctaacatctttgttttca

SEQ ID NO: 41807 - DNA, 1887 bp, Zea Mays
gcgcttctctctctccctcggatatttctccaccgccggccatccgatatatctgcgctgctggtgctcgcctcagcccaagacacgcccatgccgagctccctgcgcgccgcggcctcccagctcctcccagccatggccgcctctctctgctcgctcggcttctagctccatggccgagctcctctgctgaacgctgctgctcggctccctgttggaactttgtcggcgccgtctagtcatgctccccgccatcgtctcacccttcctgcttgccgtgtgtgggtctacgcactagccgcgctcttctgttttctctcggcgtgcccagcgtcgcgccctcgccagccgagctcccatctcccgtgcgcgtggccatctccctgtgcccgacgcccagctcgccatggacgcgcgcagctccctcgaggttcctctccatggccgcgctccgtattcccctgccgcgtccctcaagctcgtgctctggtatatctcttcgcggccgccgttgaatcgccgaaccctatctcccatggcgctcggattttgaccttgctcgtcggtcggccgtgctggtgctagtcgcctcgctcaccgatgactccccagctagacgcatgagcttgctcatgcgtcaacctcatcatcgtctcggacatcgcatcgctgtggtgcatcagcaggacgccggagcagtatatgtgtccttgcctcgccggtccgctcttcgctatcgtcgggtgttcggaacaagctttgtgacttattttagatttgagcagcacggtcataacattgctgccacaccagaactctttaattcttcatgctcttatggatctattttattcatatgttcgagtgaatattttctctagcaaggtaactatgttcttaatcttcattatatttgaaacatgttgctgctctaaatagtcgttttccctcttttaccaaaataatgtcctgcttgagcttctgtttgtagatgccaagaaagatgatcccctaggtttacaacatcttgcactatgtcctacgcgttactggccaaacgacaacgccgtggagtgcagcaatgacaggaactacctctgtaggaaccggttcaacaagtacttcgacatcacgtgggtggagcagacttggtgggcggacaactatgactgtgttgtcgtctagcacgagcacccctcgcgcgacgtcgactatgacgatgaagattcggctgcgcccgtaaccccatgccaatccaaggacgacgagcaccaacggcaccaggcgagcggggactaggggacgactgtaggcctccccctctttctcgcctccactcacccgccaccaccccaacgacgagggagtgagagatcggcagcatctcagggcctggcagggcagctgcattgcgctgtggtggccatggctgatccatacgatgaggatatgggatcatcgctaaagagccaacagtcacaccctggcctccgccacaagcccgccattgagatatttagttatcatgtctccatgcttattttgattatacactaccttggttaattttcaatcatctccatgggtacattttttcttagttgcttaaactagcactatttcgcacaaattgtactagtacaagatttgatgtaaaattctaggcaaaaatgtatactgcaagggtggcattagtggtgaactggtgataacatgcaggcaaaggtcaccaaggagatgcaaggttcaaaatcctccctccctcatgtgtgcagttttccatgtgtcaagtagagtcagtacacaaaacatttgtgtcggcttgcagctgcttagcagtagttgggaattagccgatcgagtttgatcttgggagctatgtgatct

SEQ ID NO: 41808 - DNA, 5479 bp, Zea Mays
ccaccgccggccatccgatatatctgcgctgctggtgctcgcctcagcccaagacacgcccatgccgagctccctgcgcgccgcggcctcccagctcctcccagccatggccgcctctctctgctcgctcggcttctagctccatggccgagctcctctgctgaacgctgctgctcggctccctgttggaactttgtcggcgccgtctagtcatgctccccgccatcgtctcacccttcctgcttgccgtgtgtgggtctacgcactagccgcgctcttctgttttctctcggcgtgcccagcgtcgcgccctcgccagccgagctcccatctcccgtgcgcgtggccatctccctgtgcccgacgcccagctcgccatggacgcgcgcagctccctcgaggttcctctccatggccgcgctccgtattcccctgccgcgtccctcaagctcgtgctctggtatatctcttcgcggccgccgttgaatcgccgaaccctatctcccatggcgctcggattttgaccttgctcgtcggtcggccgtgctggtgctagtcgcctcgctcaccgatgactccccagctagacgcatgagcttgctcatgcgtcaacctcatcatcgtctcggacatcgcatcgctgtggtgcatcagcaggacgccggagcagtatatgtgtccttgcctcgccggtccgctcttcgctatcgtcgggtgttcggtaaaaatcttgaagcaggaagtcatcatcgttcgcatgaaatttctaattgcttggatggtggtgagttaggtcgctactcctgccttttttggataagtagaacggttaaatatattagttgcgataatttccttgtcgtggttaaaatgcattgtgagacatttgctgatgtgtcacatatgcgatatatatttggattggtgatatgaaggttaggtctggtattttatttattggatagccatcatatttttcggggttatgtcagttttatttattaaggtatagtcaatgctcggctctaatagtcattattttctatattcggtgaccgattaaaccatcttagggagatgagagtgtaaattagacaaggaatgcttaggtggatgtgtaggtctggtactctgaaatcagttataggtctacaacatgaagtataacaatgatgcgtggaataggtttagtgtttccaatgactagctgatgtgttcttctcgagtaactgattctattggtttaaagtaaggctcgaactgaaacccactatcgatgtcgtagtttcgagtgaatttagtatttaacgtgtaatcaacgaaaagcttggattagtattagttaatcgatgtagtggatctaagctaaatttattattggcacgcattttgttagccgaattgttagatagtttaaataaatatgtgtggtgcaaaataaaattaaaatagttctttgtaagcaaagtggtataatttataaagcaagggataagtttaacatttaattaattagctaatgagttgggtttaggctaattgtgttaaatgtgtacagtttgttgtttcgtgatgtttgcgttagattcagttaatctagagaaacgtaatcattgcgcttagtcgtatgtcgataactagtgtttccgtatgaaatagtacaacgcctcgccgctaggtgtttaattcgctatagtgtagcattatttaggtttgtgatattcctgtttatatgcattcatgtgcattatgcaaatcatttaggtacgtttattgattacgtgatatggaggaccaaagttgagtcgaccacaagatgtcgctgcgcataagcttctccacaagatgatgttgatggacgaacctgacaatggaaatctgaatgagtgccaagacaaaggatggttgtcaagtgatcgtcgtctaacaaacactaacgtagtgtttattccaggcaagccccggtgcctgcaaccccttccttgtgtttttaaatgatttttacacactttaagtctagcgtaatgtgcattaggtttatagaagttgcttggaaaccctttgatgcattggctaccttgaaatccattccttttataaatacttctggtgaagtatcaaatatgatttacaaaattgcttagccttgcctaaaggtaaatcttgcggatagaggttgtcctttgcgttaatgccaagctcaagggttatcctgaggaaggatggcttctgcctgcaagaatattttcattgggagcaatggtgggatcttactgcaaaagttccctataatgctcttttcatcctaaggaacacaaacaatcctaaggatggaagtacttaaatcaggacttgggctaggaacaggtgatgttctacccaggttgattaaggattatagcgaatgtaggcttgttgatcgaggaccttttaactggtcacatgcctcgtcatgggtaagctttgcctcgggcagactaatatcagaagaggacaacacacaatgggagtggagagatggcaagagtagcgtgtaccctccgtggcaagaggctcgactagggatggcaatttaatccgtggatttggatatccgtcggatatccgacccgatggataaggatatggatatgttttttgacccgtgggtaagacccgtatccgatccgagataaagagggcatggatttggatattaaatctcacccacgggtaatccgttggatatccgaaattaaccattagtccattattgccagaatgaacattattatactatcattgactaaaaaattcaaacacatctactatagtgctagctcaagtgctcaacactacactcggatcggatcaatattgattgtcatgtatttgttttcatgttgagacatgtagacatgtatttttgtcatgttgagaatgttgattgttgaaggacatgtatatttgtttaatttttttattaaattttaagttgtgtatgatgttgaattgagaagaaatttgattaattatgttattcaattgctgaaaatggttcttatcatatccgatggatatccaatggatatccgaaacccgatgggcatggatatggatatgaatttctacccgtggatatagtcacgggcggatattatctatgaccgtggatatgtctgcgggtggatatttccaatatccgatccgaattcgacccgttgccatccctaggctcgacggtggtgtatcagtgctctcggttggcgtgaacccgatttggtcttaagaaccccggtggtgagttgacatatgcaagggttaagtgctacatatgtcgtgtgattagagatccccagctgggtattaatcgattcagatcgccgttacttctcggacatgaagactttgtcactgccctgcaatctaagtcatggatggaatcataatgagcaaaaatcatgttgtattgattaatgtgatgatgaaattagactagatgcaaacaaggtctattaatacttaatctagcattaaaatcttgaaagtaaggactcattttagtaagctttctgcaaactattaatgttgattcttgctaaaagcctttccttgattcccaaatccagcatatccttgagagtctttttccttagtcaggtaagtcttgctgagtacttgtgtacttaggattttattcccattgttgctgcaggttacgagtcactttgattgtgattggtgttaagcgccagtgggcatggccttctataagtctaagtacttcttctatacttcttattgaggatggtcacttaagctagcatatatttcaaaactacaaataatttataattgttcaaagttattcctttgaatcacttttgtaatcactccgatcatgcacatcgtaaaacttgatgtaacttgtaaaatttggtaataagatttccgctgcaaaatgttggtgtgtgatttgtgtttacttaatcttgtggtcctagttgtaagtggtttatccgaggtccttggggcactcggacagatcctattaagttatctggtgcacatgcatagccgtctgaggtctttgagacaaggacaggtgcatgtgggcccaataacttaggaggttctacaacaattgccgattagttggtgcctccagtagaagaataccaatagattgaatgttttgtgttgtgggttggagaatgttgtgagttcgtatgatagggtaaggtgacttactggaattggttatgccatagaaaagggaagtgtgcgttgcaaaatggtctctgtgacctttagcaataaaacacgtaatataagtgtatgtagaaattgtagacctattagtttagttagttaccttaatctcattgatgttgttttctttctcttcattttgttgatttccttccaaatttcatcccatcagttgcttcttaatctgctgatttcaggaacaagctttgtgacttattttagatttgagcagcacggtcataacattgctgccacaccagaactctttaattcttcatgctcttatggatctattttattcatatgttcgagtgaatattttctctagcaagatgccaagaaagatgatcccctaggtttacaacatcttgcactatgtcctacgcgttactggccaaacgacaacgccgtggagtgcagcaatgacaggaactacctctgtaggaaccggttcaacaagtacttcgacatcacgtgggtggagcagacttggtgggcggacaactatgactgtgttgtcgtctagcacgagcacccctcgcgcgacgtcgactatgacgatgaagattcggctgcgcccgtaaccccatgccaatccaaggacgacgagcaccaacggcaccaggcgagcggggactaggggacgactgtaggcctccccctctttctcgcctccactcacccgccaccaccccaacgacgagggagtgagagatcggcagcatctcagggcctggcagggcagctgcattgcgctgtggtggccatggctgatccatacgatgaggatatgggatcatcgctaaagagccaacagtcacaccctggcctccgccacaagcccgccattgagatatttagttatcatgtctccatgcttattttgattatacactaccttggttaattttcaatcatctccatgggtacattttttcttagttgcttaaactagcactatttcgcacaaattgtactagtacaagatttgatgtaaaattctaggcaaaaatgtatactgcaagggtggcattagtggtgaactggtgataacatgcaggcaaaggtcaccaaggagatgcaaggttcaaaatcctccctccctcatgtgtgcagttttccatgtgtcaagtagagtcagtacacaaaacatttgtgtcggcttgcagctgcttagcagtagttgggaattagccgatcgagtttgatcttgggagctatgtgatct

SEQ ID NO: 41809 - DNA, 889 bp, Zea Mays
aacggtcgggattctccagatcctagtataaagtaaccatcacgtcgtccgcgcaaaaccctcccggctcagacttctgctgcagcgcctccgccgccgccgccgcatctaacgcagttccctccgccgcagcccgaggcaagatgaacgacattgatctgctcaacccgccggcagaactcgagaagctcaagcacaagaaaaagagactcgtccagtcgcccaactccttcttcatggatgttaagtgccaggggtgcttcagcataaccactgttttcagccactcccagactgttgttgtgtgccctggctgccaaactgtcctctgccaacccacaggaggaaaggcaaggctcactgagggctgctctttccgcaggaagggagactagagcggatgtggtcttcaagttttgctctatgccagatactagcgtcatgaactgcctttagctaagattttccataagttgttctcgagcagctatgtgttgcatgttggctacttccaaacttatatctggtttggtttggattgtgatgaactaatggctctttgaatttatattatgatgttgacgatatttggtgacatctggtttcttggtagtcattgtcctttatcctttggtttgagggttaatccagagaacacttcgtacatttctgttggctgagatattagctgtttacgttcttagggggtgtttggttgcttctgctaaagtttagcccgggtcacatcaagcgtttgacttttaaatagagtatgaaatatagacccaaccaactagactagattcgtctcgtcttttaatctttggctgataaattagttttataatccgactacatttaatacccggaacggaggttcaaacattcg

SEQ ID NO: 41810 - DNA, 890 bp, Zea Mays
aacggtcgggattctccagatcctagtataaagtaaccatcacgtcgtccgcgcaaaaccctcccggctcagacttctgctgcagcgcctccgccgccgccgccgcatctaacgcagttccctccgccgcagcccgaggttctccagaacgacattgatctgctcaacccgccggcagaactcgagaagctcaagcacaagaaaaagagactcgtccagtcgcccaactccttcttcatggatgttaagtgccaggggtgcttcagcataaccactgttttcagccactcccagactgttgttgtgtgccctggctgccaaactgtcctctgccaacccacaggaggaaaggcaaggctcactgagggctgctctttccgcaggaagggagactagagcggatgtggtcttcaagttttgctctatgccagatactagcgtcatgaactgcctttagctaagattttccataagttgttctcgagcagctatgtgttgcatgttggctacttccaaacttatatctggtttggtttggattgtgatgaactaatggctctttgaatttatattatgatgttgacgatatttggtgacatctggtttcttggtagtcattgtcctttatcctttggtttgagggttaatccagagaacacttcgtacatttctgttggctgagatattagctgtttacgttcttagggggtgtttggttgcttctgctaaagtttagcccgggtcacatcaagcgtttgacttttaaatagagtatgaaatatagacccaaccaactagactagattcgtctcgtcttttaatctttggctgataaattagttttataatccgactacatttaatacccggaacggaggttcaaacattcg

SEQ ID NO: 41811 - DNA, 4791 bp, Zea Mays
ctaccccacacccactttccgctacagttcactcgtacctttttccgctctccccctctccctgcgctggatccacaaaagcggcggcggccccctcgcctgcctccgtccgtccgtccagccgagatccgcgcgcggaggcggaccccgggtcgccgctcagtcgtactgctcctcagattcgataacggttgcgacgtggatgagttgaactccaaacgactctgaggggtggacagagctcaaaaatggttttatgaagcttcaacatgaaacctctgatgccgaggtgctggtctcggcagcatcaaggaacctgtcgtcctcttcatcagcatttgtttcagcaaaccagtcccctttcttcacgccacggtcactgtctgcccgtgtcccagagcacactgaccctgagaacaattgctcctccaatggtattgtgctgaaaatcagtgatatactctctggtgattccttcacaccacaggaggagttaccatcagctagcgttggggtcttgccgtcagatgtgtctcctcctattagcctgtgcacttcaagcaactttggcactccagcaattgtctacaacaatcccagctttgtttctactttcaatggcccatgccaaggcagttcatcagcaaccagcaatggtggtcgttcggctccaaaggaaaagcacaagaggctagggggaatatatcggaaatcatcatcgtgccaaccgacaacgtcgtctgcctctgtcagcaggcttcgcagttacgatgtgtacgttggatttcacggccgcaaggcttcactgctgaggttcacaaactggctccgtgcagaactagagatccatggaatcagctgctttgtttctgacaggtctagatgccgaaattctcgcagccatgatgctgtcgagaggataatgaatgcttccacatatggagttgttatcctcacaaagaagtcattcggcaacccttataccattgaggagctcaggaacttctttggcaagagaaatcttatccctatattttttgatttggatgcagctgattgccttgccagagatatcgtcgagaagcgaggagatttgtgggagaaacatggtggtgagctgtggatgttatatggtgggatggaacacgagtggatggaatcggttgatgctctttcccgggtggtagatgtgcaactagaagcgaatgatggcaactggagagattgcatactccaagcaatcattctcttggccacaaaattaggcagaaggagcgtggttgatagggtgtaccggggaaaagggaggttggagaaggaggaattccctttcgctcgtaacaatgattttgtcggtaggaaaaaagagctttccgaattggaactcattttgtttggtgatgtcatgggagatggagaaagagaatattttgagctcacgacaaagcagaggagaaaaggccttgcagttaggcggtctgctaacaatcatgagcacatgaatactgatgacagcaaaggtaaggagcctgttatttggaaggagactgagaaagatattgagatgcagaggctgggtagtccattgtggcatgggcgtccactgagagtgaagaatggcgtaaggtgtggaaggaaaaaaagatctaggaagatactttatggtaagggtattgcttgcatatcaggggagcctggaattggcaagacagacttggttttggagtatgcatatagattctttcagagatacaagatggttctgtgggtcagaggggaaagccgatatattcgacagaactatttggctctgcggacttttctggaagttgacttaagtgtagatagtcacttgcatgaaaagggaagcgatcgatgctttgaagagcaagaagaggaagccattgccaaaattcgtcaagaattgatgcgtgacataccgttcttagtcataattgataatttggagagtgagaaggattggtgggataagagagtcataatggaccttctgccacactttggtggggagactcacttcatcataacaacacgtcttccacgagtgatgaacttggaaccaatgaagctttcttatttatctggtgctgaggcaatgactttaatgaagggaggtgtcaaggaccatccactggtggaaactgatgcactcaaaatcattgaggaaaagcttggaagattacctcttggcctaagtattgttggagctatactctcggagcttccaatcactccaactaggctacttgacacattgaatcgtacaccgctcatcaggaacttttcatggaatgatagagaagttctcagcttgaaaaatcatgaaatccttgtccgcctgctggatgtgtgcttatcaatatttgaccatgcagatggtcctaggagtctggcaactcggatgtttcaagtatgtggttggtttgcaccctctgcagttccaattcacatgttggctcgtgctgcacacaaagtcccaaagaagcaatggaggggtccaaggtggagaaagtggtggcgaccacttacttgtggccttgcaacttctaggatgaagaaatctgaagctgaagcagctgcaatgttaatgaggtttggaattgccagatgcagtgcaaagcccgaacatgtacagttccatgatctgatcaggctatatgctcgaaagctaggaggcacaagaacagctccggccatggtccagtcagtgtacctccaaggctcaatcaaacattcctctgagcacctgtgggcttcgtgcttcatggtttttggatttggttctgatcctctgttggtagaactgagaccatctgaactaatgttctatgttaaacagattgtcatgccacttgcaatacaaacatttataacatactcccgctgtaatgcagcactagagctgcttcgcctgtgcactgatgcattagagagagcagctgagtccatgcttgctcatgctggcaaatggagagaaacatcattctcctgctttaggcaagctcattcagaagcccagtacacttatctttggcaggagctggctcttctgaaagcttctgtactggaaacaagggccaagctgatgctccggggtggacaatatgacattggagatgacttaataaggaaggccatatttatccgtacttctatctgtggcgagcaccatcctgacactgtttctgctcgagaaactctcagtaaactcacaaggcttcttacaactgttcagcttagttgattcttatagtttaggagttcacaatatattcttttcagtgtgccttttcatgaacgccgtacaaaatgcaccagatcttgaaataacaaagtaaatttgtcttatatatcttgactgccttttgttgcttgatggttctgtctttctatcattcttggttcatcaatgtgcaacattggattgaactactgtattccagttttctgggctatacttttgatggcacacagaaaataatactgagctaatgtgtatgtaagtttgcatacctcaatgataaggtatcatagattgtgtccagttgaactcatacatggaatgttttgatttattgtgttgttagttgaagagttcggcattgcttttagttctgtagttgcatcaagtgcagctaatgttaactttagaagaacttggtgccatggatttgcactaggctattatcaacttccacattcctttgcgatgaacttgctgcatgttggactactctcagcatctgtcatgattgcaaccttcagctcagggacatatgtttttgttactaatttgctaaatcttggttgatggttggactattctctctctcgctctctctctctgactgatcttcatgtttgagagtaacctgcttatggagacttgagacagttttgtcaattggccagtctcttttgaaacgcagaggtgatatgagatcatttttgtatgttcaaatactgtcaacgggccatgattattggatacctttctttttgtgcaagttaaaggacacatttgtatctccatgcattactgtaatatctatggcagaattagcattaaatatgaaccaggtaatgtaaatatgatattgatcgattattattacagttctattttattttaatcaatcatatattacattgtttgtcataggatgcactggcactaatgtctactagtcgccccttgtgtactctttgtactccatatagttctgtagtcatttcagttctgcaacttcctctacattaattgcattgactttgtcatcaaccttgttctgtgactaatttgttgaatcaaccatatcttagcccacatttgtatattccaactcctaactgtctccagtacgccagtgggcagtggttccgcttgaatattgatcggtttgaatgtggaaattatgtatatttggtttaattttgtgtagctgggagtcgcgactcttgttatatttgacatttatttttgtaattttaaccatacagggaaactgaaagcgttaacattggacttgaatttgctctacagaattttatagaaattattgaattttgggtccggatgcagcatcaggtttgttgcagcctcgtagtctaagtcagaatgtaccttccttttccttttccttttcctttttaccatgcaagatgaatgaaacaagtttttaagacctaattatctccatattagcttatctggcatatctgagttgcatgtgtatggttaatttagtaacctatattatatcaataaat

SEQ ID NO: 41812 - DNA, 4901 bp, Zea Mays
cccacacccactttccgctacagttcactcgtacctttttccgctctccccctctccctgcgctggatccacaaaagcggcggcggccccctcgcctgcctccgtccgtccgtccagccgagatccgcgcgcggaggcggaccccgggtcgccgctcagtcgtactgctcctcagattcggtgtttccttctcttcttcggtgacgtcgacggcgcagcttctgccatcgccggccttccactcgtcaccgagccccccccccccccccccccccgccgccgctccggctccagataacggttgcgacgtggatgagttgaactccaaacgactctgaggggtggacagagctcaaaaatggttttatgaagcttcaacatgaaacctctgatgccgaggtgctggtctcggcagcatcaaggaacctgtcgtcctcttcatcagcatttgtttcagcaaaccagtcccctttcttcacgccacggtcactgtctgcccgtgtcccagagcacactgaccctgagaacaattgctcctccaatggtattgtgctgaaaatcagtgatatactctctggtgattccttcacaccacaggaggagttaccatcagctagcgttggggtcttgccgtcagatgtgtctcctcctattagcctgtgcacttcaagcaactttggcactccagcaattgtctacaacaatcccagctttgtttctactttcaatggcccatgccaaggcagttcatcagcaaccagcaatggtggtcgttcggctccaaaggaaaagcacaagaggctagggggaatatatcggaaatcatcatcgtgccaaccgacaacgtcgtctgcctctgtcagcaggcttcgcagttacgatgtgtacgttggatttcacggccgcaaggcttcactgctgaggttcacaaactggctccgtgcagaactagagatccatggaatcagctgctttgtttctgacaggtctagatgccgaaattctcgcagccatgatgctgtcgagaggataatgaatgcttccacatatggagttgttatcctcacaaagaagtcattcggcaacccttataccattgaggagctcaggaacttctttggcaagagaaatcttatccctatattttttgatttggatgcagctgattgccttgccagagatatcgtcgagaagcgaggagatttgtgggagaaacatggtggtgagctgtggatgttatatggtgggatggaacacgagtggatggaatcggttgatgctctttcccgggtggtagatgtgcaactagaagcgaatgatggcaactggagagattgcatactccaagcaatcattctcttggccacaaaattaggcagaaggagcgtggttgatagggtgtaccggggaaaagggaggttggagaaggaggaattccctttcgctcgtaacaatgattttgtcggtaggaaaaaagagctttccgaattggaactcattttgtttggtgatgtcatgggagatggagaaagagaatattttgagctcacgacaaagcagaggagaaaaggccttgcagttaggcggtctgctaacaatcatgagcacatgaatactgatgacagcaaaggtaaggagcctgttatttggaaggagactgagaaagatattgagatgcagaggctgggtagtccattgtggcatgggcgtccactgagagtgaagaatggcgtaaggtgtggaaggaaaaaaagatctaggaagatactttatggtaagggtattgcttgcatatcaggggagcctggaattggcaagacagacttggttttggagtatgcatatagattctttcagagatacaagatggttctgtgggtcagaggggaaagccgatatattcgacagaactatttggctctgcggacttttctggaagttgacttaagtgtagatagtcacttgcatgaaaagggaagcgatcgatgctttgaagagcaagaagaggaagccattgccaaaattcgtcaagaattgatgcgtgacataccgttcttagtcataattgataatttggagagtgagaaggattggtgggataagagagtcataatggaccttctgccacactttggtggggagactcacttcatcataacaacacgtcttccacgagtgatgaacttggaaccaatgaagctttcttatttatctggtgctgaggcaatgactttaatgaagggaggtgtcaaggaccatccactggtggaaactgatgcactcaaaatcattgaggaaaagcttggaagattacctcttggcctaagtattgttggagctatactctcggagcttccaatcactccaactaggctacttgacacattgaatcgtacaccgctcatcaggaacttttcatggaatgatagagaagttctcagcttgaaaaatcatgaaatccttgtccgcctgctggatgtgtgcttatcaatatttgaccatgcagatggtcctaggagtctggcaactcggatgtttcaagtatgtggttggtttgcaccctctgcagttccaattcacatgttggctcgtgctgcacacaaagtcccaaagaagcaatggaggggtccaaggtggagaaagtggtggcgaccacttacttgtggccttgcaacttctaggatgaagaaatctgaagctgaagcagctgcaatgttaatgaggtttggaattgccagatgcagtgcaaagcccgaacatgtacagttccatgatctgatcaggctatatgctcgaaagctaggaggcacaagaacagctccggccatggtccagtcagtgtacctccaaggctcaatcaaacattcctctgagcacctgtgggcttcgtgcttcatggtttttggatttggttctgatcctctgttggtagaactgagaccatctgaactaatgttctatgttaaacagattgtcatgccacttgcaatacaaacatttataacatactcccgctgtaatgcagcactagagctgcttcgcctgtgcactgatgcattagagagagcagctgagtccatgcttgctcatgctggcaaatggagagaaacatcattctcctgctttaggcaagctcattcagaagcccagtacacttatctttggcaggagctggctcttctgaaagcttctgtactggaaacaagggccaagctgatgctccggggtggacaatatgacattggagatgacttaataaggaaggccatatttatccgtacttctatctgtggcgagcaccatcctgacactgtttctgctcgagaaactctcagtaaactcacaaggcttcttacaactgttcagcttagttgattcttatagtttaggagttcacaatatattcttttcagtgtgccttttcatgaacgccgtacaaaatgcaccagatcttgaaataacaaagtaaatttgtcttatatatcttgactgccttttgttgcttgatggttctgtctttctatcattcttggttcatcaatgtgcaacattggattgaactactgtattccagttttctgggctatacttttgatggcacacagaaaataatactgagctaatgtgtatgtaagtttgcatacctcaatgataaggtatcatagattgtgtccagttgaactcatacatggaatgttttgatttattgtgttgttagttgaagagttcggcattgcttttagttctgtagttgcatcaagtgcagctaatgttaactttagaagaacttggtgccatggatttgcactaggctattatcaacttccacattcctttgcgatgaacttgctgcatgttggactactctcagcatctgtcatgattgcaaccttcagctcagggacatatgtttttgttactaatttgctaaatcttggttgatggttggactattctctctctcgctctctctctctgactgatcttcatgtttgagagtaacctgcttatggagacttgagacagttttgtcaattggccagtctcttttgaaacgcagaggtgatatgagatcatttttgtatgttcaaatactgtcaacgggccatgattattggatacctttctttttgtgcaagttaaaggacacatttgtatctccatgcattactgtaatatctatggcagaattagcattaaatatgaaccaggtaatgtaaatatgatattgatcgattattattacagttctattttattttaatcaatcatatattacattgtttgtcataggatgcactggcactaatgtctactagtcgccccttgtgtactctttgtactccatatagttctgtagtcatttcagttctgcaacttcctctacattaattgcattgactttgtcatcaaccttgttctgtgactaatttgttgaatcaaccatatcttagcccacatttgtatattccaactcctaactgtctccagtacgccagtgggcagtggttccgcttgaatattgatcggtttgaatgtggaaattatgtatatttggtttaattttgtgtagctgggagtcgcgactcttgttatatttgacatttatttttgtaattttaaccatacagggaaactgaaagcgttaacattggacttgaatttgctctacagaattttatagaaattattgaattttgggtccggatgcagcatcaggtttgttgcagcctcgtagtctaagtcagaatgtaccttccttttccttttccttttcctttttaccatgcaagatgaatgaaacaagtttttaagacctaattatctccatattagcttatctggcatatctgagttgcatgtgtatggttaatttagtaacctatattatatcaataaat

SEQ ID NO: 41813 - DNA, 4848 bp, Zea Mays
ctgcgctggatccacaaaagcggcggcggccccctcgcctgcctccgtccgtccgtccagccgagatccgcgcgcggaggcggaccccgggtcgccgctcagtcgtactgctcctcagattcggttggtgtttccttctcttcttcggtgacgtcgacggcgcagcttctgccatcgccggccttccactcgtcaccgagccccccccccccccccccccccgccgccgctccggctccagataacggttgcgacgtggatgagttgaactccaaacgactctgaggggtggacagagctcaaaaatggttttatgaagcttcaacatgaaacctctgatgccgaggtgctggtctcggcagcatcaaggaacctgtcgtcctcttcatcagcatttgtttcagcaaaccagtcccctttcttcacgccacggtcactgtctgcccgtgtcccagagcacactgaccctgagaacaattgctcctccaatggtattgtgctgaaaatcagtgatatactctctggtgattccttcacaccacaggaggagttaccatcagctagcgttggggtcttgccgtcagatgtgtctcctcctattagcctgtgcacttcaagcaactttggcactccagcaattgtctacaacaatcccagctttgtttctactttcaatggcccatgccaaggcagttcatcagcaaccagcaatggtggtcgttcggctccaaaggaaaagcacaagaggctagggggaatatatcggaaatcatcatcgtgccaaccgacaacgtcgtctgcctctgtcagcaggcttcgcagttacgatgtgtacgttggatttcacggccgcaaggcttcactgctgaggttcacaaactggctccgtgcagaactagagatccatggaatcagctgctttgtttctgacaggtctagatgccgaaattctcgcagccatgatgctgtcgagaggataatgaatgcttccacatatggagttgttatcctcacaaagaagtcattcggcaacccttataccattgaggagctcaggaacttctttggcaagagaaatcttatccctatattttttgatttggatgcagctgattgccttgccagagatatcgtcgagaagcgaggagatttgtgggagaaacatggtggtgagctgtggatgttatatggtgggatggaacacgagtggatggaatcggttgatgctctttcccgggtggtagatgtgcaactagaagcgaatgatggcaactggagagattgcatactccaagcaatcattctcttggccacaaaattaggcagaaggagcgtggttgatagggtgtaccggggaaaagggaggttggagaaggaggaattccctttcgctcgtaacaatgattttgtcggtaggaaaaaagagctttccgaattggaactcattttgtttggtgatgtcatgggagatggagaaagagaatattttgagctcacgacaaagcagaggagaaaaggccttgcagttaggcggtctgctaacaatcatgagcacatgaatactgatgacagcaaaggtaaggagcctgttatttggaaggagactgagaaagatattgagatgcagaggctgggtagtccattgtggcatgggcgtccactgagagtgaagaatggcgtaaggtgtggaaggaaaaaaagatctaggaagatactttatggtaagggtattgcttgcatatcaggggagcctggaattggcaagacagacttggttttggagtatgcatatagattctttcagagatacaagatggttctgtgggtcagaggggaaagccgatatattcgacagaactatttggctctgcggacttttctggaagttgacttaagtgtagatagtcacttgcatgaaaagggaagcgatcgatgctttgaagagcaagaagaggaagccattgccaaaattcgtcaagaattgatgcgtgacataccgttcttagtcataattgataatttggagagtgagaaggattggtgggataagagagtcataatggaccttctgccacactttggtggggagactcacttcatcataacaacacgtcttccacgagtgatgaacttggaaccaatgaagctttcttatttatctggtgctgaggcaatgactttaatgaagggaggtgtcaaggaccatccactggtggaaactgatgcactcaaaatcattgaggaaaagcttggaagattacctcttggcctaagtattgttggagctatactctcggagcttccaatcactccaactaggctacttgacacattgaatcgtacaccgctcatcaggaacttttcatggaatgatagagaagttctcagcttgaaaaatcatgaaatccttgtccgcctgctggatgtgtgcttatcaatatttgaccatgcagatggtcctaggagtctggcaactcggatgtttcaagtatgtggttggtttgcaccctctgcagttccaattcacatgttggctcgtgctgcacacaaagtcccaaagaagcaatggaggggtccaaggtggagaaagtggtggcgaccacttacttgtggccttgcaacttctaggatgaagaaatctgaagctgaagcagctgcaatgttaatgaggtttggaattgccagatgcagtgcaaagcccgaacatgtacagttccatgatctgatcaggctatatgctcgaaagctaggaggcacaagaacagctccggccatggtccagtcagtgtacctccaaggctcaatcaaacattcctctgagcacctgtgggcttcgtgcttcatggtttttggatttggttctgatcctctgttggtagaactgagaccatctgaactaatgttctatgttaaacagattgtcatgccacttgcaatacaaacatttataacatactcccgctgtaatgcagcactagagctgcttcgcctgtgcactgatgcattagagagagcagctgagtccatgcttgctcatgctggcaaatggagagaaacatcattctcctgctttaggcaagctcattcagaagcccagtacacttatctttggcaggagctggctcttctgaaagcttctgtactggaaacaagggccaagctgatgctccggggtggacaatatgacattggagatgacttaataaggaaggccatatttatccgtacttctatctgtggcgagcaccatcctgacactgtttctgctcgagaaactctcagtaaactcacaaggcttcttacaactgttcagcttagttgattcttatagtttaggagttcacaatatattcttttcagtgtgccttttcatgaacgccgtacaaaatgcaccagatcttgaaataacaaagtaaatttgtcttatatatcttgactgccttttgttgcttgatggttctgtctttctatcattcttggttcatcaatgtgcaacattggattgaactactgtattccagttttctgggctatacttttgatggcacacagaaaataatactgagctaatgtgtatgtaagtttgcatacctcaatgataaggtatcatagattgtgtccagttgaactcatacatggaatgttttgatttattgtgttgttagttgaagagttcggcattgcttttagttctgtagttgcatcaagtgcagctaatgttaactttagaagaacttggtgccatggatttgcactaggctattatcaacttccacattcctttgcgatgaacttgctgcatgttggactactctcagcatctgtcatgattgcaaccttcagctcagggacatatgtttttgttactaatttgctaaatcttggttgatggttggactattctctctctcgctctctctctctgactgatcttcatgtttgagagtaacctgcttatggagacttgagacagttttgtcaattggccagtctcttttgaaacgcagaggtgatatgagatcatttttgtatgttcaaatactgtcaacgggccatgattattggatacctttctttttgtgcaagttaaaggacacatttgtatctccatgcattactgtaatatctatggcagaattagcattaaatatgaaccaggtaatgtaaatatgatattgatcgattattattacagttctattttattttaatcaatcatatattacattgtttgtcataggatgcactggcactaatgtctactagtcgccccttgtgtactctttgtactccatatagttctgtagtcatttcagttctgcaacttcctctacattaattgcattgactttgtcatcaaccttgttctgtgactaatttgttgaatcaaccatatcttagcccacatttgtatattccaactcctaactgtctccagtacgccagtgggcagtggttccgcttgaatattgatcggtttgaatgtggaaattatgtatatttggtttaattttgtgtagctgggagtcgcgactcttgttatatttgacatttatttttgtaattttaaccatacagggaaactgaaagcgttaacattggacttgaatttgctctacagaattttatagaaattattgaattttgggtccggatgcagcatcaggtttgttgcagcctcgtagtctaagtcagaatgtaccttccttttccttttccttttcctttttaccatgcaagatgaatgaaacaagtttttaagacctaattatctccatattagcttatctggcatatctgagttgcatgtgtatggttaatttagtaacctatattatatcaataaat

SEQ ID NO: 41814 - DNA, 4988 bp, Zea Mays
ctatttcttcgactgttttttgtttatttttcccaagtattcgatgggccattcctgctgattcattcttgtttgtttgtctgccttttctggatcgccgatttaataccccgctagcctgttgaatctcacttactcctgtttgggtcagtagtcatgacgtactagtgccttgtcttttggcctgtcctttttgctgctcgtacttctttgtctgtttctccaccgcaaagatcactgaaatgcttgacgtctctgttgtattgtaccgtctccatatcctgttcatcagcagcattcttctcagagaaggctaccttcaatgtgcagtgcactattactttcaggttactgagggaatcatctgttcaacttctgcagataacggttgcgacgtggatgagttgaactccaaacgactctgaggggtggacagagctcaaaaatggttttatgaagcttcaacatgaaacctctgatgccgaggtgctggtctcggcagcatcaaggaacctgtcgtcctcttcatcagcatttgtttcagcaaaccagtcccctttcttcacgccacggtcactgtctgcccgtgtcccagagcacactgaccctgagaacaattgctcctccaatggtattgtgctgaaaatcagtgatatactctctggtgattccttcacaccacaggaggagttaccatcagctagcgttggggtcttgccgtcagatgtgtctcctcctattagcctgtgcacttcaagcaactttggcactccagcaattgtctacaacaatcccagctttgtttctactttcaatggcccatgccaaggcagttcatcagcaaccagcaatggtggtcgttcggctccaaaggaaaagcacaagaggctagggggaatatatcggaaatcatcatcgtgccaaccgacaacgtcgtctgcctctgtcagcaggcttcgcagttacgatgtgtacgttggatttcacggccgcaaggcttcactgctgaggttcacaaactggctccgtgcagaactagagatccatggaatcagctgctttgtttctgacaggtctagatgccgaaattctcgcagccatgatgctgtcgagaggataatgaatgcttccacatatggagttgttatcctcacaaagaagtcattcggcaacccttataccattgaggagctcaggaacttctttggcaagagaaatcttatccctatattttttgatttggatgcagctgattgccttgccagagatatcgtcgagaagcgaggagatttgtgggagaaacatggtggtgagctgtggatgttatatggtgggatggaacacgagtggatggaatcggttgatgctctttcccgggtggtagatgtgcaactagaagcgaatgatggcaactggagagattgcatactccaagcaatcattctcttggccacaaaattaggcagaaggagcgtggttgatagggtgtaccggggaaaagggaggttggagaaggaggaattccctttcgctcgtaacaatgattttgtcggtaggaaaaaagagctttccgaattggaactcattttgtttggtgatgtcatgggagatggagaaagagaatattttgagctcacgacaaagcagaggagaaaaggccttgcagttaggcggtctgctaacaatcatgagcacatgaatactgatgacagcaaaggtaaggagcctgttatttggaaggagactgagaaagatattgagatgcagaggctgggtagtccattgtggcatgggcgtccactgagagtgaagaatggcgtaaggtgtggaaggaaaaaaagatctaggaagatactttatggtaagggtattgcttgcatatcaggggagcctggaattggcaagacagacttggttttggagtatgcatatagattctttcagagatacaagatggttctgtgggtcagaggggaaagccgatatattcgacagaactatttggctctgcggacttttctggaagttgacttaagtgtagatagtcacttgcatgaaaagggaagcgatcgatgctttgaagagcaagaagaggaagccattgccaaaattcgtcaagaattgatgcgtgacataccgttcttagtcataattgataatttggagagtgagaaggattggtgggataagagagtcataatggaccttctgccacactttggtggggagactcacttcatcataacaacacgtcttccacgagtgatgaacttggaaccaatgaagctttcttatttatctggtgctgaggcaatgactttaatgaagggaggtgtcaaggaccatccactggtggaaactgatgcactcaaaatcattgaggaaaagcttggaagattacctcttggcctaagtattgttggagctatactctcggagcttccaatcactccaactaggctacttgacacattgaatcgtacaccgctcatcaggaacttttcatggaatgatagagaagttctcagcttgaaaaatcatgaaatccttgtccgcctgctggatgtgtgcttatcaatatttgaccatgcagatggtcctaggagtctggcaactcggatgtttcaagtatgtggttggtttgcaccctctgcagttccaattcacatgttggctcgtgctgcacacaaagtcccaaagaagcaatggaggggtccaaggtggagaaagtggtggcgaccacttacttgtggccttgcaacttctaggatgaagaaatctgaagctgaagcagctgcaatgttaatgaggtttggaattgccagatgcagtgcaaagcccgaacatgtacagttccatgatctgatcaggctatatgctcgaaagctaggaggcacaagaacagctccggccatggtccagtcagtgtacctccaaggctcaatcaaacattcctctgagcacctgtgggcttcgtgcttcatggtttttggatttggttctgatcctctgttggtagaactgagaccatctgaactaatgttctatgttaaacagattgtcatgccacttgcaatacaaacatttataacatactcccgctgtaatgcagcactagagctgcttcgcctgtgcactgatgcattagagagagcagctgagtccatgcttgctcatgctggcaaatggagagaaacatcattctcctgctttaggcaagctcattcagaagcccagtacacttatctttggcaggagctggctcttctgaaagcttctgtactggaaacaagggccaagctgatgctccggggtggacaatatgacattggagatgacttaataaggaaggccatatttatccgtacttctatctgtggcgagcaccatcctgacactgtttctgctcgagaaactctcagtaaactcacaaggcttcttacaactgttcagcttagttgattcttatagtttaggagttcacaatatattcttttcagtgtgccttttcatgaacgccgtacaaaatgcaccagatcttgaaataacaaagtaaatttgtcttatatatcttgactgccttttgttgcttgatggttctgtctttctatcattcttggttcatcaatgtgcaacattggattgaactactgtattccagttttctgggctatacttttgatggcacacagaaaataatactgagctaatgtgtatgtaagtttgcatacctcaatgataaggtatcatagattgtgtccagttgaactcatacatggaatgttttgatttattgtgttgttagttgaagagttcggcattgcttttagttctgtagttgcatcaagtgcagctaatgttaactttagaagaacttggtgccatggatttgcactaggctattatcaacttccacattcctttgcgatgaacttgctgcatgttggactactctcagcatctgtcatgattgcaaccttcagctcagggacatatgtttttgttactaatttgctaaatcttggttgatggttggactattctctctctcgctctctctctctgactgatcttcatgtttgagagtaacctgcttatggagacttgagacagttttgtcaattggccagtctcttttgaaacgcagaggtgatatgagatcatttttgtatgttcaaatactgtcaacgggccatgattattggatacctttctttttgtgcaagttaaaggacacatttgtatctccatgcattactgtaatatctatggcagaattagcattaaatatgaaccaggtaatgtaaatatgatattgatcgattattattacagttctattttattttaatcaatcatatattacattgtttgtcataggatgcactggcactaatgtctactagtcgccccttgtgtactctttgtactccatatagttctgtagtcatttcagttctgcaacttcctctacattaattgcattgactttgtcatcaaccttgttctgtgactaatttgttgaatcaaccatatcttagcccacatttgtatattccaactcctaactgtctccagtacgccagtgggcagtggttccgcttgaatattgatcggtttgaatgtggaaattatgtatatttggtttaattttgtgtagctgggagtcgcgactcttgttatatttgacatttatttttgtaattttaaccatacagggaaactgaaagcgttaacattggacttgaatttgctctacagaattttatagaaattattgaattttgggtccggatgcagcatcaggtttgttgcagcctcgtagtctaagtcagaatgtaccttccttttccttttccttttcctttttaccatgcaagatgaatgaaacaagtttttaagacctaattatctccatattagcttatctggcatatctgagttgcatgtgtatggttaatttagtaacctatattatatcaataaat

SEQ ID NO: 41815 - DNA, 1086 bp, Zea Mays
caacaatcgaactttgagtgtttccagatgtcacgctccgtaggtcacaagccaagatttgaaaatgaagaggaagagcagtgctaccactgatttgagagcttttttagcaagagctgctgcaaaaaagaaggttattattgctccatcttccaatgaaagagagatgcaattggtgatatttcaaggacagactgaagctagtaatgcaacacccgcagaacaagagagagttgagaaggaagatgggacaaaaaaatttaaatggatgcttggttacttttattgaaaggcaattcttcttgcaagtcaaggatgaggacattgccactcaatttcaaagcttaaaggatcagaaggttgtcttgtaatatgaggagatacagaaacttcttgattcttgggacaatttggacaagttgtaccatgacgccagcaattctctcaccaccttagagaggagccaccgctttaccatgtcagagctggagcgccagagagatgagttaaaaatctcccagtacgagatatcaagacttagcaggtcattgtctttgaaagatcccatcatcagagagcttcgcatcttgaagaaacttgtgtcgcaggagctagaggttgctcgtcgcgatgtagaggcttcccatcatgatatcaaggtcttggaggacgatcgtgctatcatgaaggcatggtgtgacaaagcaatggataaggctatccgggctggccggattttgatgaagaggcctggcgttgtggtgcctgatgacattgtagttgatgtactcgttgcatcgggtactttgagtaatccttctgcttctggtgaccctgtggacaaggttcctcgcgaggatgctcatgcacagtaactagagagtgagagtgtacattgatttgttcaaacagataataacttttcattgagatggtatttttcgcggttttttgaactcttgtcgaatgttgagttactctcctttgttgagtgtgggtagggcatagtatgcgccctgggctttttgctgcttaattgatcgtgtcgcaccgacttaaggcatttccgaattaagtcgattgctg

SEQ ID NO: 41816 - DNA, 1120 bp, Zea Mays
catgcctttcgcgtggcgcgggaggccgtagaggttgaagccgagctgctacggcctatgggtgcagcttgccgaggccgatggtcgcggatttgaaaatgaagaggaagagcagtgctaccactgatttgagagcttttttagcaagagctgctgcaaaaaagaaggttattattgctccatcttccaatgaaagagagatgcaattggtgatatttcaaggacagactgaagctagtaatgcaacacccgcagaacaagagagagttgagaaggaagatgggacaaaaaaatttaaatggatgcttggttacttttattgaaaggcaattcttcttgcaagtcaaggatgaggacattgccactcaatttcaaagcttaaaggatcagaaggttgtcttgtaatatgaggagatacagaaacttcttgattcttgggacaatttggacaagttgtaccatgacgccagcaattctctcaccaccttagagaggagccaccgctttaccatgtcagagctggagcgccagagagatgagttaaaaatctcccagtacgagatatcaagacttagcaggtcattgtctttgaaagatcccatcatcagagagcttcgcatcttgaagaaacttgtgtcgcaggagctagaggttgctcgtcgcgatgtagaggcttcccatcatgatatcaaggtcttggaggacgatcgtgctatcatgaaggcatggtgtgacaaagcaatggataaggctatccgggctggccggattttgatgaagaggcctggcgttgtggtgcctgatgacattgtagttgatgtactcgttgcatcgggtactttgagtaatccttctgcttctggtgaccctgtggacaaggttcctcgcgaggatgctcatgcacagtaactagagagtgagagtgtacattgatttgttcaaacagataataacttttcattgagatggtatttttcgcggttttttgaactcttgtcgaatgttgagttactctcctttgttgagtgtgggtagggcatagtatgcgccctgggctttttgctgcttaattgatcgtgtcgcaccgacttaaggcatttccgaattaagtcgattgctg

SEQ ID NO: 41817 - DNA, 1100 bp, Zea Mays
ctttcgcgtggcgcgggaggccgtagaggttgaagccgagctgctacggcctatgggtgcagcttgccgaggccgatggtcgcggatttgaaaatgaagaggaagagcagtgctaccactgatttgagagcttttttagcaagagctgctgcaaaaaagaaggttattattgctccatcttccaatgaaagagagatgcaattggtgatatttcaaggacagactgaagctagtaatgcaacacccgcagaacaagagagagttgagaaggaagatgggacaaaaaaatttaaatggatgcttggttacttttattgaaaggcaattcttcttgcaagtcaaggatgaggacattgccactcaatttcaaagcttaaaggatcagaaggaggagatacagaaacttcttgattcttgggacaatttggacaagttgtaccatgacgccagcaattctctcaccaccttagagaggagccaccgctttaccatgtcagagctggagcgccagagagatgagttaaaaatctcccagtacgagatatcaagacttagcaggtcattgtctttgaaagatcccatcatcagagagcttcgcatcttgaagaaacttgtgtcgcaggagctagaggttgctcgtcgcgatgtagaggcttcccatcatgatatcaaggtcttggaggacgatcgtgctatcatgaaggcatggtgtgacaaagcaatggataaggctatccgggctggccggattttgatgaagaggcctggcgttgtggtgcctgatgacattgtagttgatgtactcgttgcatcgggtactttgagtaatccttctgcttctggtgaccctgtggacaaggttcctcgcgaggatgctcatgcacagtaactagagagtgagagtgtacattgatttgttcaaacagataataacttttcattgagatggtatttttcgcggttttttgaactcttgtcgaatgttgagttactctcctttgttgagtgtgggtagggcatagtatgcgccctgggctttttgctgcttaattgatcgtgtcgcaccgacttaaggcatttccgaattaagtcgattgctg

SEQ ID NO: 41818 - DNA, 420 bp, Zea Mays
gttgaagccgagctgctacggcctatgggtgcagcttgccgaggccgatggtcgcggcggagctcgagatgttgctctaccgcttaggccagcttgtggattacgctggggctcatggtgcatctttaatcgagcactggataacgtcccggaccacgtttgggacattgcagactttggcgttcattgtggggtcgcggtggcgctacttatggtgtaggtctgcttgggctacaacctttaggatatcgttggtccccttcatccctctcagatgaatggttggaggacctgctggaaggctacaacaacgtagctttccgcatcgttcttagggtgtcggctcactgtggtgtgctatgcctcggcactattcatttggctataataataatgtatgaaaaagattctttctttttg

SEQ ID NO: 41819 - DNA, 2432 bp, Zea Mays
ctcgttctcctctcgtcctctgggctagattagccggttaatcaatcaatcgattcgttgttgctaagagcctttttaagtatgggattacgcaggtttcttgtttcctaaccaccacttctgtactagtactatactataccaatccatggatagagacagacagaggggttgggttttggttgcgctgcttgactcgccccgtgcccgtgttcttgctgcccttttcaggcatatataacattcctctttttacactacatccatccccgcttgattagcggcagccactctctccctctccactcttggtgtccgagtcccttggccgtacgctctgcctcactcctccgtttcttgcttctcctgccgccggcgtcggagagcgagcttctcggcgggcggcggcggcgcgcggcgccgggtgcggatcggccgcgggtgcatggtggaagccgccgccgggcgccggtcaggcaccagccgtcggcggcctagcggcagcggaggggagcaccagcgcctggttgcgctcgccgtcgccgcgcgcgtcgccatggtcagcacccggtctgcgggtccagcagtggcgggaggagatggagcgggagctgctggaacaggcgccggccccgctgccggtagaggacgatgcatggaggacttcttcgactgcctcctcggcttgctcggcgcgttaggcatgacatgggctacggcgcggccccagcggcagccgctcccgccgctgcctcgcggggttggggcggggcctgagccaaccgacgcccggcgtttcgcagcggcgctcagggccacccccggccggatcgctggcaatggcgcctgcgccgtcgcgtcactgtacacgctgcagggcaagaagggcgtcaaccaggatgctatgatcttctgggagaacttctgttctagagatgataccatcttttgtggtgtatttgatggtcatggaccttatggccatttggttgccaagagagtaagagatctcctgcctctaaagttaggagcagatttggggatggaagatggtagagtagcatccactggcaacattaagctcaatacaaatgatgtagcttcatctgaacacatagtcagaggaggtactgccgtttcctctgaagctcagcagaatggagattatccagaggtcttcccagcattgagaacttcattcttgaaggcattccatgtaatggatagggatctcaaattacataaaaatattgattgctttttcagtgggactacagcagtggcagtgatcaagcagggacacaatcttataattggcaatttgggggattcaagagctgtcttaggcaccagagatgaaaataaccagcttgttgctgttcaattgacagttgatctcaaacctgacattccaagtgaatcacagagaatcaggcaacgcaggggcagaatatttgcacttcctgaggagccggaggttgctcgtgtttggcttccaaggtataactcgcctggattggccatggctagggcatttggagacttttgtctgaaggatcatggtgtaatttctgtgcctgatgtttcctatcaccacataacggaaaaggatgaatttgttgtgctggctaccgatggggtgagcagactgtcaacttacgcgccattttgtttgggacgtgctatcaaatgatgaagttgttaatactgtcagccgagtcacatctcgggcctctgcagcacgatttttagtcgaatcagctcaccgtgcttggcgaactcggttccccacttctaaagtcgatgattgtgctgctgtctgcctattcctgaacacaaatgaagcaagtgaatcttcgagttccttggccaacaatttggcagatgctgtacaagttagcactgctcagtgctccaaaactatccaggtgagcgcacctatagacggaaacgaggtgtctgttgttgaaacgaggtgatttgcacaatgatggttgaggcgcaaagtgagcttgcatgctgtgcctgtgactgagatctgctgaacgatagtagttgaggcagagagagcgggggcatgaacatgctgtgctgtgcctgtgattggcatttgtggagccaagatatagcacgtcggtgggtttctgcttgctatttttttctggacgcaagtgtggttattatatgcgacattagatttttataggagaaacataaattgtagggtacttgaagttttggctttaaacatttatgttaacaagatatctgtatcattctttagcctcgttgctactcacagaaaaggttctagagcttgttgatcacataattttattctgatggtcataatttcattgcatgcaatgtggatttgtactcgtggcacgtgaaaattcaaaataaaataaagtacattcataatggaagta

SEQ ID NO: 41820 - DNA, 2116 bp, Zea Mays
ggttgcgctgcttgactcgccccgtgcccgtgttcttgctgcccttttcaggcatatataacattcctctttttacactacatccatccccgcttgattagcggcagccactctctccctctccactcttggtgtccgagtcccttggccgtacgctctgcctcactcctccgtttcttgcttctcctgccgccggcgtcggagagcgagcttctcggcgggcggcggcggcgcgcggcgccgggtgcggatcggccgcgggtgcatggtggaagccgccgccgggcgccggtcaggcaccagccgtcggcggcctagcggcagcggaggggagcaccagcgcctggttgcgctcgccgtcgccgcgcgcgtcgccatggtcagcacccggtctgcgggtccagcagtggcgggaggagatggagcgggagctgctggaacaggcgccggccccgctgccggtagaggacgatgcatggaggacttcttcgactgcctcctcggcttgctcggcgcgttaggcatgacatgggctacggcgcggccccagcggcagccgctcccgccgctgcctcgcggggttggggcggggcctgagccaaccgacgcccggcgtttcgcagcggcgctcagggccacccccggccggatcgctggcaatggcgcctgcgccgtcgcgtcactgtacacgctgcagggcaagaagggcgtcaaccaggatgctatgatcttctgggagttaggagcagatttggggatggaagatggtagagtagcatccactggcaacattaagctcaatacaaatgatgtagcttcatctgaacacatagtcagaggaggtactgccgtttcctctgaagctcagcagaatggagattatccagaggtcttcccagcattgagaacttcattcttgaaggcattccatgtaatggatagggatctcaaattacataaaaatattgattgctttttcagtgggactacagcagtggcagtgatcaagcagggacacaatcttataattggcaatttgggggattcaagagctgtcttaggcaccagagatgaaaataaccagcttgttgctgttcaattgacagttgatctcaaacctgacattccaagtgaatcacagagaatcaggcaacgcaggggcagaatatttgcacttcctgaggagccggaggttgctcgtgtttggcttccaaggtataactcgcctggattggccatggctagggcatttggagacttttgtctgaaggatcatggtgtaatttctgtgcctgatgtttcctatcaccacataacggaaaaggatgaatttgttgtgctggctaccgatggggtttgggacgtgctatcaaatgatgaagttgttaatactgtcagccgagtcacatctcgggcctctgcagcacgatttttagtcgaatcagctcaccgtgcttggcgaactcggttccccacttctaaagtcgatgattgtgctgctgtctgcctattcctgaacacaaatgaagcaagtgaatcttcgagttccttggccaacaatttggcagatgctgtacaagttagcactgctcagtgctccaaaactatccaggtgagcgcacctatagacggaaacgaggtgtctgttgttgaaacgaggtgatttgcacaatgatggttgaggcgcaaagtgagcttgcatgctgtgcctgtgactgagatctgctgaacgatagtagttgaggcagagagagcgggggcatgaacatgctgtgctgtgcctgtgattggcatttgtggagccaagatatagcacgtcggtgggtttctgcttgctatttttttctggacgcaagtgtggttattatatgcgacattagatttttataggagaaacataaattgtagggtacttgaagttttggctttaaacatttatgttaacaagatatctgtatcattctttagcctcgttgctactcacagaaaaggttctagagcttgttgatcacataattttattctgatggtcataatttcattgcatgcaatgtggatttgtactcgtggcacgtgaaaattcaaaataaaataaagtacattcataatggaagta

SEQ ID NO: 41821 - DNA, 2429 bp, Zea Mays
ggttgcgctgcttgactcgccccgtgcccgtgttcttgctgcccttttcaggcatatataacattcctctttttacactacatccatccccgcttgattagcggcagccactctctccctctccactcttggtgtccgagtcccttggccgtacgctctgcctcactcctccgtttcttgcttctcctgccgccggcgtcggagagcgagcttctcggcgggcggcggcggcgcgcggcgccgggtgcggatcggccgcgggtgcatggtggaagccgccgccgggcgccggtcaggcaccagccgtcggcggcctagcggcagcggaggggagcaccagcgcctggttgcgctcgccgtcgccgcgcgcgtcgccatggtcagcacccggtctgcgggtccagcagtggcgggaggagatggagcgggagctgctggaacaggcgccggccccgctgccggtagaggacgatgcatggaggacttcttcgactgcctcctcggcttgctcggcgcgttaggcatgacatgggctacggcgcggccccagcggcagccgctcccgccgctgcctcgcggggttggggcggggcctgagccaaccgacgcccggcgtttcgcagcggcgctcagggccacccccggccggatcgctggcaatggcgcctgcgccgtcgcgtcactgtacacgctgcagggcaagaagggcgtcaaccaggatgctatgatcttctgggagaacttctgttctagagatgataccatcttttgtggtgtatttgatggtcatggaccttatggccatttggttgccaagagagtaagagatctcctgcctctaaagttaggagcagatttggggatggaagatggtagagtagcatccactggcaacattaagctcaatacaaatgatgtagcttcatctgaacacatagtcagaggaggtactgccgtttcctctgaagctcagcagaatggagattatccagaggtcttcccagcattgagaacttcattcttgaaggcattccatgtaatggatagggatctcaaattacataaaaatattgattgctttttcagtgggactacagcagtggcagtgatcaagcagggacacaatcttataattggcaatttgggggattcaagagctgtcttaggcaccagagatgaaaataaccagcttgttgctgttcaattgacagttgatctcaaacctgacattccaaaaccacgccacgcggagaatcagatactaccatgtgatgtgaagaaggattgtctaaacaatctatgcgccatgaacctcttagaattttatctattgtatcaatgaaattgctacgaaaatctcatcgggttgatcaaatcaagccgattttgagacattccaagagcctctgttttcaccgtcaatcatattgacaatcgcgtcaggtgaatcacagagaatcaggcaacgcaggggcagaatatttgcacttcctgaggagccggaggttgctcgtgtttggcttccaaggtataactcgcctggattggccatggctagggcatttggagacttttgtctgaaggatcatggtgtaatttctgtgcctgatgtttcctatcaccacataacggaaaaggatgaatttgttgtgctggctaccgatggggtttgggacgtgctatcaaatgatgaagttgttaatactgtcagccgagtcacatctcgggcctctgcagcacgatttttagtcgaatcagctcaccgtgcttggcgaactcggttccccacttctaaagtcgatgattgtgctgctgtctgcctattcctgaacacaaatgaagcaagtgaatcttcgagttccttggccaacaatttggcagatgctgtacaagttagcactgctcagtgctccaaaactatccaggtgagcgcacctatagacggaaacgaggtgtctgttgttgaaacgaggtgatttgcacaatgatggttgaggcgcaaagtgagcttgcatgctgtgcctgtgactgagatctgctgaacgatagtagttgaggcagagagagcgggggcatgaacatgctgtgctgtgcctgtgattggcatttgtggagccaagatatagcacgtcggtgggtttctgcttgctatttttttctggacgcaagtgtggttattatatgcgacattagatttttataggagaaacataaattgtagggtacttgaagttttggctttaaacatttatgttaacaagatatctgtatcattctttagcctcgttgctactcacagaaaaggttctagagcttgttgatcacataattttattctgatggtcataatttcattgcatgcaatgtggatttgtactcgtggcacgtgaaaattcaaaataaaataaagtacattcataatggaagta

SEQ ID NO: 41822 - DNA, 1999 bp, Zea Mays
ctgttcttgatcagatctccccaagatctaagcaaccttgttcttactccggattagtttgcctgacatatcctgtgttccagattttttattcgacggagaagttcagattcagattttactcttctgtaatttgatcttaatgcaagcctcagggaattgtttgttttatctttggccacagcttatgcatgttcttatcgcaacatgagcacacaatatgaaactattcaagaattgaacttttactcaaatcctatatatatttgacactggttgccattggatgttgataattcctatttggtagtcttattcaaacctaataattggtgttgagttggaatacttcatggaggttggaggggctccacatgattctcatccttatccaatactagttttttttcccctttctccatctcctcgttggatgatcttatctgcttgaagccccatcctcccctttccaaatgcttgattaccaatttgactgcatgcccattgagtgacacataacttctgttctagagatgataccatcttttgtggtgtatttgatggtcatggaccttatggccatttggttgccaagagagtaagagatctcctgcctctaaagttaggagcagatttggggatggaagatggtagagtagcatccactggcaacattaagctcaatacaaatgatgtagcttcatctgaacacatagtcagaggaggtactgccgtttcctctgaagctcagcagaatggagattatccagaggtcttcccagcattgagaacttcattcttgaaggcattccatgtaatggatagggatctcaaattacataaaaatattgattgctttttcagtgggactacagcagtggcagtgatcaagcagggacacaatcttataattggcaatttgggggattcaagagctgtcttaggcaccagagatgaaaataaccagcttgttgctgttcaattgacagttgatctcaaacctgacattccaagtgaatcacagagaatcaggcaacgcaggggcagaatatttgcacttcctgaggagccggaggttgctcgtgtttggcttccaaggtataactcgcctggattggccatggctagggcatttggagacttttgtctgaaggatcatggtgtaatttctgtgcctgatgtttcctatcaccacataacggaaaaggatgaatttgttgtgctggctaccgatggggtttgggacgtgctatcaaatgatgaagttgttaatactgtcagccgagtcacatctcgggcctctgcagcacgatttttagtcgaatcagctcaccgtgcttggcgaactcggttccccacttctaaagtcgatgattgtgctgctgtctgcctattcctgaacacaaatgaagcaagtgaatcttcgagttccttggccaacaatttggcagatgctgtacaagttagcactgctcagtgctccaaaactatccaggtgagcgcacctatagacggaaacgaggtgtctgttgttgaaacgaggtgatttgcacaatgatggttgaggcgcaaagtgagcttgcatgctgtgcctgtgactgagatctgctgaacgatagtagttgaggcagagagagcgggggcatgaacatgctgtgctgtgcctgtgattggcatttgtggagccaagatatagcacgtcggtgggtttctgcttgctatttttttctggacgcaagtgtggttattatatgcgacattagatttttataggagaaacataaattgtagggtacttgaagttttggctttaaacatttatgttaacaagatatctgtatcattctttagcctcgttgctactcacagaaaaggttctagagcttgttgatcacataattttattctgatggtcataatttcattgcatgcaatgtggatttgtactcgtggcacgtgaaaattcaaaataaaataaagtacattcataatggaagta

SEQ ID NO: 41823 - DNA, 1063 bp, Zea Mays
cttatgtcctgataccattgtcgggaaatggatacgctacacactagcatatctatcacgttcaaccaagataacatgtgaatcacagagaatcaggcaacgcaggggcagaatatttgcacttcctgaggagccggaggttgctcgtgtttggcttccaaggtataactcgcctggattggccatggctagggcatttggagacttttgtctgaaggatcatggtgtaatttctgtgcctgatgtttcctatcaccacataacggaaaaggatgaatttgttgtgctggctaccgatggggtttgggacgtgctatcaaatgatgaagttgttaatactgtcagccgagtcacatctcgggcctctgcagcacgatttttagtcgaatcagctcaccgtgcttggcgaactcggttccccacttctaaagtcgatgattgtgctgctgtctgcctattcctgaacacaaatgaagcaagtgaatcttcgagttccttggccaacaatttggcagatgctgtacaagttagcactgctcagtgctccaaaactatccaggtgagcgcacctatagacggaaacgaggtgtctgttgttgaaacgaggtgatttgcacaatgatggttgaggcgcaaagtgagcttgcatgctgtgcctgtgactgagatctgctgaacgatagtagttgaggcagagagagcgggggcatgaacatgctgtgctgtgcctgtgattggcatttgtggagccaagatatagcacgtcggtgggtttctgcttgctatttttttctggacgcaagtgtggttattatatgcgacattagatttttataggagaaacataaattgtagggtacttgaagttttggctttaaacatttatgttaacaagatatctgtatcattctttagcctcgttgctactcacagaaaaggttctagagcttgttgatcacataattttattctgatggtcataatttcattgcatgcaatgtggatttgtactcgtggcacgtgaaaattcaaaataaaataaagtacattcataatggaagta

SEQ ID NO: 41824 - DNA, 13760 bp, Zea Mays
ccacctcgtgctggcccatcccgacatcccgtcccgtgctcccctcccctcctctcgaccacctcctcgtcgtcttcctcgccccctccgccacctccgccccggcctctccgctcccacccccgcggaaaccctaactccctcttggcacaggaggcctatgacggagattcgccgcgcgcaaggagggagtggattcgcgactgcgcagccgctgccgtcgtcctagggcgcgtcgagcactgccaccccattgacgggcccatccccacgacatccgccatgttcgagggccacgtgctgtatctgctacgcaaatatttgggtgaatatgttgaagggctttctgttgaagctctcagaataagtgtatggaaaggtgacgttgttctaaaagacttaaaacttaaggctgaagccctgaattctctcgggtttccagtgacagtgaaagctgggtttgttggcaccataacattaaaggtcccatggaagtgccttggtaaagaaccagttattgtcctcattgatcgtctatttgttcttgctcatcctgctcctgatggacagactctcaaggaagaagatagacaaaaactttttgaagccaagcttcagcagattgaggctgcggaggcagctactcttgaagcaacaaataggaactcaagaggagggcctgcaccaggtggaaattcatggttatacaatttaatatctacaattattggtaatcttaaagtcaccatcagtaatgtacacataagatatgaagattctgtcagcaattctgggcacccatttgcgtctggtttcacgttatcaaaacttgcagccgttacagtggatgaggatggtaatgaaacatttgatgcaggtgtagccctagataagctacgaaagtctgttgaactgcataggctgggcatctaccatgactcagacagtaatccttggaagcttaataaaaattgggaagctctaaatcgtaccgaatggagtgagatatttcaagatggcattgaagatggctctcaaagttccatctgggcagtaaatcggaactacttggtctcgcctataaatggaacccttaaatataaacgacttgggaagaatgaaagaggggatccagataccccattggagaaagcctcacttgtcctcagtgatgtttctttaactgtaactgaggcacagtattatgatggcattaaactgttggaagcattttcgaggtttagaacacgtgttgatgtgtctcatttacggcctgttgtgcctgtaaaggaggatcgtcgtgcttggtggcgttatgctgtgctggctggtctgcgacaaaggaaactatgctattggttttcatgggagagaactagacgcctctgccagcttcgacgccgttatgttcaattgtatgccacccttttgcaacaagcagcaaaagttgacatttctgaaattcgagagatagagaaaattctagacatgaaggtcataatactttggaggttgctgggtcatgctaaggttgaaacagtgaaatcaaaggggacactatatagaaaaggggcctcaaagaaaagatggtggccttttgcatggaacacgactggtttaccttctgaggaagctacacacccagaatcacagttagatgaagaggaacaactgactaaagaagagtggcaggctattaataagctgttgagttaccaaccagatgaagatatgtcttttccccttgagaaggtttccccaaatgtgattcaatttatgatggatgtatccattggccaggctggtgcaaggatcatcaatattgatggaactgaggttttatgtggtagatttcatcagcttcaggttgtcactaagttgtatccgaagagcacatgttgtgatgtgacattgaaatattgtggtctatcatctccagaaggttctcttgctcagagtgtcgttagcgagggaaagagtcatgctcttgatgttagttttgtacgagcaccaattggtatggaccttgattggcagctcattgcgaagatatcaccatgccatgttacggttctgaaggagagttatgaacgatttatggagttcattaagcgaagcaacgctgttagtccaacagtaactatggaaacagcaactgctctacagctgaagctggagaaggtcacacgtagggctcaggagcagcttcagctggtgttagaagaacaaagcagatttggacttgatattgatctggatgcaccaaaagttaggattcctttgaatgctaatcaacctttgctgggcaatgagtactttgttcttgattttggccattttacattgcatacaagagatggtaagcatgatgaagaaagacagagtctgtattcaggcttttatattactgggagggatatggctgctttccttatttgtgatttagctcagaacatatactcaatacctgaaaatttagatcaagataccctcctaggtcatacctttgatgataatcagttctgttctcttcttgatcgctgtggaatgtcagtgataattgagcagatcaaagttccacatccgaattatccatcaactcgtgttgcttttcaagtacccaatctggacattcacttttcaccaaaaaggtactgcaagatagttgaactgcttggtgtgcttctccatatgaagggaaacaataatgaatattcaaataaccatgaaagtggtagcttggcgccttggtatcctgctgatctagctggcgatgctagaacattggtttggaggggcattggttattcgcaagctgaatggcatacttgctatgttgtattatctgggatgtatctatatattttggagtcagaattctccgcgaattaccaaaggtgttgtagcatggctagtcgccaagtatttgaagtgccaccaactagtgttggtggatctccttacagtattggtgtgtgttctagaggtggagacacgcataaggcactagaactgaccagcacactggtaattgaatttcgtaatgaaatcgagaaggctatgtggatgaaagcacttgtccaggcaacataccgagcttctgctcctcctgacgtgaacatattaggagatcctgttagccctcccccagaatcaagtacaccacggcttaatagcttgggattagtggatcttgttgtgaatggctctgttattgaaactaaactttcactgtatgggaagctggacagaaagagcagtgattcgcaagagcttctaatgctagagctccttgggaatggagggaaggttaatgttgttcaatcttctcgtggtcttagtgtgaaaacaaaattgcattcattgaaaataatggatgagctacaaggtcgtctttcaatgacttcaaagtatttagtgtgctctgtcatcaatgaaagtgttggagctacctcttccgatacacttgataagggcggcgacctaagcatctttcctgtggatgaggatcctttcatggatgcattaacagattttactccagatcaaaattctaatccagatgactgtcaaattcccaacttcatttctgatgcaaatgagtacaatgaaataggttcaaaagatggttcatgctttgatggggatgaacagaacgcaaaacctactgaaatattttatgaggcacaagatagtaatgtggcagattttgttgttctgacattcttgagcaggagtcctgattcttgtctttatgatggtatagattcacagatgagtattcgtatgtccgcactggaattctactgtaacagacccacacttgttgctctaattgagtttggatttgatcttagcacggttaattctgtgccgaaatgtagtcttgatgtggcacctgcaattgaaactgtgaaacccacagggaaggaagaaggtgctcctactattgtaaaaggattgttaggttatgggaaacgtcgaacaattttcaacatcaaaatggatgtggatagggtatcaatgtttctcaataaggaagatggttctcagcttgcaatgtttgtgcaagagaaatttctgtttgatttgaaggttcatccaagttctttttcaattgatggtatgctggggaatatgagattttgtgacatgtcccttggtccagaacatcgttggggttggctttgcgatatacggaagcctggtgtcgagtcactcataaagttcacattccagtcgtacagtatcgatgatgaagattttgaaggtcataattacagcttgactggtcagctttctgctgttcgtattgtctttctctaccgttttatccaagagtttacttcttactttatggagcttggcacccctcatactgaagaggcaattaagtttattgataaagttggaggttttgagtggttaattcagaaatatgaaatggatggagcttctgctataaagctggatctttcccttgagacacccataatcattgttcctaagaattctcagagcgaagattatatacagtttgatcttggtcaattgaaagtaaggaatgagtttagttggcatggaggtaaagagactgacccttctgctgtaaggcttgatgttctccatgcagaaataaatggaatcaacatggcggttggggtaaatggaactctgggaaagtgtatgattcgtgatggtcgcggcatcaatatagaggtgcgacgtagcctacgggatgtcttcaaaaaggtcccgatactgtctatgaaatttcagataggattgcttcatggtgtcatgtcagataaagaatacaatgtcgcgataagctgtatttcgacaaatctgtccgatacacctaaccttcccccaagttttcgtgaaaatatgaacaggacaaaggagtcaattcgtttacttgcagataaagtcaaccttagcaaccatttgttgctttcacgtaccgttgttgtcatgaccgtggaaattcagtatgcgttgcttgaacttcgcaatggcccagatgcagagtcacctctggcagagcttgctgtggaaggtctatgggtatcctatagaacaacttcaatgcttgaaatggatctatatttgtcaatattgaaattttcaatacatgatatccgtccagatacgaagtctgagatgcgtctgatgcttggatcttgttcagagactgctaatctgtgcgttgatgactcttcaactgatgcaggggtttcgaacctcacaatgctgatactggattatcgttcgcgttcttcttttcaatcatttgttataagaatacagcagcctcgtatacttgttgtcctggattttctgcttcctgttgttgagtattttgtgccttctttaggctcgataactggcagagaggaaagcttagacccgaagaatgatcctcttatgagggctgatgatattatacttactgagcatgttttcttgcaaaaagaggattttattcaactatctcctgtaaggcagctaatagttgatggttgtgatattgacgagttcatttatgatggctgtgggggcactgtatccttatgtgaggaatttgataagaaaggacaggtatactctgggattataatcataattggttgtggcaaaagacttcgattcaaaaatgtcaaaattgagaatggtgcactgcttagaagatgtgtatacttgaacatgggaagcagttactcaatttcttctgaagatgatgtagaggtttctgtgttagaaagttctttcacgaatgatgaagactgtttaaaccttgaagaacataaaaagagaaatctgcagaatgccattgatggtcccacaaaccaaatactgaactttacatttgaggctcaggttgtatctccagaatttacattctatgacagttcaaagttatcaatggatgattcgttgcacattgagaagcttcttcgggccaagatggatttcagtttcatgtatgcttcaaaagaaaaagatatatgggctcgatctgtcattaaagaccttacaattgaagctggttctggtcttcttgttcttgaacctgtagatgtttcatggaaatatacttcagtcaatgaaaagacaaacatagtgttggtgtcgacagatgtttgcatccatctttctctgagtgttgcttctcttatgcttaaactgcaaaaccaaactcttgcagcattgcagtttggtaatattagcccactaatttcttgcacaaactttaagcgaatttggagctcaccaaaaggtgacctacctggttacaacctaacgttctggcggccacaagctccctccaattatgtcatattgggtgattgtgtgtcctcaaggtctgtgccaccttctcaggttgtggttgctataagtaatacttatggtcgtgtacgaaaacctcttggatttaggctaattcatgtattacctggttctctggatctcattgattcctgtcaatcaactgaagaaaacgaatgttctatctggattcctgtaccaccacctggatatttagctctaggatgtgtggtaaatattggaaggttaccaccttcaaaccatgtagtgtattgccttcgttctgatcttgcgacttctgcgacattttcagattgtatacacactctctcacctgctgctggaataatctctgaatttagcatctggcgtgtggacaatgtgattgcttcattctgtgcacataattctatagagcaacccactaaaacagaagctcttaatttgcaccatgttctcctccggaatccaaattgctatattgttaaagatctaagtgcagattcatctatccagaatgaccaatcttctgatcaattaaatcaccgcaagagtctttctggatgggatgtacttcgcactttgtcaagaccaagtaactattgtatgtctactccccattttgaaaggatatggtgggataaaggaaacgataccaagaagccattttctatatggagaccgttacctcgttttggttttgcttcggttggtgactgtataactgaagggtttgaaccacccactcttggcattcttttcaagtgtgacacagttgtttctgagaagcctgtacagtttactaaagtgacacaaattgacagaaaaggccttgaggaaatattcttctggtatccagtgccacctcccggttacgcttctcttggatgtatcgtaacaaaaacagatgaaatgccaagcaaggattccatttgctgccctaaactgagtctagtgagccaagcgaatatgtcagaggatcctatctccatgtcttctagctcaaaaggtccttgctgctggagcatctggaaagttgaaaatcagggctgtactttcctggccagaccagatgtcaagaagccctcagctcaactggcataccgtattgctgaccatgcgaagccgaaggcacgtgaaaacattactgctgagctgaagctgggttgtttgtcggttggcattcttgacagctcttgtggaatggtcacaccactttttgacacaacaatcgctaatataaatcttgcaacacatggaagatttgagacattgaatgctgtattgatctgttcaattgctgcatccacattcaatagacacttggaggcatgggaaccctttgttgagccatttgatggaatattcaagtttgaaacatatgataccagtgaacaccctccttccaaagttggtaagaggattcgtgttgctgcaacaagtcctctaaatgctaacctgagctctgcaaatcttgagctgcttatagaaacgttagtttcatggagaagacagattgatcttgaaaataaatcgtcaacaaaaagcgagggtaccattgaaaacatgaaaaaagctgatgattcttcgtactctgcattgaatgaagatgatttccagagagtggtttttgagaataaattaggatgtgatgtttatcttaaaaaaaaaatggaagatagtgaaatcactattgagcttttacagcatgagagcaaagtttcgttgttgcttccgcctcccaggttttcagataaactaaatgtgttatccaattcaacagaatcaagatactatgttgttgtacagatctttgagtctaagggcttgcctatcatagatgacggcaatggtcacagctacttctgtgctttacgcttacttattggaagccatgcttctgatcagcacaaagtgttcccacagagtgccaggacgagatgtgtaaaacctgtggaaactactgagttactgacccactgtgccaagtggaatgaacattttatatttgaagttccagaacaggcatcagctaatttagagattgaagtaacaaatcttgcatcaaaagctgggaaaggtgaagtaattggttctctgtctatgcctattggacgaggagcaaccatgttgaaacgagctccttctatgaggatgattcagcatgtttctgatgtcaaacgggtgctaacatgtcctcttacaaagaagggtcagatacctaattttgaggacaggaaaaaaggtggtgttttagtactctcaagctgttatgtggaacgttctactcattcatatttccagaggttgaaagacagtataaacaatgtggagagcgacttctgtataggacttagcccagatggtccatgggaaagttttactgcagctttgccagtgaccgtccttccaaaatcgcttaataataaccgttttgcatttgaggtcactatgaggaatggaaagaaacatgcaaccttgagaggtcttgcagttattgccaatgatgctgacataaaacttgaagtgtctatatgtcctgtaaacatgcttgataactctatgttaaatactagattggcaagctccaccagtgttattgatgaagtatttgaaaatcagtggtaccgaccaattgcagggtggggacataacccttcaattggtcacagaaaagacttaaagcagtggagcacaaaggactgctcatactcatctaaggcattttttgagcctggccttccatctggttggaggtggacctcaccgtggaaaattgaaaggttgaattttgtagataatgatggatgggcatatgctgcagattttcaaaacttgaattggccatcatcatcctggagatcttctaaatcaccacacgacttcgtgagaagaaggcgttgggtacgttctagacagcagtcgcaagaacaaagtgcagaaattcctagaaaagtacttgctactgtcagtcctcattcatctactgcgttgccttggacatcgatgattagggatatggatttatgcttgcaagttcgcccatattctgaaaaatcagaggaatcatatagctggagccagatttgttcactaggttctgagagtatacctaaacagcagcactcttcactttctaggcaaagcaccgtaaagcagtcagtggtatcatcaaggaattctgttcttaagcttgctgaactcgagaaaaaagatgtgctctcatattgccatcctcctgttagcactgaaagatatttctggtttagtgttggaattgatgcttctgttgttcatacagatttgaatgtacctgtctatgactggagaatttctttcaattcaattcttagacttgaaaataaacttccctatgaagctgagtatgctatatgggagatttccactaaaagtaatatggttgaaaagcagcatggtattgtcccttcgggtggaagtgtatttatctattcagcagatatacggaaaccaatttatcttacattgtttctccaaaacggttggattctagaaaaggatgctgtattgataatggacttgttgtccttggaacatgtttcttcgttctggatggttcagaagcagagccagaggagactacgagttagtgttgagcatgacctaggtgctagtgatgctgcaccaaagacactgagattgtttgtcccttactggataaaaaaccactcgtcaattccattatgttatcgcatagtagaaggggaatccacagaaagcacagaagcagactcacttagcagaccagactcgctaagtagagtgtctaagtcttcaaaattttcccttaaatattcttcaaagtctcttgtcagaagaggaacaatgtcgcacagaaatatgcaagtactggaagatattgaagattgtagcacagactatgtgatgctatcaccacaagattacttgaaccgatctgctggtatgcgctctgagtcaagggataacaatttcagtccagctcgagttgcaatatctatggctgttggtggttgcacacagtacagcgtaggagtatcgctttttgagcttgagaacaaggagcatgttgatatcaaaacatttgcttctgatgggtcatattactggttctcagttcaattgaagatggcttcagataggacaaaggtggtaaatttactgccgagagcacttcttatcaatagaattggaagaactatttttctatctgaatatcatgatgagactgaagagcccttacaaccatatgaacctccaaaagtatttcaatggcgatcagaatttggaagtgaacttttaaagttgaggttggagggataccaatggagtacaccttttagtatcaatgctaatggagttatgtgtgtgctcatgaacagcacaacaggaaatgatcaggcttttgtcagggtaaatgtgagaagtggaacaaaaagttcacggcatgaagttgtatttcagcttgattgctggtccagcccatacagggtggagaatcgctccatgttcttgcctatacggtttcggcagtttggtggtgatgatcattcatggcgtaatctgcttccgaattcatcagcttccttctttttggaggacctgagcagaaggcatctattggaagttttggttgatggaactgaccctatgaactccatgacatatgacatcaatgtcgtaatggatcatcagccccttactaattcagatgcccttaagaaggccttacgtgtcactgtcttgaaggaggggaaattgaatgttattcaaattattgattggctgccagataatagaaatcgaggacagataactgaaaggatgttatcaccaatctttcagccatcagaggtcgactatgggcagtcatctcctgatctggatagtgaatttcatgttactttggaactaacggagcttggcatttctgtaattgaccatatgcctgaggaagttctttacctctcagtgcagcaactgttacttgcatactcatctggaattggctctggagtaaatcggctcaaaatgcggatgcattggattcaagttgataatcaattaccatttgttcctatgcctgtacttttctgtcctcaaaagattgaaaatcagtcagactatattttcaagttctctatgacagttcagaccaacaattctcttgatttttgtgtctatccttatgtcggtgtccaggttcctgagaattgtgtgttctttgttaacatccatgaaccaatcatttggcgcctccatgagatgattcaacacctaaaattcgataggatatatagcaatcaaccttcagctgtttcagtggaccccatactgaaaattgggcttctgaacatctccgagatccgatttagagtgtcaatggcaatgtccccaagccaaaggccaaggggagtatttgggttctggtcgtcgttgatgactgcattgggaaacatggagcatatgccggtccgtatagctcaaagataccgggaggaattgtgcatgcggcaaagtgcacttatgaactctgctatatctaacattcaaaaggatcttcttagccaacctcttcagctactttccggtgttgatattcttggtaatgcgagtagcgctctgagtaacatgagcaaggggatagctgcattgtctatggacaagaaattcattcagggccggatgagacaggatagcaaaggtgtggaagactttggggatgtcataagagatggaggtggtgctcttgcaaaaggcatcttcagaggtgtcacaggcatattgacaaagcccatcgagggtgcaaaatcttctggtgttgaaggttttgtgcaaggagttggaaagggtataattggcgcagctgcacaaccagttagcggagttcttgatcttttatcaaaaactactgaaggtgccaatgcggtaaaaatgaaaatatcatcagcgataatggctgaggagcagttgctgcgtaggcgtcttcctcgagctattggtgggaatagtttgctctatccttatgacggacacaaagctactggccaggctatcttgcatctagctgaatgtgctacattccttggtcaaattgatatttttaaaatccgaggaaagtttgcttctaccgatgcttatgaggatcattttttacttcctaaggggaagatttttttaatcactcacagaagagtactattgcttcagttaccaatgatgacccagcgtaagttcaatcctacgaaggatccttgttcagtaatatgggatgtattatgggatgatttggtaacagtggagatgacccatgggaaaaaagatcctccagattcctggccttctaagcttattttatacttgaaagctaaaccttcaaattcgaaggaaattgttcgtttggtcaagtgtaatcgaggttcagatcaagcatctatcatttactcggcaattgacaaagcttataaagcttacggtccaaactcgttgaaggaattcttgagatggaaggtaccaaggccatatgcccctcgcaatagtagtggccgaagtatccaagacttatcatttggttaaaaggtcaacacaaatgcacactttagtgttaaacacagtagaatcttaggatgaaggtattttaggttgacacttttggttaccaggcaaatgatatattctacatatacactataggtatcagaggataggtactttgccttcatgtaaatagatatattttaggaggcgccggtattcatgtaaatgtgaacatctctgttataaagaaaaaaaataataatgcaaattatgcaagattcattgctgctgtcttgttgcaatgtttaatgtgttctcttgcgattgtctaaagacccaaaccgttaacgtgtctttactactatggtttcatttcacagatctctatgatcataccttgctcattaaaagcatttactattcttgtgatggggagatccatgtccgagttttggccaaaccactacagatctggtttccttcggcatatacaatcacattcaatatggattttttgacggaccggttcttcgcgaagagtttatcacttcactactacaccgtgtctcttatagatgtatttatgatcggtttcaggattatgtcatgcagtttattaattgtttttcatttttagaaaactaaactagtgtctcagggttgtacatggcttaagtccctttgaatataataatagtatgcgacaatgcaaagttggtaagatgggagttcaattcatttggtgatgcaaccactactgttagacgcactaacgacatctggtcacccatcggtgatgatccctctaatgtcgctattttcacccttggggtctagacatgaaggctagggtgattgaaaatctatttttg

SEQ ID NO: 41825 - DNA, 13526 bp, Zea Mays
cacctcgtgctggcccatcccgacatcccgtcccgtgctcccctcccctcctctcgaccacctcctcgtcgtcttcctcgccccctccgccacctccgccccggcctctccgctcccacccccgcggaaaccctaactccctcttggcacaggaggcctatgacggagattcgccgcgcgcaaggagggagtggattcgcgactgcgcagccgctgccgtcgtcctagggcgcgtcgagcactgccaccccattgacgggcccatccccacgacatccgccatgttcgagggccacgtgctgtatctgctacgcaaatatttgggtgaatatgttgaagggctttctgttgaagctctcagaataagtgtatggaaaggtgacgttgttctaaaagacttaaaacttaaggctgaagccctgaattctctcgggtttccagtgacagtgaaagctgggtttgttggcaccataacattaaaggtcccatggaagtgccttggtaaagaaccagttattgtcctcattgatcgtctatttgttcttgctcatcctgctcctgatggacagactctcaaggaagaagatagacaaaaactttttgaagccaagcttcagcagattgaggctgcggaggcagctactcttgaagcaacaaataggaactcaagaggagggcctgcaccaggtggaaattcatggttatacaatttaatatctacaattattggtaatcttaaagtcaccatcagtaatgtacacataagatatgaagattctgtcagcaattctgggcacccatttgcgtctggtttcacgttatcaaaacttgcagccgttacagtggatgaggatggtaatgaaacatttgatgcaggtgtagccctagataagctacgaaagtctgttgaactgcataggctgggcatctaccatgactcagacagtaatccttggaagcttaataaaaattgggaagctctaaatcgtaccgaatggagtgagatatttcaagatggcattgaagatggctctcaaagttccatctgggcagtaaatcggaactacttggtctcgcctataaatggaacccttaaatataaacgacttgggaagaatgaaagaggggatccagataccccattggagaaagcctcacttgtcctcagtgatgtttctttaactgtaactgaggcacagtattatgatggcattaaactgttggaagcattttcgaggtttagaacacgtgttgatgtgtctcatttacggcctgttgtgcctgtaaaggaggatcgtcgtgcttggtggcgttatgctgtgctggctggtctgcgacaaaggaaactatgctattggttttcatgggagagaactagacgcctctgccagcttcgacgccgttatgttcaattgtatgccacccttttgcaacaagcagcaaaagttgacatttctgaaattcgagagatagagaaaattctagacatgaaggtcataatactttggaggttgctgggtcatgctaaggttgaaacagtgaaatcaaaggggacactatatagaaaaggggcctcaaagaaaagatggtggccttttgcatggaacacgactggtttaccttctgaggaagctacacacccagaatcacagttagatgaagaggaacaactgactaaagaagagtggcaggctattaataagctgttgagttaccaaccagatgaagatatgtcttttccccttgagaaggtttccccaaatgtgattcaatttatgatggatgtatccattggccaggctggtgcaaggatcatcaatattgatggaactgaggttttatgtggtagatttcatcagcttcaggttgtcactaagttgtatccgaagagcacatgttgtgatgtgacattgaaatattgtggtctatcatctccagaaggttctcttgctcagagtgtcgttagcgagggaaagagtcatgctcttgatgttagttttgtacgagcaccaattggtatggaccttgattggcagctcattgcgaagatatcaccatgccatgttacggttctgaaggagagttatgaacgatttatggagttcattaagcgaagcaacgctgttagtccaacagtaactatggaaacagcaactgctctacagctgaagctggagaaggtcacacgtagggctcaggagcagcttcagctggtgttagaagaacaaagcagatttggacttgatattgatctggatgcaccaaaagttaggattcctttgaatgctaatcaacctttgctgggcaatgagtactttgttcttgattttggccattttacattgcatacaagagatggtaagcatgatgaagaaagacagagtctgtattcaggcttttatattactgggagggatatggctgctttccttatttgtgatttagctcagaacatatactcaatacctgaaaatttagatcaagataccctcctaggtcatacctttgatgataatcagttctgttctcttcttgatcgctgtggaatgtcagtgataattgagcagatcaaagttccacatccgaattatccatcaactcgtgttgcttttcaagtacccaatctggacattcacttttcaccaaaaaggtactgcaagatagttgaactgcttggtgtgcttctccatatgaagggaaacaataatgaatattcaaataaccatgaaagtggtagcttggcgccttggtatcctgctgatctagctggcgatgctagaacattggtttggaggggcattggttattcgcaagctgaatggcatacttgctatgttgtattatctgggatgtatctatatattttggagtcagaattctccgcgaattaccaaagcatggctagtcgccaagtatttgaagtgccaccaactagtgttggtggatctccttacagtattggtgtgtgttctagaggtggagacacgcataaggcactagaactgaccagcacactggtaattgaatttcgtaatgaaatcgagaaggctatgtggatgaaagcacttgtccaggcaacataccgagcttctgctcctcctgacgtgaacatattaggagatcctgttagccctcccccagaatcaagtacaccacggcttaatagcttgggattagtggatcttgttgtgaatggctctgttattgaaactaaactttcactgtatgggaagctggacagaaagagcagtgattcgcaagagcttctaatgctagagctccttgggaatggagggaaggttaatgttgttcaatcttctcgtggtcttagtgtgaaaacaaaattgcattcattgaaaataatggatgagctacaaggtcgtctttcaatgacttcaaagtatttagtgtgctctgtcatcaatgaaagtgttggagctacctcttccgatacacttgataagggcggcgacctaagcatctttcctgtggatgaggatcctttcatggatgcattaacagattttactccagatcaaaattctaatccagatgactgtcaaattcccaacttcatttctgatgcaaatgagtacaatgaaataggttcaaaagatggttcatgctttgatggggatgaacagaacgcaaaacctactgaaatattttatgaggcacaagatagtaatgtggcagattttgttgttctgacattcttgagcaggagtcctgattcttgtctttatgatggtatagattcacagatgagtattcgtatgtccgcactggaattctactgtaacagacccacacttgttgctctaattgagtttggatttgatcttagcacggttaattctgtgccgaaatgtagtcttgatgtggcacctgcaattgaaactgtgaaacccacagggaaggaagaaggtgctcctactattgtaaaaggattgttaggttatgggaaacgtcgaacaattttcaacatcaaaatggatgtggatagggtatcaatgtttctcaataaggaagatggttctcagcttgcaatgtttgtgcaagagaaatttctgtttgatttgaaggttcatccaagttctttttcaattgatggtatgctggggaatatgagattttgtgacatgtcccttggtccagaacatcgttggggttggctttgcgatatacggaagcctggtgtcgagtcactcataaagttcacattccagtcgtacagtatcgatgatgaagattttgaaggtcataattacagcttgactggtcagctttctgctgttcgtattgtctttctctaccgttttatccaagagtttacttcttactttatggagcttggcacccctcatactgaagaggcaattaagtttattgataaagttggaggttttgagtggttaattcagaaatatgaaatggatggagcttctgctataaagctggatctttcccttgagacacccataatcattgttcctaagaattctcagagcgaagattatatacagtttgatcttggtcaattgaaagtaaggaatgagtttagttggcatggaggtaaagagactgacccttctgctgtaaggcttgatgttctccatgcagaaataaatggaatcaacatggcggttggggtaaatggaactctgggaaagtgtatgattcgtgatggtcgcggcatcaatatagaggtgcgacgtagcctacgggatgtcttcaaaaaggtcccgatactgtctatgaaatttcagataggattgcttcatggtgtcatgtcagataaagaatacaatgtcgcgataagctgtatttcgacaaatctgtccgatacacctaaccttcccccaagttttcgtgaaaatatgaacaggacaaaggagtcaattcgtttacttgcagataaagtcaaccttagcaaccatttgttgctttcacgtaccgttgttgtcatgaccgtggaaattcagtatgcgttgcttgaacttcgcaatggcccagatgcagagtcacctctggcagagcttgctgtggaaggtctatgggtatcctatagaacaacttcaatgcttgaaatggatctatatttgtcaatattgaaattttcaatacatgatatccgtccagatacgaagtctgagatgcgtctgatgcttggatcttgttcagagactgctaatctgtgcgttgatgactcttcaactgatgcaggggtttcgaacctcacaatgctgatactggattatcgttcgcgttcttcttttcaatcatttgttataagaatacagcagcctcgtatacttgttgtcctggattttctgcttcctgttgttgagtattttgtgccttctttaggctcgataactggcagagaggaaagcttagacccgaagaatgatcctcttatgagggctgatgatattatacttactgagcatgttttcttgcaaaaagaggattttattcaactatctcctgtaaggcagctaatagttgatggttgtgatattgacgagttcatttatgatggctgtgggggcactgtatccttatgtgaggaatttgataagaaaggacaggtatactctgggattataatcataattggttgtggcaaaagacttcgattcaaaaatgtcaaaattgagaatggtgcactgcttagaagatgtgtatacttgaacatgggaagcagttactcaatttcttctgaagatgatgtagaggtttctgtgttagaaagttctttcacgaatgatgaagactgtttaaaccttgaagaacataaaaagagaaatctgcagaatgccattgatggtcccacaaaccaaatactgaactttacatttgaggctcaggttgtatctccagaatttacattctatgacagttcaaagttatcaatggatgattcgttgcacattgagaagcttcttcgggccaagatggatttcagtttcatgtatgcttcaaaagaaaaagatatatgggctcgatctgtcattaaagaccttacaattgaagctggttctggtcttcttgttcttgaacctgtagatgtttcatggaaatatacttcagtcaatgaaaagacaaacatagtgttggtgtcgacagatgtttgcatccatctttctctgagtgttgcttctcttatgcttaaactgcaaaaccaaactcttgcagcattgcagtttggtaatattagcccactaatttcttgcacaaactttaagcgaatttggagctcaccaaaaggtgacctacctggttacaacctaacgttctggcggccacaagctccctccaattatgtcatattgggtgattgtgtgtcctcaaggtctgtgccaccttctcaggttgtggttgctataagtaatacttatggtcgtgtacgaaaacctcttggatttaggctaattcatgtattacctggttctctggatctcattgattcctgtcaatcaactgaagaaaacgaatgttctatctggattcctgtaccaccacctggatatttagctctaggatgtgtggtaaatattggaaggttaccaccttcaaaccatgtagtgtattgccttcgttctgatcttgcgacttctgcgacattttcagattgtatacacactctctcacctgctgctggaataatctctgaatttagcatctggcgtgtggacaatgtgattgcttcattctgtgcacataattctatagagcaacccactaaaacagaagctcttaatttgcaccatgttctcctccggaatccaaattgctatattgttaaagatctaagtgcagattcatctatccagaatgaccaatcttctgatcaattaaatcaccgcaagagtctttctggatgggatgtacttcgcactttgtcaagaccaagtaactattgtatgtctactccccattttgaaaggatatggtgggataaaggaaacgataccaagaagccattttctatatggagaccgttacctcgttttggttttgcttcggttggtgactgtataactgaagggtttgaaccacccactcttggcattcttttcaagtgtgacacagttgtttctgagaagcctgtacagtttactaaagtgacacaaattgacagaaaaggccttgaggaaatattcttctggtatccagtgccacctcccggttacgcttctcttggatgtatcgtaacaaaaacagatgaaatgccaagcaaggattccatttgctgccctaaactgagtctagtgagccaagcgaatatgtcagaggatcctatctccatgtcttctagctcaaaaggtccttgctgctggagcatctggaaagttgaaaatcagggctgtactttcctggccagaccagatgtcaagaagccctcagctcaactggcataccgtattgctgaccatgcgaagccgaaggcacgtgaaaacattactgctgagctgaagctgggttgtttgtcggttggcattcttgacagctcttgtggaatggtcacaccactttttgacacaacaatcgctaatataaatcttgcaacacatggaagatttgagacattgaatgctgtattgatctgttcaattgctgcatccacattcaatagacacttggaggcatgggaaccctttgttgagccatttgatggaatattcaagtttgaaacatatgataccagtgaacaccctccttccaaagttggtaagaggattcgtgttgctgcaacaagtcctctaaatgctaacctgagctctgcaaatcttgagctgcttatagaaacgttagtttcatggagaagacagattgatcttgaaaataaatcgtcaacaaaaagcgagggtaccattgaaaacatgaaaaaagctgatgattcttcgtactctgcattgaatgaagatgatttccagagagtggtttttgagaataaattaggatgtgatgtttatcttaaaaaaaaaatggaagatagtgaaatcactattgagcttttacagcatgagagcaaagtttcgttgttgcttccgcctcccaggttttcagataaactaaatgtgttatccaattcaacagaatcaagatactatgttgttgtacagatctttgagtctaagggcttgcctatcatagatgacggcaatggtcacagctacttctgtgctttacgcttacttattggaagccatgcttctgatcagcacaaagtgttcccacagagtgccaggacgagatgtgtaaaacctgtggaaactactgagttactgacccactgtgccaagtggaatgaacattttatatttgaagttccagaacaggcatcagctaatttagagattgaagtaacaaatcttgcatcaaaagctgggaaaggtgaagtaattggttctctgtctatgcctattggacgaggagcaaccatgttgaaacgagctccttctatgaggatgattcagcatgtttctgatgtcaaacgggtgctaacatgtcctcttacaaagaagggtcagatacctaattttgaggacaggaaaaaaggtggtgttttagtactctcaagctgttatgtggaacgttctactcattcatatttccagaggttgaaagacagtataaacaatgtggagagcgacttctgtataggacttagcccagatggtccatgggaaagttttactgcagctttgccagtgaccgtccttccaaaatcgcttaataataaccgttttgcatttgaggtcactatgaggaatggaaagaaacatgcaaccttgagaggtcttgcagttattgccaatgatgctgacataaaacttgaagtgtctatatgtcctgtaaacatgcttgataactctatgttaaatactagattggcaagctccaccagtgttattgatgaagtatttgaaaatcagtggtaccgaccaattgcagggtggggacataacccttcaattggtcacagaaaagacttaaagcagtggagcacaaaggactgctcatactcatctaaggcattttttgagcctggccttccatctggttggaggtggacctcaccgtggaaaattgaaaggttgaattttgtagataatgatggatgggcatatgctgcagattttcaaaacttgaattggccatcatcatcctggagatcttctaaatcaccacacgacttcgtgagaagaaggcgttgggtacgttctagacagcagtcgcaagaacaaagtgcagaaattcctagaaaagtacttgctactgtcagtcctcattcatctactgcgttgccttggacatcgatgattagggatatggatttatgcttgcaagttcgcccatattctgaaaaatcagaggaatcatatagctggagccagatttgttcactaggttctgagagtatacctaaacagcagcactcttcactttctaggcaaagcaccgtaaagcagtcagtggtatcatcaaggaattctgttcttaagcttgctgaactcgagaaaaaagatgtgctctcatattgccatcctcctgttagcactgaaagatatttctggtttagtgttggaattgatgcttctgttgttcatacagatttgaatgtacctgtctatgactggagaatttctttcaattcaattcttagacttgaaaataaacttccctatgaagctgagtatgctatatgggagatttccactaaaagtaatatggttgaaaagcagcatggtattgtcccttcgggtggaagtgtatttatctattcagcagatatacggaaaccaatttatcttacattgtttctccaaaacggttggattctagaaaaggatgctgtattgataatggacttgttgtccttggaacatgtttcttcgttctggatggttcagaagcagagccagaggagactacgagttagtgttgagcatgacctaggtgctagtgatgctgcaccaaagacactgagattgtttgtcccttactggataaaaaaccactcgtcaattccattatgttatcgcatagtagaaggggaatccacagaaagcacagaagcagactcacttagcagaccagactcgctaagtagagtgtctaagtcttcaaaattttcccttaaatattcttcaaagtctcttgtcagaagaggaacaatgtcgcacagaaatatgcaagtactggaagatattgaagattgtagcacagactatgtgatgctatcaccacaagattacttgaaccgatctgctggtatgcgctctgagtcaagggataacaatttcagtccagctcgagttgcaatatctatggctgttggtggttgcacacagtacagcgtaggagtatcgctttttgagcttgagaacaaggagcatgttgatatcaaaacatttgcttctgatgggtcatattactggttctcagttcaattgaagatggcttcagataggacaaaggtggtaaatttactgccgagagcacttcttatcaatagaattggaagaactatttttctatctgaatatcatgatgagactgaagagcccttacaaccatatgaacctccaaaagtatttcaatggcgatcagaatttggaagtgaacttttaaagttgaggttggagggataccaatggagtacaccttttagtatcaatgctaatggagttatgtgtgtgctcatgaacagcacaacaggaaatgatcaggcttttgtcagggtaaatgtgagaagtggaacaaaaagttcacggcatgaagttgtatttcagcttgattgctggtccagcccatacagggtggagaatcgctccatgttcttgcctatacggtttcggcagtttggtggtgatgatcattcatggcgtaatctgcttccgaattcatcagcttccttctttttggaggacctgagcagaaggcatctattggaagttttggttgatggaactgaccctatgaactccatgacatatgacatcaatgtcgtaatggatcatcagccccttactaattcagatgcccttaagaaggccttacgtgtcactgtcttgaaggaggggaaattgaatgttattcaaattattgattggctgccagataatagaaatcgaggacagataactgaaaggatgttatcaccaatctttcagccatcagaggtcgactatgggcagtcatctcctgatctggatagtgaatttcatgttactttggaactaacggagcttggcatttctgtaattgaccatatgcctgaggaagttctttacctctcagtgcagcaactgttacttgcatactcatctggaattggctctggagtaaatcggctcaaaatgcggatgcattggattcaagttgataatcaattaccatttgttcctatgcctgtacttttctgtcctcaaaagattgaaaatcagtcagactatattttcaagttctctatgacagttcagaccaacaattctcttgatttttgtgtctatccttatgtcggtgtccaggttcctgagaattgtgtgttctttgttaacatccatgaaccaatcatttggcgcctccatgagatgattcaacacctaaaattcgataggatatatagcaatcaaccttcagctgtttcagtggaccccatactgaaaattgggcttctgaacatctccgagatccgatttagagtgtcaatggcaatgtccccaagccaaaggccaaggggagtatttgggttctggtcgtcgttgatgactgcattgggaaacatggagcatatgccggtccgtatagctcaaagataccgggaggaattgtgcatgcggcaaagtgcacttatgaactctgctatatctaacattcaaaaggatcttcttagccaacctcttcagctactttccggtgttgatattcttggtaatgcgagtagcgctctgagtaacatgagcaaggggatagctgcattgtctatggacaagaaattcattcagggccggatgagacaggatagcaaaggtgtggaagactttggggatgtcataagagatggaggtggtgctcttgcaaaaggcatcttcagaggtgtcacaggcatattgacaaagcccatcgagggtgcaaaatcttctggtgttgaaggttttgtgcaaggagttggaaagggtataattggcgcagctgcacaaccagttagcggagttcttgatcttttatcaaaaactactgaaggtgccaatgcggtaaaaatgaaaatatcatcagcgataatggctgaggagcagttgctgcgtaggcgtcttcctcgagctattggtgggaatagtttgctctatccttatgacggacacaaagctactggccaggctatcttgcatctagctgaatgtgctacattccttggtcaaattgatatttttaaaatccgaggaaagtttgcttctaccgatgcttatgaggatcattttttacttcctaaggggaagatttttttaatcactcacagaagagtactattgcttcagttaccaatgatgacccagcgtaagttcaatcctacgaaggatccttgttcagtaatatgggatgtattatgggatgatttggtaacagtggagatgacccatgggaaaaaagatcctccagattcctggccttctaagcttattttatacttgaaagctaaaccttcaaattcgaaggaaattgttcgtttggtcaagtgtaatcgaggttcagatcaagcatctatcatttactcggcaattgacaaagcttataaagcttacggtccaaactcgttgaaggaattcttgagatggaaggtaccaaggccatatgcccctcgcaatagtagtggccgaagtatccaagacttatcatttggttaaaaggtcaacacaaatgcacactttagtgttaaacacagtagaatcttaggatgaaggtattttaggttgacacttttggttaccaggcaaatgatatattctacatatacactatagatctctatgatcataccttgctcattaaaagcatttactattcttgtgatggggagatccatgtccgagttttggccaaaccactacagatctggtttccttcggcatatacaatcacattcaatatggattttttgacggaccggttcttcgcgaagagtttatcacttcactactacaccgtgtctcttatagatgtatttatgatcggtttcaggattatgtcatgcagtttattaattgtttttcatttttagaaaactaaactagtgtctcagggttgtacatggcttaagtccctttgaatataataatagtatgcgacaatgcaaagttggtaagatgggagttcaattcatttggtgatgcaaccactactgttagacgcactaacgacatctggtcacccatcggtgatgatccctctaatgtcgctattttcacccttggggtctagacatgaaggctagggtgattgaaaatctatttttg

SEQ ID NO: 41826 - DNA, 2195 bp, Zea Mays
ctcgtgctggcccatcccgacatcccgtcccgtgctcccctcccctcctctcgaccacctcctcgtcgtcttcctcgccccctccgccacctccgccccggcctctccgctcccacccccgcggaaaccctaactccctcttggcacaggaggcctatgacggagattcgccgcgcgcaaggagggagtggattcgcgactgcgcagccgctgccgtcgtcctagggcgcgtcgagcactgccaccccattgacgggcccatccccacgacatccgccatgttcgagggccacgtgctgtatctgctacgcaaatatttgggtgaatatgttgaagggctttctgttgaagctctcagaataagtgtatggaaaggtgacgttgttctaaaagacttaaaacttaaggctgaagccctgaattctctcgggtttccagtgacagtgaaagctgggtttgttggcaccataacattaaaggtcccatggaagtgccttggtaaagaaccagttattgtcctcattgatcgtctatttgttcttgctcatcctgctcctgatggacagactctcaaggaagaagatagacaaaaactttttgaagccaagcttcagcagattgaggctgcggaggcagctactcttgaagcaacaaataggaactcaagaggagggcctgcaccaggtggaaattcatggttatacaatttaatatctacaattattggtaatcttaaagtcaccatcagtaatgtacacataagatatgaagattctgtcagcaattctgggcacccatttgcgtctggtttcacgttatcaaaacttgcagccgttacagtggatgaggatggtaatgaaacatttgatgcaggtgtagccctagataagctacgaaagtctgttgaactgcataggctgggcatctaccatgactcagacagtaatccttggaagcttaataaaaattgggaagctctaaatcgtaccgaatggagtgagatatttcaagatggcattgaagatggctctcaaagttccatctgggcagtaaatcggaactacttggtctcgcctataaatggaacccttaaatataaacgacttgggaagaatgaaagaggggatccagataccccattggagaaagcctcacttgtcctcagtgatgtttctttaactgtaactgaggcacagtattatgatggcattaaactgttggaagcattttcgaggtttagaacacgtgttgatgtgtctcatttacggcctgttgtgcctgtaaaggaggatcgtcgtgcttggtggcgttatgctgtgctggctggtctgcgacaaaggaaactatgctattggttttcatgggagagaactagacgcctctgccagcttcgacgccgttatgttcaattgtatgccacccttttgcaacaagcagcaaaagttgacatttctgaaattcgagagatagagaaaattctagacatgaaggtcataatactttggaggttgctgggtcatgctaaggttgaaacagtgaaatcaaaggggacactatatagaaaaggggcctcaaagaaaagatggtggccttttgcatggaacacgactggtttaccttctgaggaagctacacacccagaatcacagttagatgaagaggaacaactgactaaagaagagtggcaggctattaataagctgttgagttaccaaccagatgaagatatgtcttttccccttgagaaggtttccccaaatgtgattcaatttatgatggatgtatccattggccaggctggtgcaaggatcatcaatattgatggaactgaggttttatgtggtagatttcatcagcttcaggttgtcactaagttgtatccgaagagcacatgttgtgatgtgacattgaaatattgtggtctatcatctccagaaggttctcttgctcagagtgtcgttagcgagggaaagagtcatgctcttgatgttagttttgtacgagcaccaattggtatggaccttgattggcagctcattgcgaagatatcaccatgccatgttacgctactagcaaaattcaacttgatgactacctgccaggttcagacagctgccttgacttaccaaggaaataagacagctgatgttgcctacttactagaaagggaaactgacctatatgtcacccattag

SEQ ID NO: 41827 - DNA, 13703 bp, Zea Mays
ctcgtgctggcccatcccgacatcccgtcccgtgctcccctcccctcctctcgaccacctcctcgtcgtcttcctcgccccctccgccacctccgccccggcctctccgctcccacccccgcggaaaccctaactccctcttggcacaggaggcctatgacggagattcgccgcgcgcaaggagggagtggattcgcgactgcgcagccgctgccgtcgtcctagggcgcgtcgagcactgccaccccattgacgggcccatccccacgacatccgccatgttcgagggccacgtgctgtatctgctacgcaaatatttgggtgaatatgttgaagggctttctgttgaagctctcagaataagtgtatggaaaggtgacgttgttctaaaagacttaaaacttaaggctgaagccctgaattctctcgggtttccagtgacagtgaaagctgggtttgttggcaccataacattaaaggtcccatggaagtgccttggtaaagaaccagttattgtcctcattgatcgtctatttgttcttgctcatcctgctcctgatggacagactctcaaggaagaagatagacaaaaactttttgaagccaagcttcagcagattgaggctgcggaggcagctactcttgaagcaacaaataggaactcaagaggagggcctgcaccaggtggaaattcatggttatacaatttaatatctacaattattggtaatcttaaagtcaccatcagtaatgtacacataagatatgaagattctgtcagcaattctgggcacccatttgcgtctggtttcacgttatcaaaacttgcagccgttacagtggatgaggatggtaatgaaacatttgatgcaggtgtagccctagataagctacgaaagtctgttgaactgcataggctgggcatctaccatgactcagacagtaatccttggaagcttaataaaaattgggaagctctaaatcgtaccgaatggagtgagatatttcaagatggcattgaagatggctctcaaagttccatctgggcagtaaatcggaactacttggtctcgcctataaatggaacccttaaatataaacgacttgggaagaatgaaagaggggatccagataccccattggagaaagcctcacttgtcctcagtgatgtttctttaactgtaactgaggcacagtattatgatggcattaaactgttggaagcattttcgaggtttagaacacgtgttgatgtgtctcatttacggcctgttgtgcctgtaaaggaggatcgtcgtgcttggtggcgttatgctgtgctggctggtctgcgacaaaggaaactatgctattggttttcatgggagagaactagacgcctctgccagcttcgacgccgttatgttcaattgtatgccacccttttgcaacaagcagcaaaagttgacatttctgaaattcgagagatagagaaaattctagacatgaaggtcataatactttggaggttgctgggtcatgctaaggttgaaacagtgaaatcaaaggggacactatatagaaaaggggcctcaaagaaaagatggtggccttttgcatggaacacgactggtttaccttctgaggaagctacacacccagaatcacagttagatgaagaggaacaactgactaaagaagagtggcaggctattaataagctgttgagttaccaaccagatgaagatatgtcttttccccttgagaaggtttccccaaatgtgattcaatttatgatggatgtatccattggccaggctggtgcaaggatcatcaatattgatggaactgaggttttatgtggtagatttcatcagcttcaggttgtcactaagttgtatccgaagagcacatgttgtgatgtgacattgaaatattgtggtctatcatctccagaaggttctcttgctcagagtgtcgttagcgagggaaagagtcatgctcttgatgttagttttgtacgagcaccaattggtatggaccttgattggcagctcattgcgaagatatcaccatgccatgttacggttctgaaggagagttatgaacgatttatggagttcattaagcgaagcaacgctgttagtccaacagtaactatggaaacagcaactgctctacagctgaagctggagaaggtcacacgtagggctcaggagcagcttcagctggtgttagaagaacaaagcagatttggacttgatattgatctggatgcaccaaaagttaggattcctttgaatgctaatcaacctttgctgggcaatgagtactttgttcttgattttggccattttacattgcatacaagagatggtaagcatgatgaagaaagacagagtctgtattcaggcttttatattactgggagggatatggctgctttccttatttgtgatttagctcagaacatatactcaatacctgaaaatttagatcaagataccctcctaggtcatacctttgatgataatcagttctgttctcttcttgatcgctgtggaatgtcagtgataattgagcagatcaaagttccacatccgaattatccatcaactcgtgttgcttttcaagtacccaatctggacattcacttttcaccaaaaaggtactgcaagatagttgaactgcttggtgtgcttctccatatgaagggaaacaataatgaatattcaaataaccatgaaagtggtagcttggcgccttggtatcctgctgatctagctggcgatgctagaacattggtttggaggggcattggttattcgcaagctgaatggcatacttgctatgttgtattatctgggatgtatctatatattttggagtcagaattctccgcgaattaccaaaggtgttgtagcatggctagtcgccaagtatttgaagtgccaccaactagtgttggtggatctccttacagtattggtgtgtgttctagaggtggagacacgcataaggcactagaactgaccagcacactggtaattgaatttcgtaatgaaatcgagaaggctatgtggatgaaagcacttgtccaggcaacataccgagcttctgctcctcctgacgtgaacatattaggagatcctgttagccctcccccagaatcaagtacaccacggcttaatagcttgggattagtggatcttgttgtgaatggctctgttattgaaactaaactttcactgtatgggaagctggacagaaagagcagtgattcgcaagagcttctaatgctagagctccttgggaatggagggaaggttaatgttgttcaatcttctcgtggtcttagtgtgaaaacaaaattgcattcattgaaaataatggatgagctacaaggtcgtctttcaatgacttcaaagtatttagtgtgctctgtcatcaatgaaagtgttggagctacctcttccgatacacttgataagggcggcgacctaagcatctttcctgtggatgaggatcctttcatggatgcattaacagattttactccagatcaaaattctaatccagatgactgtcaaattcccaacttcatttctgatgcaaatgagtacaatgaaataggttcaaaagatggttcatgctttgatggggatgaacagaacgcaaaacctactgaaatattttatgaggcacaagatagtaatgtggcagattttgttgttctgacattcttgagcaggagtcctgattcttgtctttatgatggtatagattcacagatgagtattcgtatgtccgcactggaattctactgtaacagacccacacttgttgctctaattgagtttggatttgatcttagcacggttaattctgtgccgaaatgtagtcttgatgtggcacctgcaattgaaactgtgaaacccacagggaaggaagaaggtgctcctactattgtaaaaggattgttaggttatgggaaacgtcgaacaattttcaacatcaaaatggatgtggatagggtatcaatgtttctcaataaggaagatggttctcagcttgcaatgtttgtgcaagagaaatttctgtttgatttgaaggttcatccaagttctttttcaattgatggtatgctggggaatatgagattttgtgacatgtcccttggtccagaacatcgttggggttggctttgcgatatacggaagcctggtgtcgagtcactcataaagttcacattccagtcgtacagtatcgatgatgaagattttgaaggtcataattacagcttgactggtcagctttctgctgttcgtattgtctttctctaccgttttatccaagagtttacttcttactttatggagcttggcacccctcatactgaagaggcaattaagtttattgataaagttggaggttttgagtggttaattcagaaatatgaaatggatggagcttctgctataaagctggatctttcccttgagacacccataatcattgttcctaagaattctcagagcgaagattatatacagtttgatcttggtcaattgaaagtaaggaatgagtttagttggcatggaggtaaagagactgacccttctgctgtaaggcttgatgttctccatgcagaaataaatggaatcaacatggcggttggggtaaatggaactctgggaaagtgtatgattcgtgatggtcgcggcatcaatatagaggtgcgacgtagcctacgggatgtcttcaaaaaggtcccgatactgtctatgaaatttcagataggattgcttcatggtgtcatgtcagataaagaatacaatgtcgcgataagctgtatttcgacaaatctgtccgatacacctaaccttcccccaagttttcgtgaaaatatgaacaggacaaaggagtcaattcgtttacttgcagataaagtcaaccttagcaaccatttgttgctttcacgtaccgttgttgtcatgaccgtggaaattcagtatgcgttgcttgaacttcgcaatggcccagatgcagagtcacctctggcagagcttgctgtggaaggtctatgggtatcctatagaacaacttcaatgcttgaaatggatctatatttgtcaatattgaaattttcaatacatgatatccgtccagatacgaagtctgagatgcgtctgatgcttggatcttgttcagagactgctaatctgtgcgttgatgactcttcaactgatgcaggggtttcgaacctcacaatgctgatactggattatcgttcgcgttcttcttttcaatcatttgttataagaatacagcagcctcgtatacttgttgtcctggattttctgcttcctgttgttgagtattttgtgccttctttaggctcgataactggcagagaggaaagcttagacccgaagaatgatcctcttatgagggctgatgatattatacttactgagcatgttttcttgcaaaaagaggattttattcaactatctcctgtaaggcagctaatagttgatggttgtgatattgacgagttcatttatgatggctgtgggggcactgtatccttatgtgaggaatttgataagaaaggacaggtatactctgggattataatcataattggttgtggcaaaagacttcgattcaaaaatgtcaaaattgagaatggtgcactgcttagaagatgtgtatacttgaacatgggaagcagttactcaatttcttctgaagatgatgtagaggtttctgtgttagaaagttctttcacgaatgatgaagactgtttaaaccttgaagaacataaaaagagaaatctgcagaatgccattgatggtcccacaaaccaaatactgaactttacatttgaggctcaggttgtatctccagaatttacattctatgacagttcaaagttatcaatggatgattcgttgcacattgagaagcttcttcgggccaagatggatttcagtttcatgtatgcttcaaaagaaaaagatatatgggctcgatctgtcattaaagaccttacaattgaagctggttctggtcttcttgttcttgaacctgtagatgtttcatggaaatatacttcagtcaatgaaaagacaaacatagtgttggtgtcgacagatgtttgcatccatctttctctgagtgttgcttctcttatgcttaaactgcaaaaccaaactcttgcagcattgcagtttggtaatattagcccactaatttcttgcacaaactttaagcgaatttggagctcaccaaaaggtgacctacctggttacaacctaacgttctggcggccacaagctccctccaattatgtcatattgggtgattgtgtgtcctcaaggtctgtgccaccttctcaggttgtggttgctataagtaatacttatggtcgtgtacgaaaacctcttggatttaggctaattcatgtattacctggttctctggatctcattgattcctgtcaatcaactgaagaaaacgaatgttctatctggattcctgtaccaccacctggatatttagctctaggatgtgtggtaaatattggaaggttaccaccttcaaaccatgtagtgtattgccttcgttctgatcttgcgacttctgcgacattttcagattgtatacacactctctcacctgctgctggaataatctctgaatttagcatctggcgtgtggacaatgtgattgcttcattctgtgcacataattctatagagcaacccactaaaacagaagctcttaatttgcaccatgttctcctccggaatccaaattgctatattgttaaagatctaagtgcagattcatctatccagaatgaccaatcttctgatcaattaaatcaccgcaagagtctttctggatgggatgtacttcgcactttgtcaagaccaagtaactattgtatgtctactccccattttgaaaggatatggtgggataaaggaaacgataccaagaagccattttctatatggagaccgttacctcgttttggttttgcttcggttggtgactgtataactgaagggtttgaaccacccactcttggcattcttttcaagtgtgacacagttgtttctgagaagcctgtacagtttactaaagtgacacaaattgacagaaaaggccttgaggaaatattcttctggtatccagtgccacctcccggttacgcttctcttggatgtatcgtaacaaaaacagatgaaatgccaagcaaggattccatttgctgccctaaactgagtctagtgagccaagcgaatatgtcagaggatcctatctccatgtcttctagctcaaaaggtccttgctgctggagcatctggaaagttgaaaatcagggctgtactttcctggccagaccagatgtcaagaagccctcagctcaactggcataccgtattgctgaccatgcgaagccgaaggcacgtgaaaacattactgctgagctgaagctgggttgtttgtcggttggcattcttgacagctcttgtggaatggtcacaccactttttgacacaacaatcgctaatataaatcttgcaacacatggaagatttgagacattgaatgctgtattgatctgttcaattgctgcatccacattcaatagacacttggaggcatgggaaccctttgttgagccatttgatggaatattcaagtttgaaacatatgataccagtgaacaccctccttccaaagttggtaagaggattcgtgttgctgcaacaagtcctctaaatgctaacctgagctctgcaaatcttgagctgcttatagaaacgttagtttcatggagaagacagattgatcttgaaaataaatcgtcaacaaaaagcgagggtaccattgaaaacatgaaaaaagctgatgattcttcgtactctgcattgaatgaagatgatttccagagagtggtttttgagaataaattaggatgtgatgtttatcttaaaaaaaaaatggaagatagtgaaatcactattgagcttttacagcatgagagcaaagtttcgttgttgcttccgcctcccaggttttcagataaactaaatgtgttatccaattcaacagaatcaagatactatgttgttgtacagatctttgagtctaagggcttgcctatcatagatgacggcaatggtcacagctacttctgtgctttacgcttacttattggaagccatgcttctgatcagcacaaagtgttcccacagagtgccaggacgagatgtgtaaaacctgtggaaactactgagttactgacccactgtgccaagtggaatgaacattttatatttgaagttccagaacaggcatcagctaatttagagattgaagtaacaaatcttgcatcaaaagctgggaaaggtgaagtaattggttctctgtctatgcctattggacgaggagcaaccatgttgaaacgagctccttctatgaggatgattcagcatgtttctgatgtcaaacgggtgctaacatgtcctcttacaaagaagggtcagatacctaattttgaggacaggaaaaaaggtggtgttttagtactctcaagctgttatgtggaacgttctactcattcatatttccagaggttgaaagacagtataaacaatgtggagagcgacttctgtataggacttagcccagatggtccatgggaaagttttactgcagctttgccagtgaccgtccttccaaaatcgcttaataataaccgttttgcatttgaggtcactatgaggaatggaaagaaacatgcaaccttgagaggtcttgcagttattgccaatgatgctgacataaaacttgaagtgtctatatgtcctgtaaacatgcttgataactctatgttaaatactagattggcaagctccaccagtgttattgatgaagtatttgaaaatcagtggtaccgaccaattgcagggtggggacataacccttcaattggtcacagaaaagacttaaagcagtggagcacaaaggactgctcatactcatctaaggcattttttgagcctggccttccatctggttggaggtggacctcaccgtggaaaattgaaaggttgaattttgtagataatgatggatgggcatatgctgcagattttcaaaacttgaattggccatcatcatcctggagatcttctaaatcaccacacgacttcgtgagaagaaggcgttgggtacgttctagacagcagtcgcaagaacaaagtgcagaaattcctagaaaagtacttgctactgtcagtcctcattcatctactgcgttgccttggacatcgatgattagggatatggatttatgcttgcaagttcgcccatattctgaaaaatcagaggaatcatatagctggagccagatttgttcactaggttctgagagtatacctaaacagcagcactcttcactttctaggcaaagcaccgtaaagcagtcagtggtatcatcaaggaattctgttcttaagcttgctgaactcgagaaaaaagatgtgctctcatattgccatcctcctgttagcactgaaagatatttctggtttagtgttggaattgatgcttctgttgttcatacagatttgaatgtacctgtctatgactggagaatttctttcaattcaattcttagacttgaaaataaacttccctatgaagctgagtatgctatatgggagatttccactaaaagtaatatggttgaaaagcagcatggtattgtcccttcgggtggaagtgtatttatctattcagcagatatacggaaaccaatttatcttacattgtttctccaaaacggttggattctagaaaaggatgctgtattgataatggacttgttgtccttggaacatgtttcttcgttctggatggttcagaagcagagccagaggagactacgagttagtgttgagcatgacctaggtgctagtgatgctgcaccaaagacactgagattgtttgtcccttactggataaaaaaccactcgtcaattccattatgttatcgcatagtagaaggggaatccacagaaagcacagaagcagactcacttagcagaccagactcgctaagtagagtgtctaagtcttcaaaattttcccttaaatattcttcaaagtctcttgtcagaagaggaacaatgtcgcacagaaatatgcaagtactggaagatattgaagattgtagcacagactatgtgatgctatcaccacaagattacttgaaccgatctgctggtatgcgctctgagtcaagggataacaatttcagtccagctcgagttgcaatatctatggctgttggtggttgcacacagtacagcgtaggagtatcgctttttgagcttgagaacaaggagcatgttgatatcaaaacatttgcttctgatgggtcatattactggttctcagttcaattgaagatggcttcagataggacaaaggtggtaaatttactgccgagagcacttcttatcaatagaattggaagaactatttttctatctgaatatcatgatgagactgaagagcccttacaaccatatgaacctccaaaagtatttcaatggcgatcagaatttggaagtgaacttttaaagttgaggttggagggataccaatggagtacaccttttagtatcaatgctaatggagttatgtgtgtgctcatgaacagcacaacaggaaatgatcaggcttttgtcagggtaaatgtgagaagtggaacaaaaagttcacggcatgaagttgtatttcagcttgattgctggtccagcccatacagggtggagaatcgctccatgttcttgcctatacggtttcggcagtttggtggtgatgatcattcatggcgtaatctgcttccgaattcatcagcttccttctttttggaggacctgagcagaaggcatctattggaagttttggttgatggaactgaccctatgaactccatgacatatgacatcaatgtcgtaatggatcatcagccccttactaattcagatgcccttaagaaggccttacgtgtcactgtcttgaaggaggggaaattgaatgttattcaaattattgattggctgccagataatagaaatcgaggacagataactgaaaggatgttatcaccaatctttcagccatcagaggtcgactatgggcagtcatctcctgatctggatagtgaatttcatgttactttggaactaacggagcttggcatttctgtaattgaccatatgcctgaggaagttctttacctctcagtgcagcaactgttacttgcatactcatctggaattggctctggagtaaatcggctcaaaatgcggatgcattggattcaagttgataatcaattaccatttgttcctatgcctgtacttttctgtcctcaaaagattgaaaatcagtcagactatattttcaagttctctatgacagttcagaccaacaattctcttgatttttgtgtctatccttatgtcggtgtccaggttcctgagaattgtgtgttctttgttaacatccatgaaccaatcatttggcgcctccatgagatgattcaacacctaaaattcgataggatatatagcaatcaaccttcagctgtttcagtggaccccatactgaaaattgggcttctgaacatctccgagatccgatttagagtgtcaatggcaatgtccccaagccaaaggccaaggggagtatttgggttctggtcgtcgttgatgactgcattgggaaacatggagcatatgccggtccgtatagctcaaagataccgggaggaattgtgcatgcggcaaagtgcacttatgaactctgctatatctaacattcaaaaggatcttcttagccaacctcttcagctactttccggtgttgatattcttggtaatgcgagtagcgctctgagtaacatgagcaaggggatagctgcattgtctatggacaagaaattcattcagggccggatgagacaggatagcaaaggtgtggaagactttggggatgtcataagagatggaggtggtgctcttgcaaaaggcatcttcagaggtgtcacaggcatattgacaaagcccatcgagggtgcaaaatcttctggtgttgaaggttttgtgcaaggagttggaaagggtataattggcgcagctgcacaaccagttagcggagttcttgatcttttatcaaaaactactgaaggtgccaatgcggtaaaaatgaaaatatcatcagcgataatggctgaggagcagttgctgcgtaggcgtcttcctcgagctattggtgggaatagtttgctctatccttatgacggacacaaagctactggccaggctatcttgcatctagctgaatgtgctacattccttggtcaaattgatatttttaaaatccgaggaaagtttgcttctaccgatgcttatgaggatcattttttacttcctaaggggaagatttttttaatcactcacagaagagtactattgcttcagttaccaatgatgacccagcgtaagttcaatcctacgaaggatccttgttcagtaatatgggatgtattatgggatgatttggtaacagtggagatgacccatgggaaaaaagatcctccagattcctggccttctaagcttattttatacttgaaagctaaaccttcaaattcgaaggaaattgttcgtttggtcaagtgtaatcgaggttcagatcaagcatctatcatttactcggcaattgacaaagcttataaagcttacggtccaaactcgttgaaggaattcttgagatggaaggtaccaaggccatatgcccctcgcaatagtagtggccgaagtatccaagacttatcatttggttaaaaggtattttaggttgacacttttggttaccaggcaaatgatatattctacatatacactataggtatcagaggataggtactttgccttcatgtaaatagatatattttaggaggcgccggtattcatgtaaatgtgaacatctctgttataaagaaaaaaaataataatgcaaattatgcaagattcattgctgctgtcttgttgcaatgtttaatgtgttctcttgcgattgtctaaagacccaaaccgttaacgtgtctttactactatggtttcatttcacagatctctatgatcataccttgctcattaaaagcatttactattcttgtgatggggagatccatgtccgagttttggccaaaccactacagatctggtttccttcggcatatacaatcacattcaatatggattttttgacggaccggttcttcgcgaagagtttatcacttcactactacaccgtgtctcttatagatgtatttatgatcggtttcaggattatgtcatgcagtttattaattgtttttcatttttagaaaactaaactagtgtctcagggttgtacatggcttaagtccctttgaatataataatagtatgcgacaatgcaaagttggtaagatgggagttcaattcatttggtgatgcaaccactactgttagacgcactaacgacatctggtcacccatcggtgatgatccctctaatgtcgctattttcacccttggggtctagacatgaaggctagggtgattgaaaatctatttttg

SEQ ID NO: 41828 - DNA, 1908 bp, Zea Mays
atgctggtgctgtatctgctacgcaaatatttgggtgaatatgttgaagggctttctgttgaagctctcagaataagtgtatggaaaggtgacgttgttctaaaagacttaaaacttaaggctgaagccctgaattctctcgggtttccagtgacagtgaaagctgggtttgttggcaccataacattaaaggtcccatggaagtgccttggtaaagaaccagttattgtcctcattgatcgtctatttgttcttgctcatcctgctcctgatggacagactctcaaggaagaagatagacaaaaactttttgaagccaagcttcagcagattgaggctgcggaggcagctactcttgaagcaacaaataggaactcaagaggagggcctgcaccaggtggaaattcatggttatacaatttaatatctacaattattggtaatcttaaagtcaccatcagtaatgtacacataagatatgaagattctgtcagcaattctgggcacccatttgcgtctggtttcacgttatcaaaacttgcagccgttacagtggatgaggatggtaatgaaacatttgatgcaggtgtagccctagataagctacgaaagtctgttgaactgcataggctgggcatctaccatgactcagacagtaatccttggaagcttaataaaaattgggaagctctaaatcgtaccgaatggagtgagatatttcaagatggcattgaagatggctctcaaagttccatctgggcagtaaatcggaactacttggtctcgcctataaatggaacccttaaatataaacgacttgggaagaatgaaagaggggatccagataccccattggagaaagcctcacttgtcctcagtgatgtttctttaactgtaactgaggcacagtattatgatggcattaaactgttggaagcattttcgaggtttagaacacgtgttgatgtgtctcatttacggcctgttgtgcctgtaaaggaggatcgtcgtgcttggtggcgttatgctgtgctggctggtctgcgacaaaggaaactatgctattggttttcatgggagagaactagacgcctctgccagcttcgacgccgttatgttcaattgtatgccacccttttgcaacaagcagcaaaagttgacatttctgaaattcgagagatagagaaaattctagacatgaaggtcataatactttggaggttgctgggtcatgctaaggttgaaacagtgaaatcaaaggggacactatatagaaaaggggcctcaaagaaaagatggtggccttttgcatggaacacgactggtttaccttctgaggaagctacacacccagaatcacagttagatgaagaggaacaactgactaaagaagagtggcaggctattaataagctgttgagttaccaaccagatgaagatatgtcttttccccttgagaaggtttccccaaatgtgattcaatttatgatggatgtatccattggccaggctggtgcaaggatcatcaatattgatggaactgaggttttatgtggtagatttcatcagcttcaggttgtcactaagttgtatccgaagagcacatgttgtgatgtgacattgaaatattgtggtctatcatctccagaaggttctcttgctcagagtgtcgttagcgagggaaagagtcatgctcttgatgttagttttgtacgagcaccaattggtatggaccttgattggcagctcattgcgaagatatcaccatgccatgttacgctactagcaaaattcaacttgatgactacctgccaggttcagacagctgccttgacttaccaaggaaataagacagctgatgttgcctacttactagaaagggaaactgacctatatgtcacccattag

SEQ ID NO: 41829 - DNA, 3822 bp, Zea Mays
atgctggtgctgtatctgctacgcaaatatttgggtgaatatgttgaagggctttctgttgaagctctcagaataagtgtatggaaaggtgacgttgttctaaaagacttaaaacttaaggctgaagccctgaattctctcgggtttccagtgacagtgaaagctgggtttgttggcaccataacattaaaggtcccatggaagtgccttggtaaagaaccagttattgtcctcattgatcgtctatttgttcttgctcatcctgctcctgatggacagactctcaaggaagaagatagacaaaaactttttgaagccaagcttcagcagattgaggctgcggaggcagctactcttgaagcaacaaataggaactcaagaggagggcctgcaccaggtggaaattcatggttatacaatttaatatctacaattattggtaatcttaaagtcaccatcagtaatgtacacataagatatgaagattctgtcagcaattctgggcacccatttgcgtctggtttcacgttatcaaaacttgcagccgttacagtggatgaggatggtaatgaaacatttgatgcaggtgtagccctagataagctacgaaagtctgttgaactgcataggctgggcatctaccatgactcagacagtaatccttggaagcttaataaaaattgggaagctctaaatcgtaccgaatggagtgagatatttcaagatggcattgaagatggctctcaaagttccatctgggcagtaaatcggaactacttggtctcgcctataaatggaacccttaaatataaacgacttgggaagaatgaaagaggggatccagataccccattggagaaagcctcacttgtcctcagtgatgtttctttaactgtaactgaggcacagtattatgatggcattaaactgttggaagcattttcgaggtttagaacacgtgttgatgtgtctcatttacggcctgttgtgcctgtaaaggaggatcgtcgtgcttggtggcgttatgctgtgctggctggtctgcgacaaaggaaactatgctattggttttcatgggagagaactagacgcctctgccagcttcgacgccgttatgttcaattgtatgccacccttttgcaacaagcagcaaaagttgacatttctgaaattcgagagatagagaaaattctagacatgaaggtcataatactttggaggttgctgggtcatgctaaggttgaaacagtgaaatcaaaggggacactatatagaaaaggggcctcaaagaaaagatggtggccttttgcatggaacacgactggtttaccttctgaggaagctacacacccagaatcacagttagatgaagaggaacaactgactaaagaagagtggcaggctattaataagctgttgagttaccaaccagatgaagatatgtcttttccccttgagaaggtttccccaaatgtgattcaatttatgatggatgtatccattggccaggctggtgcaaggatcatcaatattgatggaactgaggttttatgtggtagatttcatcagcttcaggttgtcactaagttgtatccgaagagcacatgttgtgatgtgacattgaaatattgtggtctatcatctccagaaggttctcttgctcagagtgtcgttagcgagggaaagagtcatgctcttgatgttagttttgtacgagcaccaattggtatggaccttgattggcagctcattgcgaagatatcaccatgccatgttacggttctgaaggagagttatgaacgatttatggagttcattaagcgaagcaacgctgttagtccaacagtaactatggaaacagcaactgctctacagctgaagctggagaaggtcacacgtagggctcaggagcagcttcagctggtgttagaagaacaaagcagatttggacttgatattgatctggatgcaccaaaagttaggattcctttgaatgctaatcaacctttgctgggcaatgagtactttgttcttgattttggccattttacattgcatacaagagatggtaagcatgatgaagaaagacagagtctgtattcaggcttttatattactgggagggatatggctgctttccttatttgtgatttagctcagaacatatactcaatacctgaaaatttagatcaagataccctcctaggtcatacctttgatgataatcagttctgttctcttcttgatcgctgtggaatgtcagtgataattgagcagatcaaagttccacatccgaattatccatcaactcgtgttgcttttcaagtacccaatctggacattcacttttcaccaaaaaggtactgcaagatagttgaactgcttggtgtgcttctccatatgaagggaaacaataatgaatattcaaataaccatgaaagtggtagcttggcgccttggtatcctgctgatctagctggcgatgctagaacattggtttggaggggcattggttattcgcaagctgaatggcatacttgctatgttgtattatctgggatgtatctatatattttggagtcagaattctccgcgaattaccaaaggtgttgtagcatggctagtcgccaagtatttgaagtgccaccaactagtgttggtggatctccttacagtattggtgtgtgttctagaggtggagacacgcataaggcactagaactgaccagcacactggtaattgaatttcgtaatgaaatcgagaaggctatgtggatgaaagcacttgtccaggcaacataccgagcttctgctcctcctgacgtgaacatattaggagatcctgttagccctcccccagaatcaagtacaccacggcttaatagcttgggattagtggatcttgttgtgaatggctctgttattgaaactaaactttcactgtatgggaagctggacagaaagagcagtgattcgcaagagcttctaatgctagagctccttgggaatggagggaaggttaatgttgttcaatcttctcgtggtcttagtgtgaaaacaaaattgcattcattgaaaataatggatgagctacaaggtcgtctttcaatgacttcaaagtatttagtgtgctctgtcatcaatgaaagtgttggagctacctcttccgatacacttgataagggcggcgacctaagcatctttcctgtggatgaggatcctttcatggatgcattaacagattttactccagatcaaaattctaatccagatgactgtcaaattcccaacttcatttctgatgcaaatgagtacaatgaaataggttcaaaagatggttcatgctttgatggggatgaacagaacgcaaaacctactgaaatattttatgaggcacaagatagtaatgtggcagattttgttgttctgacattcttgagcaggagtcctgattcttgtctttatgatggtatagattcacagatgagtattcgtatgtccgcactggaattctactgtaacagacccacacttgttgctctaattgagtttggatttgatcttagcacggttaattctgtgccgaaatgtagtcttgatgtggcacctgcaattgaaactgtgaaacccacagggaaggaagaaggtgctcctactattgtaaaaggattgttaggttatgggaaacgtcgaacaattttcaacatcaaaatggatgtggatagggtatcaatgtttctcaataaggaagatggttctcagcttgcaatgtttgtgcaagagaaatttctgtttgatttgaaggtgagatatttgcaatga

SEQ ID NO: 41830 - DNA, 13333 bp, Zea Mays
atgctggtgctgtatctgctacgcaaatatttgggtgaatatgttgaagggctttctgttgaagctctcagaataagtgtatggaaaggtgacgttgttctaaaagacttaaaacttaaggctgaagccctgaattctctcgggtttccagtgacagtgaaagctgggtttgttggcaccataacattaaaggtcccatggaagtgccttggtaaagaaccagttattgtcctcattgatcgtctatttgttcttgctcatcctgctcctgatggacagactctcaaggaagaagatagacaaaaactttttgaagccaagcttcagcagattgaggctgcggaggcagctactcttgaagcaacaaataggaactcaagaggagggcctgcaccaggtggaaattcatggttatacaatttaatatctacaattattggtaatcttaaagtcaccatcagtaatgtacacataagatatgaagattctgtcagcaattctgggcacccatttgcgtctggtttcacgttatcaaaacttgcagccgttacagtggatgaggatggtaatgaaacatttgatgcaggtgtagccctagataagctacgaaagtctgttgaactgcataggctgggcatctaccatgactcagacagtaatccttggaagcttaataaaaattgggaagctctaaatcgtaccgaatggagtgagatatttcaagatggcattgaagatggctctcaaagttccatctgggcagtaaatcggaactacttggtctcgcctataaatggaacccttaaatataaacgacttgggaagaatgaaagaggggatccagataccccattggagaaagcctcacttgtcctcagtgatgtttctttaactgtaactgaggcacagtattatgatggcattaaactgttggaagcattttcgaggtttagaacacgtgttgatgtgtctcatttacggcctgttgtgcctgtaaaggaggatcgtcgtgcttggtggcgttatgctgtgctggctggtctgcgacaaaggaaactatgctattggttttcatgggagagaactagacgcctctgccagcttcgacgccgttatgttcaattgtatgccacccttttgcaacaagcagcaaaagttgacatttctgaaattcgagagatagagaaaattctagacatgaaggtcataatactttggaggttgctgggtcatgctaaggttgaaacagtgaaatcaaaggggacactatatagaaaaggggcctcaaagaaaagatggtggccttttgcatggaacacgactggtttaccttctgaggaagctacacacccagaatcacagttagatgaagaggaacaactgactaaagaagagtggcaggctattaataagctgttgagttaccaaccagatgaagatatgtcttttccccttgagaaggtttccccaaatgtgattcaatttatgatggatgtatccattggccaggctggtgcaaggatcatcaatattgatggaactgaggttttatgtggtagatttcatcagcttcaggttgtcactaagttgtatccgaagagcacatgttgtgatgtgacattgaaatattgtggtctatcatctccagaaggttctcttgctcagagtgtcgttagcgagggaaagagtcatgctcttgatgttagttttgtacgagcaccaattggtatggaccttgattggcagctcattgcgaagatatcaccatgccatgttacggttctgaaggagagttatgaacgatttatggagttcattaagcgaagcaacgctgttagtccaacagtaactatggaaacagcaactgctctacagctgaagctggagaaggtcacacgtagggctcaggagcagcttcagctggtgttagaagaacaaagcagatttggacttgatattgatctggatgcaccaaaagttaggattcctttgaatgctaatcaacctttgctgggcaatgagtactttgttcttgattttggccattttacattgcatacaagagatggtaagcatgatgaagaaagacagagtctgtattcaggcttttatattactgggagggatatggctgctttccttatttgtgatttagctcagaacatatactcaatacctgaaaatttagatcaagataccctcctaggtcatacctttgatgataatcagttctgttctcttcttgatcgctgtggaatgtcagtgataattgagcagatcaaagttccacatccgaattatccatcaactcgtgttgcttttcaagtacccaatctggacattcacttttcaccaaaaaggtactgcaagatagttgaactgcttggtgtgcttctccatatgaagggaaacaataatgaatattcaaataaccatgaaagtggtagcttggcgccttggtatcctgctgatctagctggcgatgctagaacattggtttggaggggcattggttattcgcaagctgaatggcatacttgctatgttgtattatctgggatgtatctatatattttggagtcagaattctccgcgaattaccaaagcatggctagtcgccaagtatttgaagtgccaccaactagtgttggtggatctccttacagtattggtgtgtgttctagaggtggagacacgcataaggcactagaactgaccagcacactggtaattgaatttcgtaatgaaatcgagaaggctatgtggatgaaagcacttgtccaggcaacataccgagcttctgctcctcctgacgtgaacatattaggagatcctgttagccctcccccagaatcaagtacaccacggcttaatagcttgggattagtggatcttgttgtgaatggctctgttattgaaactaaactttcactgtatgggaagctggacagaaagagcagtgattcgcaagagcttctaatgctagagctccttgggaatggagggaaggttaatgttgttcaatcttctcgtggtcttagtgtgaaaacaaaattgcattcattgaaaataatggatgagctacaaggtcgtctttcaatgacttcaaagtatttagtgtgctctgtcatcaatgaaagtgttggagctacctcttccgatacacttgataagggcggcgacctaagcatctttcctgtggatgaggatcctttcatggatgcattaacagattttactccagatcaaaattctaatccagatgactgtcaaattcccaacttcatttctgatgcaaatgagtacaatgaaataggttcaaaagatggttcatgctttgatggggatgaacagaacgcaaaacctactgaaatattttatgaggcacaagatagtaatgtggcagattttgttgttctgacattcttgagcaggagtcctgattcttgtctttatgatggtatagattcacagatgagtattcgtatgtccgcactggaattctactgtaacagacccacacttgttgctctaattgagtttggatttgatcttagcacggttaattctgtgccgaaatgtagtcttgatgtggcacctgcaattgaaactgtgaaacccacagggaaggaagaaggtgctcctactattgtaaaaggattgttaggttatgggaaacgtcgaacaattttcaacatcaaaatggatgtggatagggtatcaatgtttctcaataaggaagatggttctcagcttgcaatgtttgtgcaagagaaatttctgtttgatttgaaggttcatccaagttctttttcaattgatggtatgctggggaatatgagattttgtgacatgtcccttggtccagaacatcgttggggttggctttgcgatatacggaagcctggtgtcgagtcactcataaagttcacattccagtcgtacagtatcgatgatgaagattttgaaggtcataattacagcttgactggtcagctttctgctgttcgtattgtctttctctaccgttttatccaagagtttacttcttactttatggagcttggcacccctcatactgaagaggcaattaagtttattgataaagttggaggttttgagtggttaattcagaaatatgaaatggatggagcttctgctataaagctggatctttcccttgagacacccataatcattgttcctaagaattctcagagcgaagattatatacagtttgatcttggtcaattgaaagtaaggaatgagtttagttggcatggaggtaaagagactgacccttctgctgtaaggcttgatgttctccatgcagaaataaatggaatcaacatggcggttggggtaaatggaactctgggaaagtgtatgattcgtgatggtcgcggcatcaatatagaggtgcgacgtagcctacgggatgtcttcaaaaaggtcccgatactgtctatgaaatttcagataggattgcttcatggtgtcatgtcagataaagaatacaatgtcgcgataagctgtatttcgacaaatctgtccgatacacctaaccttcccccaagttttcgtgaaaatatgaacaggacaaaggagtcaattcgtttacttgcagataaagtcaaccttagcaaccatttgttgctttcacgtaccgttgttgtcatgaccgtggaaattcagtatgcgttgcttgaacttcgcaatggcccagatgcagagtcacctctggcagagcttgctgtggaaggtctatgggtatcctatagaacaacttcaatgcttgaaatggatctatatttgtcaatattgaaattttcaatacatgatatccgtccagatacgaagtctgagatgcgtctgatgcttggatcttgttcagagactgctaatctgtgcgttgatgactcttcaactgatgcaggggtttcgaacctcacaatgctgatactggattatcgttcgcgttcttcttttcaatcatttgttataagaatacagcagcctcgtatacttgttgtcctggattttctgcttcctgttgttgagtattttgtgccttctttaggctcgataactggcagagaggaaagcttagacccgaagaatgatcctcttatgagggctgatgatattatacttactgagcatgttttcttgcaaaaagaggattttattcaactatctcctgtaaggcagctaatagttgatggttgtgatattgacgagttcatttatgatggctgtgggggcactgtatccttatgtgaggaatttgataagaaaggacaggtatactctgggattataatcataattggttgtggcaaaagacttcgattcaaaaatgtcaaaattgagaatggtgcactgcttagaagatgtgtatacttgaacatgggaagcagttactcaatttcttctgaagatgatgtagaggtttctgtgttagaaagttctttcacgaatgatgaagactgtttaaaccttgaagaacataaaaagagaaatctgcagaatgccattgatggtcccacaaaccaaatactgaactttacatttgaggctcaggttgtatctccagaatttacattctatgacagttcaaagttatcaatggatgattcgttgcacattgagaagcttcttcgggccaagatggatttcagtttcatgtatgcttcaaaagaaaaagatatatgggctcgatctgtcattaaagaccttacaattgaagctggttctggtcttcttgttcttgaacctgtagatgtttcatggaaatatacttcagtcaatgaaaagacaaacatagtgttggtgtcgacagatgtttgcatccatctttctctgagtgttgcttctcttatgcttaaactgcaaaaccaaactcttgcagcattgcagtttggtaatattagcccactaatttcttgcacaaactttaagcgaatttggagctcaccaaaaggtgacctacctggttacaacctaacgttctggcggccacaagctccctccaattatgtcatattgggtgattgtgtgtcctcaaggtctgtgccaccttctcaggttgtggttgctataagtaatacttatggtcgtgtacgaaaacctcttggatttaggctaattcatgtattacctggttctctggatctcattgattcctgtcaatcaactgaagaaaacgaatgttctatctggattcctgtaccaccacctggatatttagctctaggatgtgtggtaaatattggaaggttaccaccttcaaaccatgtagtgtattgccttcgttctgatcttgcgacttctgcgacattttcagattgtatacacactctctcacctgctgctggaataatctctgaatttagcatctggcgtgtggacaatgtgattgcttcattctgtgcacataattctatagagcaacccactaaaacagaagctcttaatttgcaccatgttctcctccggaatccaaattgctatattgttaaagatctaagtgcagattcatctatccagaatgaccaatcttctgatcaattaaatcaccgcaagagtctttctggatgggatgtacttcgcactttgtcaagaccaagtaactattgtatgtctactccccattttgaaaggatatggtgggataaaggaaacgataccaagaagccattttctatatggagaccgttacctcgttttggttttgcttcggttggtgactgtataactgaagggtaacaatttcattatgtacacatacaaatgctaaatactgttctttgtgatatgtttttacttggccctttgcatatttcaggtttgaaccacccactcttggcattcttttcaagtgtgacacagttgtttctgagaagcctgtacagtttactaaagtgacacaaattgacagaaaaggccttgaggaaatattcttctggtatccagtgccacctcccggttacgcttctcttggatgtatcgtaacaaaaacagatgaaatgccaagcaaggattccatttgctgccctaaactgagtctagtgagccaagcgaatatgtcagaggatcctatctccatgtcttctagctcaaaaggtccttgctgctggagcatctggaaagttgaaaatcagggctgtactttcctggccagaccagatgtcaagaagccctcagctcaactggcataccgtattgctgaccatgcgaagccgaaggcacgtgaaaacattactgctgagctgaagctgggttgtttgtcggttggcattcttgacagctcttgtggaatggtcacaccactttttgacacaacaatcgctaatataaatcttgcaacacatggaagatttgagacattgaatgctgtattgatctgttcaattgctgcatccacattcaatagacacttggaggcatgggaaccctttgttgagccatttgatggaatattcaagtttgaaacatatgataccagtgaacaccctccttccaaagttggtaagaggattcgtgttgctgcaacaagtcctctaaatgctaacctgagctctgcaaatcttgagctgcttatagaaacgttagtttcatggagaagacagattgatcttgaaaataaatcgtcaacaaaaagcgagggtaccattgaaaacatgaaaaaagctgatgattcttcgtactctgcattgaatgaagatgatttccagagagtggtttttgagaataaattaggatgtgatgtttatcttaaaaaaaaaatggaagatagtgaaatcactattgagcttttacagcatgagagcaaagtttcgttgttgcttccgcctcccaggttttcagataaactaaatgtgttatccaattcaacagaatcaagatactatgttgttgtacagatctttgagtctaagggcttgcctatcatagatgacggcaatggtcacagctacttctgtgctttacgcttacttattggaagccatgcttctgatcagcacaaagtgttcccacagagtgccaggacgagatgtgtaaaacctgtggaaactactgagttactgacccactgtgccaagtggaatgaacattttatatttgaagttccagaacaggcatcagctaatttagagattgaagtaacaaatcttgcatcaaaagctgggaaaggtgaagtaattggttctctgtctatgcctattggacgaggagcaaccatgttgaaacgagctccttctatgaggatgattcagcatgtttctgatgtcaaacgggtgctaacatgtcctcttacaaagaagggtcagatacctaattttgaggacaggaaaaaaggtggtgttttagtactctcaagctgttatgtggaacgttctactcattcatatttccagaggttgaaagacagtataaacaatgtggagagcgacttctgtataggacttagcccagatggtccatgggaaagttttactgcagctttgccagtgaccgtccttccaaaatcgcttaataataaccgttttgcatttgaggtcactatgaggaatggaaagaaacatgcaaccttgagaggtcttgcagttattgccaatgatgctgacataaaacttgaagtgtctatatgtcctgtaaacatgcttgataactctatgttaaatactagattggcaagctccaccagtgttattgatgaagtatttgaaaatcagtggtaccgaccaattgcagggtggggacataacccttcaattggtcacagaaaagacttaaagcagtggagcacaaaggactgctcatactcatctaaggcattttttgagcctggccttccatctggttggaggtggacctcaccgtggaaaattgaaaggttgaattttgtagataatgatggatgggcatatgctgcagattttcaaaacttgaattggccatcatcatcctggagatcttctaaatcaccacacgacttcgtgagaagaaggcgttgggtacgttctagacagcagtcgcaagaacaaagtgcagaaattcctagaaaagtacttgctactgtcagtcctcattcatctactgcgttgccttggacatcgatgattagggatatggatttatgcttgcaagttcgcccatattctgaaaaatcagaggaatcatatagctggagccagatttgttcactaggttctgagagtatacctaaacagcagcactcttcactttctaggcaaagcaccgtaaagcagtcagtggtatcatcaaggaattctgttcttaagcttgctgaactcgagaaaaaagatgtgctctcatattgccatcctcctgttagcactgaaagatatttctggtttagtgttggaattgatgcttctgttgttcatacagatttgaatgtacctgtctatgactggagaatttctttcaattcaattcttagacttgaaaataaacttccctatgaagctgagtatgctatatgggagatttccactaaaagtaatatggttgaaaagcagcatggtattgtcccttcgggtggaagtgtatttatctattcagcagatatacggaaaccaatttatcttacattgtttctccaaaacggttggattctagaaaaggatgctgtattgataatggacttgttgtccttggaacatgtttcttcgttctggatggttcagaagcagagccagaggagactacgagttagtgttgagcatgacctaggtgctagtgatgctgcaccaaagacactgagattgtttgtcccttactggataaaaaaccactcgtcaattccattatgttatcgcatagtagaaggggaatccacagaaagcacagaagcagactcacttagcagaccagactcgctaagtagagtgtctaagtcttcaaaattttcccttaaatattcttcaaagtctcttgtcagaagaggaacaatgtcgcacagaaatatgcaagtactggaagatattgaagattgtagcacagactatgtgatgctatcaccacaagattacttgaaccgatctgctggtatgcgctctgagtcaagggataacaatttcagtccagctcgagttgcaatatctatggctgttggtggttgcacacagtacagcgtaggagtatcgctttttgagcttgagaacaaggagcatgttgatatcaaaacatttgcttctgatgggtcatattactggttctcagttcaattgaagatggcttcagataggacaaaggtggtaaatttactgccgagagcacttcttatcaatagaattggaagaactatttttctatctgaatatcatgatgagactgaagagcccttacaaccatatgaacctccaaaagtatttcaatggcgatcagaatttggaagtgaacttttaaagttgaggttggagggataccaatggagtacaccttttagtatcaatgctaatggagttatgtgtgtgctcatgaacagcacaacaggaaatgatcaggcttttgtcagggtaaatgtgagaagtggaacaaaaagttcacggcatgaagttgtatttcagcttgattgctggtccagcccatacagggtggagaatcgctccatgttcttgcctatacggtttcggcagtttggtggtgatgatcattcatggcgtaatctgcttccgaattcatcagcttccttctttttggaggacctgagcagaaggcatctattggaagttttggttgatggaactgaccctatgaactccatgacatatgacatcaatgtcgtaatggatcatcagccccttactaattcagatgcccttaagaaggccttacgtgtcactgtcttgaaggaggggaaattgaatgttattcaaattattgattggctgccagataatagaaatcgaggacagataactgaaaggatgttatcaccaatctttcagccatcagaggtcgactatgggcagtcatctcctgatctggatagtgaatttcatgttactttggaactaacggagcttggcatttctgtaattgaccatatgcctgaggaagttctttacctctcagtgcagcaactgttacttgcatactcatctggaattggctctggagtaaatcggctcaaaatgcggatgcattggattcaagttgataatcaattaccatttgttcctatgcctgtacttttctgtcctcaaaagattgaaaatcagtcagactatattttcaagttctctatgacagttcagaccaacaattctcttgatttttgtgtctatccttatgtcggtgtccaggttcctgagaattgtgtgttctttgttaacatccatgaaccaatcatttggcgcctccatgagatgattcaacacctaaaattcgataggatatatagcaatcaaccttcagctgtttcagtggaccccatactgaaaattgggcttctgaacatctccgagatccgatttagagtgtcaatggcaatgtccccaagccaaaggccaaggggagtatttgggttctggtcgtcgttgatgactgcattgggaaacatggagcatatgccggtccgtatagctcaaagataccgggaggaattgtgcatgcggcaaagtgcacttatgaactctgctatatctaacattcaaaaggatcttcttagccaacctcttcagctactttccggtgttgatattcttggtaatgcgagtagcgctctgagtaacatgagcaaggggatagctgcattgtctatggacaagaaattcattcagggccggatgagacaggatagcaaaggtgtggaagactttggggatgtcataagagatggaggtggtgctcttgcaaaaggcatcttcagaggtgtcacaggcatattgacaaagcccatcgagggtgcaaaatcttctggtgttgaaggttttgtgcaaggagttggaaagggtataattggcgcagctgcacaaccagttagcggagttcttgatcttttatcaaaaactactgaaggtgccaatgcggtaaaaatgaaaatatcatcagcgataatggctgaggagcagttgctgcgtaggcgtcttcctcgagctattggtgggaatagtttgctctatccttatgacggacacaaagctactggccaggctatcttgcatctagctgaatgtgctacattccttggtcaaattgatatttttaaaatccgaggaaagtttgcttctaccgatgcttatgaggatcattttttacttcctaaggggaagatttttttaatcactcacagaagagtactattgcttcagttaccaatgatgacccagcgtaagttcaatcctacgaaggatccttgttcagtaatatgggatgtattatgggatgatttggtaacagtggagatgacccatgggaaaaaagatcctccagattcctggccttctaagcttattttatacttgaaagctaaaccttcaaattcgaaggaaattgttcgtttggtcaagtgtaatcgaggttcagatcaagcatctatcatttactcggcaattgacaaagcttataaagcttacggtccaaactcgttgaaggaattcttgagatggaaggtaccaaggccatatgcccctcgcaatagtagtggccgaagtatccaagacttatcatttggttaaaaggtcaacacaaatgcacactttagtgttaaacacagtagaatcttaggatgaaggtattttaggttgacacttttggttaccaggcaaatgatatattctacatatacactataggtatcagaggatagatctctatgatcataccttgctcattaaaagcatttactattcttgtgatggggagatccatgtccgagttttggccaaaccactacagatctggtttccttcggcatatacaatcacattcaatatggattttttgacggaccggttcttcgcgaagagtttatcacttcactactacaccgtgtctcttatagatgtatttatgatcggtttcaggattatgtcatgcagtttattaattgtttttcatttttagaaaactaaactagtgtctcagggttgtacatggcttaagtccctttgaatataataatagtatgcgacaatgcaaagttggtaagatgggagttcaattcatttggtgatgcaaccactactgttagacgcactaacgacatctggtcacccatcggtgatgatccctctaatgtcgctattttcacccttggggtctagacatgaaggctagggtgattgaaaatctatttttg

SEQ ID NO: 41831 - DNA, 13236 bp, Zea Mays
atgctggtgctgtatctgctacgcaaatatttgggtgaatatgttgaagggctttctgttgaagctctcagaataagtgtatggaaaggtgacgttgttctaaaagacttaaaacttaaggctgaagccctgaattctctcgggtttccagtgacagtgaaagctgggtttgttggcaccataacattaaaggtcccatggaagtgccttggtaaagaaccagttattgtcctcattgatcgtctatttgttcttgctcatcctgctcctgatggacagactctcaaggaagaagatagacaaaaactttttgaagccaagcttcagcagattgaggctgcggaggcagctactcttgaagcaacaaataggaactcaagaggagggcctgcaccaggtggaaattcatggttatacaatttaatatctacaattattggtaatcttaaagtcaccatcagtaatgtacacataagatatgaagattctgtcagcaattctgggcacccatttgcgtctggtttcacgttatcaaaacttgcagccgttacagtggatgaggatggtaatgaaacatttgatgcaggtgtagccctagataagctacgaaagtctgttgaactgcataggctgggcatctaccatgactcagacagtaatccttggaagcttaataaaaattgggaagctctaaatcgtaccgaatggagtgagatatttcaagatggcattgaagatggctctcaaagttccatctgggcagtaaatcggaactacttggtctcgcctataaatggaacccttaaatataaacgacttgggaagaatgaaagaggggatccagataccccattggagaaagcctcacttgtcctcagtgatgtttctttaactgtaactgaggcacagtattatgatggcattaaactgttggaagcattttcgaggtttagaacacgtgttgatgtgtctcatttacggcctgttgtgcctgtaaaggaggatcgtcgtgcttggtggcgttatgctgtgctggctggtctgcgacaaaggaaactatgctattggttttcatgggagagaactagacgcctctgccagcttcgacgccgttatgttcaattgtatgccacccttttgcaacaagcagcaaaagttgacatttctgaaattcgagagatagagaaaattctagacatgaaggtcataatactttggaggttgctgggtcatgctaaggttgaaacagtgaaatcaaaggggacactatatagaaaaggggcctcaaagaaaagatggtggccttttgcatggaacacgactggtttaccttctgaggaagctacacacccagaatcacagttagatgaagaggaacaactgactaaagaagagtggcaggctattaataagctgttgagttaccaaccagatgaagatatgtcttttccccttgagaaggtttccccaaatgtgattcaatttatgatggatgtatccattggccaggctggtgcaaggatcatcaatattgatggaactgaggttttatgtggtagatttcatcagcttcaggttgtcactaagttgtatccgaagagcacatgttgtgatgtgacattgaaatattgtggtctatcatctccagaaggttctcttgctcagagtgtcgttagcgagggaaagagtcatgctcttgatgttagttttgtacgagcaccaattggtatggaccttgattggcagctcattgcgaagatatcaccatgccatgttacggttctgaaggagagttatgaacgatttatggagttcattaagcgaagcaacgctgttagtccaacagtaactatggaaacagcaactgctctacagctgaagctggagaaggtcacacgtagggctcaggagcagcttcagctggtgttagaagaacaaagcagatttggacttgatattgatctggatgcaccaaaagttaggattcctttgaatgctaatcaacctttgctgggcaatgagtactttgttcttgattttggccattttacattgcatacaagagatggtaagcatgatgaagaaagacagagtctgtattcaggcttttatattactgggagggatatggctgctttccttatttgtgatttagctcagaacatatactcaatacctgaaaatttagatcaagataccctcctaggtcatacctttgatgataatcagttctgttctcttcttgatcgctgtggaatgtcagtgataattgagcagatcaaagttccacatccgaattatccatcaactcgtgttgcttttcaagtacccaatctggacattcacttttcaccaaaaaggtactgcaagatagttgaactgcttggtgtgcttctccatatgaagggaaacaataatgaatattcaaataaccatgaaagtggtagcttggcgccttggtatcctgctgatctagctggcgatgctagaacattggtttggaggggcattggttattcgcaagctgaatggcatacttgctatgttgtattatctgggatgtatctatatattttggagtcagaattctccgcgaattaccaaagcatggctagtcgccaagtatttgaagtgccaccaactagtgttggtggatctccttacagtattggtgtgtgttctagaggtggagacacgcataaggcactagaactgaccagcacactggtaattgaatttcgtaatgaaatcgagaaggctatgtggatgaaagcacttgtccaggcaacataccgagcttctgctcctcctgacgtgaacatattaggagatcctgttagccctcccccagaatcaagtacaccacggcttaatagcttgggattagtggatcttgttgtgaatggctctgttattgaaactaaactttcactgtatgggaagctggacagaaagagcagtgattcgcaagagcttctaatgctagagctccttgggaatggagggaaggttaatgttgttcaatcttctcgtggtcttagtgtgaaaacaaaattgcattcattgaaaataatggatgagctacaaggtcgtctttcaatgacttcaaagtatttagtgtgctctgtcatcaatgaaagtgttggagctacctcttccgatacacttgataagggcggcgacctaagcatctttcctgtggatgaggatcctttcatggatgcattaacagattttactccagatcaaaattctaatccagatgactgtcaaattcccaacttcatttctgatgcaaatgagtacaatgaaataggttcaaaagatggttcatgctttgatggggatgaacagaacgcaaaacctactgaaatattttatgaggcacaagatagtaatgtggcagattttgttgttctgacattcttgagcaggagtcctgattcttgtctttatgatggtatagattcacagatgagtattcgtatgtccgcactggaattctactgtaacagacccacacttgttgctctaattgagtttggatttgatcttagcacggttaattctgtgccgaaatgtagtcttgatgtggcacctgcaattgaaactgtgaaacccacagggaaggaagaaggtgctcctactattgtaaaaggattgttaggttatgggaaacgtcgaacaattttcaacatcaaaatggatgtggatagggtatcaatgtttctcaataaggaagatggttctcagcttgcaatgtttgtgcaagagaaatttctgtttgatttgaaggttcatccaagttctttttcaattgatggtatgctggggaatatgagattttgtgacatgtcccttggtccagaacatcgttggggttggctttgcgatatacggaagcctggtgtcgagtcactcataaagttcacattccagtcgtacagtatcgatgatgaagattttgaaggtcataattacagcttgactggtcagctttctgctgttcgtattgtctttctctaccgttttatccaagagtttacttcttactttatggagcttggcacccctcatactgaagaggcaattaagtttattgataaagttggaggttttgagtggttaattcagaaatatgaaatggatggagcttctgctataaagctggatctttcccttgagacacccataatcattgttcctaagaattctcagagcgaagattatatacagtttgatcttggtcaattgaaagtaaggaatgagtttagttggcatggaggtaaagagactgacccttctgctgtaaggcttgatgttctccatgcagaaataaatggaatcaacatggcggttggggtaaatggaactctgggaaagtgtatgattcgtgatggtcgcggcatcaatatagaggtgcgacgtagcctacgggatgtcttcaaaaaggtcccgatactgtctatgaaatttcagataggattgcttcatggtgtcatgtcagataaagaatacaatgtcgcgataagctgtatttcgacaaatctgtccgatacacctaaccttcccccaagttttcgtgaaaatatgaacaggacaaaggagtcaattcgtttacttgcagataaagtcaaccttagcaaccatttgttgctttcacgtaccgttgttgtcatgaccgtggaaattcagtatgcgttgcttgaacttcgcaatggcccagatgcagagtcacctctggcagagcttgctgtggaaggtctatgggtatcctatagaacaacttcaatgcttgaaatggatctatatttgtcaatattgaaattttcaatacatgatatccgtccagatacgaagtctgagatgcgtctgatgcttggatcttgttcagagactgctaatctgtgcgttgatgactcttcaactgatgcaggggtttcgaacctcacaatgctgatactggattatcgttcgcgttcttcttttcaatcatttgttataagaatacagcagcctcgtatacttgttgtcctggattttctgcttcctgttgttgagtattttgtgccttctttaggctcgataactggcagagaggaaagcttagacccgaagaatgatcctcttatgagggctgatgatattatacttactgagcatgttttcttgcaaaaagaggattttattcaactatctcctgtaaggcagctaatagttgatggttgtgatattgacgagttcatttatgatggctgtgggggcactgtatccttatgtgaggaatttgataagaaaggacaggtatactctgggattataatcataattggttgtggcaaaagacttcgattcaaaaatgtcaaaattgagaatggtgcactgcttagaagatgtgtatacttgaacatgggaagcagttactcaatttcttctgaagatgatgtagaggtttctgtgttagaaagttctttcacgaatgatgaagactgtttaaaccttgaagaacataaaaagagaaatctgcagaatgccattgatggtcccacaaaccaaatactgaactttacatttgaggctcaggttgtatctccagaatttacattctatgacagttcaaagttatcaatggatgattcgttgcacattgagaagcttcttcgggccaagatggatttcagtttcatgtatgcttcaaaagaaaaagatatatgggctcgatctgtcattaaagaccttacaattgaagctggttctggtcttcttgttcttgaacctgtagatgtttcatggaaatatacttcagtcaatgaaaagacaaacatagtgttggtgtcgacagatgtttgcatccatctttctctgagtgttgcttctcttatgcttaaactgcaaaaccaaactcttgcagcattgcagtttggtaatattagcccactaatttcttgcacaaactttaagcgaatttggagctcaccaaaaggtgacctacctggttacaacctaacgttctggcggccacaagctccctccaattatgtcatattgggtgattgtgtgtcctcaaggtctgtgccaccttctcaggttgtggttgctataagtaatacttatggtcgtgtacgaaaacctcttggatttaggctaattcatgtattacctggttctctggatctcattgattcctgtcaatcaactgaagaaaacgaatgttctatctggattcctgtaccaccacctggatatttagctctaggatgtgtggtaaatattggaaggttaccaccttcaaaccatgtagtgtattgccttcgttctgatcttgcgacttctgcgacattttcagattgtatacacactctctcacctgctgctggaataatctctgaatttagcatctggcgtgtggacaatgtgattgcttcattctgtgcacataattctatagagcaacccactaaaacagaagctcttaatttgcaccatgttctcctccggaatccaaattgctatattgttaaagatctaagtgcagattcatctatccagaatgaccaatcttctgatcaattaaatcaccgcaagagtctttctggatgggatgtacttcgcactttgtcaagaccaagtaactattgtatgtctactccccattttgaaaggatatggtgggataaaggaaacgataccaagaagccattttctatatggagaccgttacctcgttttggttttgcttcggttggtgactgtataactgaagggtttgaaccacccactcttggcattcttttcaagtgtgacacagttgtttctgagaagcctgtacagtttactaaagtgacacaaattgacagaaaaggccttgaggaaatattcttctggtatccagtgccacctcccggttacgcttctcttggatgtatcgtaacaaaaacagatgaaatgccaagcaaggattccatttgctgccctaaactgagtctagtgagccaagcgaatatgtcagaggatcctatctccatgtcttctagctcaaaaggtccttgctgctggagcatctggaaagttgaaaatcagggctgtactttcctggccagaccagatgtcaagaagccctcagctcaactggcataccgtattgctgaccatgcgaagccgaaggcacgtgaaaacattactgctgagctgaagctgggttgtttgtcggttggcattcttgacagctcttgtggaatggtcacaccactttttgacacaacaatcgctaatataaatcttgcaacacatggaagatttgagacattgaatgctgtattgatctgttcaattgctgcatccacattcaatagacacttggaggcatgggaaccctttgttgagccatttgatggaatattcaagtttgaaacatatgataccagtgaacaccctccttccaaagttggtaagaggattcgtgttgctgcaacaagtcctctaaatgctaacctgagctctgcaaatcttgagctgcttatagaaacgttagtttcatggagaagacagattgatcttgaaaataaatcgtcaacaaaaagcgagggtaccattgaaaacatgaaaaaagctgatgattcttcgtactctgcattgaatgaagatgatttccagagagtggtttttgagaataaattaggatgtgatgtttatcttaaaaaaaaaatggaagatagtgaaatcactattgagcttttacagcatgagagcaaagtttcgttgttgcttccgcctcccaggttttcagataaactaaatgtgttatccaattcaacagaatcaagatactatgttgttgtacagatctttgagtctaagggcttgcctatcatagatgacggcaatggtcacagctacttctgtgctttacgcttacttattggaagccatgcttctgatcagcacaaagtgttcccacagagtgccaggacgagatgtgtaaaacctgtggaaactactgagttactgacccactgtgccaagtggaatgaacattttatatttgaagttccagaacaggcatcagctaatttagagattgaagtaacaaatcttgcatcaaaagctgggaaaggtgaagtaattggttctctgtctatgcctattggacgaggagcaaccatgttgaaacgagctccttctatgaggatgattcagcatgtttctgatgtcaaacgggtgctaacatgtcctcttacaaagaagggtcagatacctaattttgaggacaggaaaaaaggtggtgttttagtactctcaagctgttatgtggaacgttctactcattcatatttccagaggttgaaagacagtataaacaatgtggagagcgacttctgtataggacttagcccagatggtccatgggaaagttttactgcagctttgccagtgaccgtccttccaaaatcgcttaataataaccgttttgcatttgaggtcactatgaggaatggaaagaaacatgcaaccttgagaggtcttgcagttattgccaatgatgctgacataaaacttgaagtgtctatatgtcctgtaaacatgcttgataactctatgttaaatactagattggcaagctccaccagtgttattgatgaagtatttgaaaatcagtggtaccgaccaattgcagggtggggacataacccttcaattggtcacagaaaagacttaaagcagtggagcacaaaggactgctcatactcatctaaggcattttttgagcctggccttccatctggttggaggtggacctcaccgtggaaaattgaaaggttgaattttgtagataatgatggatgggcatatgctgcagattttcaaaacttgaattggccatcatcatcctggagatcttctaaatcaccacacgacttcgtgagaagaaggcgttgggtacgttctagacagcagtcgcaagaacaaagtgcagaaattcctagaaaagtacttgctactgtcagtcctcattcatctactgcgttgccttggacatcgatgattagggatatggatttatgcttgcaagttcgcccatattctgaaaaatcagaggaatcatatagctggagccagatttgttcactaggttctgagagtatacctaaacagcagcactcttcactttctaggcaaagcaccgtaaagcagtcagtggtatcatcaaggaattctgttcttaagcttgctgaactcgagaaaaaagatgtgctctcatattgccatcctcctgttagcactgaaagatatttctggtttagtgttggaattgatgcttctgttgttcatacagatttgaatgtacctgtctatgactggagaatttctttcaattcaattcttagacttgaaaataaacttccctatgaagctgagtatgctatatgggagatttccactaaaagtaatatggttgaaaagcagcatggtattgtcccttcgggtggaagtgtatttatctattcagcagatatacggaaaccaatttatcttacattgtttctccaaaacggttggattctagaaaaggatgctgtattgataatggacttgttgtccttggaacatgtttcttcgttctggatggttcagaagcagagccagaggagactacgagttagtgttgagcatgacctaggtgctagtgatgctgcaccaaagacactgagattgtttgtcccttactggataaaaaaccactcgtcaattccattatgttatcgcatagtagaaggggaatccacagaaagcacagaagcagactcacttagcagaccagactcgctaagtagagtgtctaagtcttcaaaattttcccttaaatattcttcaaagtctcttgtcagaagaggaacaatgtcgcacagaaatatgcaagtactggaagatattgaagattgtagcacagactatgtgatgctatcaccacaagattacttgaaccgatctgctggtatgcgctctgagtcaagggataacaatttcagtccagctcgagttgcaatatctatggctgttggtggttgcacacagtacagcgtaggagtatcgctttttgagcttgagaacaaggagcatgttgatatcaaaacatttgcttctgatgggtcatattactggttctcagttcaattgaagatggcttcagataggacaaaggtggtaaatttactgccgagagcacttcttatcaatagaattggaagaactatttttctatctgaatatcatgatgagactgaagagcccttacaaccatatgaacctccaaaagtatttcaatggcgatcagaatttggaagtgaacttttaaagttgaggttggagggataccaatggagtacaccttttagtatcaatgctaatggagttatgtgtgtgctcatgaacagcacaacaggaaatgatcaggcttttgtcagggtaaatgtgagaagtggaacaaaaagttcacggcatgaagttgtatttcagcttgattgctggtccagcccatacagggtggagaatcgctccatgttcttgcctatacggtttcggcagtttggtggtgatgatcattcatggcgtaatctgcttccgaattcatcagcttccttctttttggaggacctgagcagaaggcatctattggaagttttggttgatggaactgaccctatgaactccatgacatatgacatcaatgtcgtaatggatcatcagccccttactaattcagatgcccttaagaaggccttacgtgtcactgtcttgaaggaggggaaattgaatgttattcaaattattgattggctgccagataatagaaatcgaggacagataactgaaaggatgttatcaccaatctttcagccatcagaggtcgactatgggcagtcatctcctgatctggatagtgaatttcatgttactttggaactaacggagcttggcatttctgtaattgaccatatgcctgaggaagttctttacctctcagtgcagcaactgttacttgcatactcatctggaattggctctggagtaaatcggctcaaaatgcggatgcattggattcaagttgataatcaattaccatttgttcctatgcctgtacttttctgtcctcaaaagattgaaaatcagtcagactatattttcaagttctctatgacagttcagaccaacaattctcttgatttttgtgtctatccttatgtcggtgtccaggttcctgagaattgtgtgttctttgttaacatccatgaaccaatcatttggcgcctccatgagatgattcaacacctaaaattcgataggatatatagcaatcaaccttcagctgtttcagtggaccccatactgaaaattgggcttctgaacatctccgagatccgatttagagtgtcaatggcaatgtccccaagccaaaggccaaggggagtatttgggttctggtcgtcgttgatgactgcattgggaaacatggagcatatgccggtccgtatagctcaaagataccgggaggaattgtgcatgcggcaaagtgcacttatgaactctgctatatctaacattcaaaaggatcttcttagccaacctcttcagctactttccggtgttgatattcttggtaatgcgagtagcgctctgagtaacatgagcaaggggatagctgcattgtctatggacaagaaattcattcagggccggatgagacaggatagcaaaggtgtggaagactttggggatgtcataagagatggaggtggtgctcttgcaaaaggcatcttcagaggtgtcacaggcatattgacaaagcccatcgagggtgcaaaatcttctggtgttgaaggttttgtgcaaggagttggaaagggtataattggcgcagctgcacaaccagttagcggagttcttgatcttttatcaaaaactactgaaggtgccaatgcggtaaaaatgaaaatatcatcagcgataatggctgaggagcagttgctgcgtaggcgtcttcctcgagctattggtgggaatagtttgctctatccttatgacggacacaaagctactggccaggctatcttgcatctagctgaatgtgctacattccttggtcaaattgatatttttaaaatccgaggaaagtttgcttctaccgatgcttatgaggatcattttttacttcctaaggggaagatttttttaatcactcacagaagagtactattgcttcagttaccaatgatgacccagcgtaagttcaatcctacgaaggatccttgttcagtaatatgggatgtattatgggatgatttggtaacagtggagatgacccatgggaaaaaagatcctccagattcctggccttctaagcttattttatacttgaaagctaaaccttcaaattcgaaggaaattgttcgtttggtcaagtgtaatcgaggttcagatcaagcatctatcatttactcggcaattgacaaagcttataaagcttacggtccaaactcgttgaaggaattcttgagatggaaggtaccaaggccatatgcccctcgcaatagtagtggccgaagtatccaagacttatcatttggttaaaaggtcaacacaaatgcacactttagtgttaaacacagtagaatcttaggatgaaggtattttaggttgacacttttggttaccaggcaaatgatatattctacatatacactatagatctctatgatcataccttgctcattaaaagcatttactattcttgtgatggggagatccatgtccgagttttggccaaaccactacagatctggtttccttcggcatatacaatcacattcaatatggattttttgacggaccggttcttcgcgaagagtttatcacttcactactacaccgtgtctcttatagatgtatttatgatcggtttcaggattatgtcatgcagtttattaattgtttttcatttttagaaaactaaactagtgtctcagggttgtacatggcttaagtccctttgaatataataatagtatgcgacaatgcaaagttggtaagatgggagttcaattcatttggtgatgcaaccactactgttagacgcactaacgacatctggtcacccatcggtgatgatccctctaatgtcgctattttcacccttggggtctagacatgaaggctagggtgattgaaaatctatttttg

SEQ ID NO: 41832 - DNA, 553 bp, Zea Mays
atggcattggatggctgtatacctgcaaaactgtacacaatcaatattgcatttgttaattggaacacgactggtttaccttctgaggaagctacacacccagaatcacagttagatgaagaggaacaactgactaaagaagagtggcaggctattaataagctgttgagttaccaaccagatgaagatatgtcttttccccttgagaaggtttccccaaatgtgattcaatttatgatggatgtatccattggccaggctggtgcaaggatcatcaatattgatggaactgaggttttatgtggtagatttcatcagcttcaggttgtcactaagttgtatccgaagagcacatgttgtgatgtgacattgaaatattgtggtctatcatctccagaaggttctcttgctcagagtgtcgttagcgagggaaagagtcatgctcttgatgttagttttgtacgagcaccaattggtatggaccttgattggcagctcattgcgaagatatcaccatgccatgttacggttccccattcacaagtactcttgt

SEQ ID NO: 41833 - DNA, 10425 bp, Zea Mays
atggcggaagctatggaaggaatgagttgggtcagagacttgagaggtttagtttctcaggagattatttctgatgtcctacaactttgtgatgccatctccgattggtttcaattcgctggtgatccttggagcttgggctatttgggacaccgcaacgactgcatcttcaaggggatcgctcctaatttgtctagcgtgttaggtttggccgaggacgacctcagtctttggtgtatggctggggccaagggcctttccatgatgtttcggctttcactccagcagggcattgagtgtgggtgtgacggtgtgtatggggttttgtatgttaatgttgttcaatcttctcgtggtcttagtgtgaaaacaaaattgcattcattgaaaataatggatgagctacaaggtcgtctttcaatgacttcaaagtatttagtgtgctctgtcatcaatgaaagtgttggagctacctcttccgatacacttgataagggcggcgacctaagcatctttcctgtggatgaggatcctttcatggatgcattaacagattttactccagatcaaaattctaatccagatgactgtcaaattcccaacttcatttctgatgcaaatgagtacaatgaaataggttcaaaagatggttcatgctttgatggggatgaacagaacgcaaaacctactgaaatattttatgaggcacaagatagtaatgtggcagattttgttgttctgacattcttgagcaggagtcctgattcttgtctttatgatggtatagattcacagatgagtattcgtatgtccgcactggaattctactgtaacagacccacacttgttgctctaattgagtttggatttgatcttagcacggttaattctgtgccgaaatgtagtcttgatgtggcacctgcaattgaaactgtgaaacccacagggaaggaagaaggtgctcctactattgtaaaaggattgttaggttatgggaaacgtcgaacaattttcaacatcaaaatggatgtggatagggtatcaatgtttctcaataaggaagatggttctcagcttgcaatgtttgtgcaagagaaatttctgtttgatttgaagttcacattccagtcgtacagtatcgatgatgaagattttgaaggtcataattacagcttgactggtcagctttctgctgttcgtattgtctttctctaccgttttatccaagagtttacttcttactttatggagcttggcacccctcatactgaagaggcaattaagtttattgataaagttggaggttttgagtggttaattcagaaatatgaaatggatggagcttctgctataaagctggatctttcccttgagacacccataatcattgttcctaagaattctcagagcgaagattatatacagtttgatcttggtcaattgaaagtaaggaatgagtttagttggcatggaggtaaagagactgacccttctgctgtaaggcttgatgttctccatgcagaaataaatggaatcaacatggcggttggggtaaatggaactctgggaaagtgtatgattcgtgatggtcgcggcatcaatatagaggtgcgacgtagcctacgggatgtcttcaaaaaggtcccgatactgtctatgaaatttcagataggattgcttcatggtgtcatgtcagataaagaatacaatgtcgcgataagctgtatttcgacaaatctgtccgatacacctaaccttcccccaagttttcgtgaaaatatgaacaggacaaaggagtcaattcgtttacttgcagataaagtcaaccttagcaaccatttgttgctttcacgtaccgttgttgtcatgaccgtggaaattcagtatgcgttgcttgaacttcgcaatggcccagatgcagagtcacctctggcagagcttgctgtggaaggtctatgggtatcctatagaacaacttcaatgcttgaaatggatctatatttgtcaatattgaaattttcaatacatgatatccgtccagatacgaagtctgagatgcgtctgatgcttggatcttgttcagagactgctaatctgtgcgttgatgactcttcaactgatgcaggggtttcgaacctcacaatgctgatactggattatcgttcgcgttcttcttttcaatcatttgttataagaatacagcagcctcgtatacttgttgtcctggattttctgcttcctgttgttgagtattttgtgccttctttaggctcgataactggcagagaggaaagcttagacccgaagaatgatcctcttatgagggctgatgatattatacttactgagcatgttttcttgcaaaaagaggattttattcaactatctcctgtaaggcagctaatagttgatggttgtgatattgacgagttcatttatgatggctgtgggggcactgtatccttatgtgaggaatttgataagaaaggacaggtatactctgggattataatcataattggttgtggcaaaagacttcgattcaaaaatgtcaaaattgagaatggtgcactgcttagaagatgtgtatacttgaacatgggaagcagttactcaatttcttctgaagatgatgtagaggtttctgtgttagaaagttctttcacgaatgatgaagactgtttaaaccttgaagaacataaaaagagaaatctgcagaatgccattgatggtcccacaaaccaaatactgaactttacatttgaggctcaggttgtatctccagaatttacattctatgacagttcaaagttatcaatggatgattcgttgcacattgagaagcttcttcgggccaagatggatttcagtttcatgtatgcttcaaaagaaaaagatatatgggctcgatctgtcattaaagaccttacaattgaagctggttctggtcttcttgttcttgaacctgtagatgtttcatggaaatatacttcagtcaatgaaaagacaaacatagtgttggtgtcgacagatgtttgcatccatctttctctgagtgttgcttctcttatgcttaaactgcaaaaccaaactcttgcagcattgcagtttggtaatattagcccactaatttcttgcacaaactttaagcgaatttggagctcaccaaaaggtgacctacctggttacaacctaacgttctggcggccacaagctccctccaattatgtcatattgggtgattgtgtgtcctcaaggtctgtgccaccttctcaggttgtggttgctataagtaatacttatggtcgtgtacgaaaacctcttggatttaggctaattcatgtattacctggttctctggatctcattgattcctgtcaatcaactgaagaaaacgaatgttctatctggattcctgtaccaccacctggatatttagctctaggatgtgtggtaaatattggaaggttaccaccttcaaaccatgtagtgtattgccttcgttctgatcttgcgacttctgcgacattttcagattgtatacacactctctcacctgctgctggaataatctctgaatttagcatctggcgtgtggacaatgtgattgcttcattctgtgcacataattctatagagcaacccactaaaacagaagctcttaatttgcaccatgttctcctccggaatccaaattgctatattgttaaagatctaagtgcagattcatctatccagaatgaccaatcttctgatcaattaaatcaccgcaagagtctttctggatgggatgtacttcgcactttgtcaagaccaagtaactattgtatgtctactccccattttgaaaggatatggtgggataaaggaaacgataccaagaagccattttctatatggagaccgttacctcgttttggttttgcttcggttggtgactgtataactgaagggtttgaaccacccactcttggcattcttttcaagtgtgacacagttgtttctgagaagcctgtacagtttactaaagtgacacaaattgacagaaaaggccttgaggaaatattcttctggtatccagtgccacctcccggttacgcttctcttggatgtatcgtaacaaaaacagatgaaatgccaagcaaggattccatttgctgccctaaactgagtctagtgagccaagcgaatatgtcagaggatcctatctccatgtcttctagctcaaaaggtccttgctgctggagcatctggaaagttgaaaatcagggctgtactttcctggccagaccagatgtcaagaagccctcagctcaactggcataccgtattgctgaccatgcgaagccgaaggcacgtgaaaacattactgctgagctgaagctgggttgtttgtcggttggcattcttgacagctcttgtggaatggtcacaccactttttgacacaacaatcgctaatataaatcttgcaacacatggaagatttgagacattgaatgctgtattgatctgttcaattgctgcatccacattcaatagacacttggaggcatgggaaccctttgttgagccatttgatggaatattcaagtttgaaacatatgataccagtgaacaccctccttccaaagttggtaagaggattcgtgttgctgcaacaagtcctctaaatgctaacctgagctctgcaaatcttgagctgcttatagaaacgttagtttcatggagaagacagattgatcttgaaaataaatcgtcaacaaaaagcgagggtaccattgaaaacatgaaaaaagctgatgattcttcgtactctgcattgaatgaagatgatttccagagagtggtttttgagaataaattaggatgtgatgtttatcttaaaaaaaaaatggaagatagtgaaatcactattgagcttttacagcatgagagcaaagtttcgttgttgcttccgcctcccaggttttcagataaactaaatgtgttatccaattcaacagaatcaagatactatgttgttgtacagatctttgagtctaagggcttgcctatcatagatgacggcaatggtcacagctacttctgtgctttacgcttacttattggaagccatgcttctgatcagcacaaagtgttcccacagagtgccaggacgagatgtgtaaaacctgtggaaactactgagttactgacccactgtgccaagtggaatgaacattttatatttgaagttccagaacaggcatcagctaatttagagattgaagtaacaaatcttgcatcaaaagctgggaaaggtgaagtaattggttctctgtctatgcctattggacgaggagcaaccatgttgaaacgagctccttctatgaggatgattcagcatgtttctgatgtcaaacgggtgctaacatgtcctcttacaaagaagggtcagatacctaattttgaggacaggaaaaaaggtggtgttttagtactctcaagctgttatgtggaacgttctactcattcatatttccagaggttgaaagacagtataaacaatgtggagagcgacttctgtataggacttagcccagatggtccatgggaaagttttactgcagctttgccagtgaccgtccttccaaaatcgcttaataataaccgttttgcatttgaggtcactatgaggaatggaaagaaacatgcaaccttgagaggtcttgcagttattgccaatgatgctgacataaaacttgaagtgtctatatgtcctgtaaacatgcttgataactctatgttaaatactagattggcaagctccaccagtgttattgatgaagtatttgaaaatcagtggtaccgaccaattgcagggtggggacataacccttcaattggtcacagaaaagacttaaagcagtggagcacaaaggactgctcatactcatctaaggcattttttgagcctggccttccatctggttggaggtggacctcaccgtggaaaattgaaaggttgaattttgtagataatgatggatgggcatatgctgcagattttcaaaacttgaattggccatcatcatcctggagatcttctaaatcaccacacgacttcgtgagaagaaggcgttgggtacgttctagacagcagtcgcaagaacaaagtgcagaaattcctagaaaagtacttgctactgtcagtcctcattcatctactgcgttgccttggacatcgatgattagggatatggatttatgcttgcaagttcgcccatattctgaaaaatcagaggaatcatatagctggagccagatttgttcactaggttctgagagtatacctaaacagcagcactcttcactttctaggcaaagcaccgtaaagcagtcagtggtatcatcaaggaattctgttcttaagcttgctgaactcgagaaaaaagatgtgctctcatattgccatcctcctgttagcactgaaagatatttctggtttagtgttggaattgatgcttctgttgttcatacagatttgaatgtacctgtctatgactggagaatttctttcaattcaattcttagacttgaaaataaacttccctatgaagctgagtatgctatatgggagatttccactaaaagtaatatggttgaaaagcagcatggtattgtcccttcgggtggaagtgtatttatctattcagcagatatacggaaaccaatttatcttacattgtttctccaaaacggttggattctagaaaaggatgctgtattgataatggacttgttgtccttggaacatgtttcttcgttctggatggttcagaagcagagccagaggagactacgagttagtgttgagcatgacctaggtgctagtgatgctgcaccaaagacactgagattgtttgtcccttactggataaaaaaccactcgtcaattccattatgttatcgcatagtagaaggggaatccacagaaagcacagaagcagactcacttagcagaccagactcgctaagtagagtgtctaagtcttcaaaattttcccttaaatattcttcaaagtctcttgtcagaagaggaacaatgtcgcacagaaatatgcaagtactggaagatattgaagattgtagcacagactatgtgatgctatcaccacaagattacttgaaccgatctgctggtatgcgctctgagtcaagggataacaatttcagtccagctcgagttgcaatatctatggctgttggtggttgcacacagtacagcgtaggagtatcgctttttgagcttgagaacaaggagcatgttgatatcaaaacatttgcttctgatgggtcatattactggttctcagttcaattgaagatggcttcagataggacaaaggtggtaaatttactgccgagagcacttcttatcaatagaattggaagaactatttttctatctgaatatcatgatgagactgaagagcccttacaaccatatgaacctccaaaagtatttcaatggcgatcagaatttggaagtgaacttttaaagttgaggttggagggataccaatggagtacaccttttagtatcaatgctaatggagttatgtgtgtgctcatgaacagcacaacaggaaatgatcaggcttttgtcagggtaaatgtgagaagtggaacaaaaagttcacggcatgaagttgtatttcagcttgattgctggtccagcccatacagggtggagaatcgctccatgttcttgcctatacggtttcggcagtttggtggtgatgatcattcatggcgtaatctgcttccgaattcatcagcttccttctttttggaggacctgagcagaaggcatctattggaagttttggttgatggaactgaccctatgaactccatgacatatgacatcaatgtcgtaatggatcatcagccccttactaattcagatgcccttaagaaggccttacgtgtcactgtcttgaaggaggggaaattgaatgttattcaaattattgattggctgccagataatagaaatcgaggacagataactgaaaggatgttatcaccaatctttcagccatcagaggtcgactatgggcagtcatctcctgatctggatagtgaatttcatgttactttggaactaacggagcttggcatttctgtaattgaccatatgcctgaggaagttctttacctctcagtgcagcaactgttacttgcatactcatctggaattggctctggagtaaatcggctcaaaatgcggatgcattggattcaagttgataatcaattaccatttgttcctatgcctgtacttttctgtcctcaaaagattgaaaatcagtcagactatattttcaagttctctatgacagttcagaccaacaattctcttgatttttgtgtctatccttatgtcggtgtccaggttcctgagaattgtgtgttctttgttaacatccatgaaccaatcatttggcgcctccatgagatgattcaacacctaaaattcgataggatatatagcaatcaaccttcagctgtttcagtggaccccatactgaaaattgggcttctgaacatctccgagatccgatttagagtgtcaatggcaatgtccccaagccaaaggccaaggggagtatttgggttctggtcgtcgttgatgactgcattgggaaacatggagcatatgccggtccgtatagctcaaagataccgggaggaattgtgcatgcggcaaagtgcacttatgaactctgctatatctaacattcaaaaggatcttcttagccaacctcttcagctactttccggtgttgatattcttggtaatgcgagtagcgctctgagtaacatgagcaaggggatagctgcattgtctatggacaagaaattcattcagggccggatgagacaggatagcaaaggtgtggaagactttggggatgtcataagagatggaggtggtgctcttgcaaaaggcatcttcagaggtgtcacaggcatattgacaaagcccatcgagggtgcaaaatcttctggtgttgaaggttttgtgcaaggagttggaaagggtataattggcgcagctgcacaaccagttagcggagttcttgatcttttatcaaaaactactgaaggtgccaatgcggtaaaaatgaaaatatcatcagcgataatggctgaggagcagttgctgcgtaggcgtcttcctcgagctattggtgggaatagtttgctctatccttatgacggacacaaagctactggccaggctatcttgcatctagctgaatgtgctacattccttggtcaaattgatatttttaaaatccgaggaaagtttgcttctaccgatgcttatgaggatcattttttacttcctaaggggaagatttttttaatcactcacagaagagtactattgcttcagttaccaatgatgacccagcgtaagttcaatcctacgaaggatccttgttcagtaatatgggatgtattatgggatgatttggtaacagtggagatgacccatgggaaaaaagatcctccagattcctggccttctaagcttattttatacttgaaagctaaaccttcaaattcgaaggaaattgttcgtttggtcaagtgtaatcgaggttcagatcaagcatctatcatttactcggcaattgacaaagcttataaagcttacggtccaaactcgttgaaggaattcttgagatggaaggtaccaaggccatatgcccctcgcaatagtagtggccgaagtatccaagacttatcatttggttaaaaggtcaacacaaatgcacactttagtgttaaacacagtagaatcttaggatgaaggtattttaggttgacacttttggttaccaggcaaatgatatattctacatatacactatagatctctatgatcataccttgctcattaaaagcatttactattcttgtgatggggagatccatgtccgagttttggccaaaccactacagatctggtttccttcggcatatacaatcacattcaatatggattttttgacggaccggttcttcgcgaagagtttatcacttcactactacaccgtgtctcttatagatgtatttatgatcggtttcaggattatgtcatgcagtttattaattgtttttcatttttagaaaactaaactagtgtctcagggttgtacatggcttaagtccctttgaatataataatagtatgcgacaatgcaaagttggtaagatgggagttcaattcatttggtgatgcaaccactactgttagacgcactaacgacatctggtcacccatcggtgatgatccctctaatgtcgctattttcacccttggggtctagacatgaaggctagggtgattgaaaatctatttttg

SEQ ID NO: 41834 - DNA, 9653 bp, Zea Mays
atgtggttgatggatttctgcgcctggtcgcagaagggacatgctggctggtgggccagtttttctgagtatgcacttcaattggttggtaacttgcttcagacactagaatgtttgggattcacattccagtcgtacagtatcgatgatgaagattttgaaggtcataattacagcttgactggtcagctttctgctgttcgtattgtctttctctaccgttttatccaagagtttacttcttactttatggagcttggcacccctcatactgaagaggcaattaagtttattgataaagttggaggttttgagtggttaattcagaaatatgaaatggatggagcttctgctataaagctggatctttcccttgagacacccataatcattgttcctaagaattctcagagcgaagattatatacagtttgatcttggtcaattgaaagtaaggaatgagtttagttggcatggaggtaaagagactgacccttctgctgtaaggcttgatgttctccatgcagaaataaatggaatcaacatggcggttggggtaaatggaactctgggaaagtgtatgattcgtgatggtcgcggcatcaatatagaggtgcgacgtagcctacgggatgtcttcaaaaaggtcccgatactgtctatgaaatttcagataggattgcttcatggtgtcatgtcagataaagaatacaatgtcgcgataagctgtatttcgacaaatctgtccgatacacctaaccttcccccaagttttcgtgaaaatatgaacaggacaaaggagtcaattcgtttacttgcagataaagtcaaccttagcaaccatttgttgctttcacgtaccgttgttgtcatgaccgtggaaattcagtatgcgttgcttgaacttcgcaatggcccagatgcagagtcacctctggcagagcttgctgtggaaggtctatgggtatcctatagaacaacttcaatgcttgaaatggatctatatttgtcaatattgaaattttcaatacatgatatccgtccagatacgaagtctgagatgcgtctgatgcttggatcttgttcagagactgctaatctgtgcgttgatgactcttcaactgatgcaggggtttcgaacctcacaatgctgatactggattatcgttcgcgttcttcttttcaatcatttgttataagaatacagcagcctcgtatacttgttgtcctggattttctgcttcctgttgttgagtattttgtgccttctttaggctcgataactggcagagaggaaagcttagacccgaagaatgatcctcttatgagggctgatgatattatacttactgagcatgttttcttgcaaaaagaggattttattcaactatctcctgtaaggcagctaatagttgatggttgtgatattgacgagttcatttatgatggctgtgggggcactgtatccttatgtgaggaatttgataagaaaggacaggtatactctgggattataatcataattggttgtggcaaaagacttcgattcaaaaatgtcaaaattgagaatggtgcactgcttagaagatgtgtatacttgaacatgggaagcagttactcaatttcttctgaagatgatgtagaggtttctgtgttagaaagttctttcacgaatgatgaagactgtttaaaccttgaagaacataaaaagagaaatctgcagaatgccattgatggtcccacaaaccaaatactgaactttacatttgaggctcaggttgtatctccagaatttacattctatgacagttcaaagttatcaatggatgattcgttgcacattgagaagcttcttcgggccaagatggatttcagtttcatgtatgcttcaaaagaaaaagatatatgggctcgatctgtcattaaagaccttacaattgaagctggttctggtcttcttgttcttgaacctgtagatgtttcatggaaatatacttcagtcaatgaaaagacaaacatagtgttggtgtcgacagatgtttgcatccatctttctctgagtgttgcttctcttatgcttaaactgcaaaaccaaactcttgcagcattgcagtttggtaatattagcccactaatttcttgcacaaactttaagcgaatttggagctcaccaaaaggtgacctacctggttacaacctaacgttctggcggccacaagctccctccaattatgtcatattgggtgattgtgtgtcctcaaggtctgtgccaccttctcaggttgtggttgctataagtaatacttatggtcgtgtacgaaaacctcttggatttaggctaattcatgtattacctggttctctggatctcattgattcctgtcaatcaactgaagaaaacgaatgttctatctggattcctgtaccaccacctggatatttagctctaggatgtgtggtaaatattggaaggttaccaccttcaaaccatgtagtgtattgccttcgttctgatcttgcgacttctgcgacattttcagattgtatacacactctctcacctgctgctggaataatctctgaatttagcatctggcgtgtggacaatgtgattgcttcattctgtgcacataattctatagagcaacccactaaaacagaagctcttaatttgcaccatgttctcctccggaatccaaattgctatattgttaaagatctaagtgcagattcatctatccagaatgaccaatcttctgatcaattaaatcaccgcaagagtctttctggatgggatgtacttcgcactttgtcaagaccaagtaactattgtatgtctactccccattttgaaaggatatggtgggataaaggaaacgataccaagaagccattttctatatggagaccgttacctcgttttggttttgcttcggttggtgactgtataactgaagggtttgaaccacccactcttggcattcttttcaagtgtgacacagttgtttctgagaagcctgtacagtttactaaagtgacacaaattgacagaaaaggccttgaggaaatattcttctggtatccagtgccacctcccggttacgcttctcttggatgtatcgtaacaaaaacagatgaaatgccaagcaaggattccatttgctgccctaaactgagtctagtgagccaagcgaatatgtcagaggatcctatctccatgtcttctagctcaaaaggtccttgctgctggagcatctggaaagttgaaaatcagggctgtactttcctggccagaccagatgtcaagaagccctcagctcaactggcataccgtattgctgaccatgcgaagccgaaggcacgtgaaaacattactgctgagctgaagctgggttgtttgtcggttggcattcttgacagctcttgtggaatggtcacaccactttttgacacaacaatcgctaatataaatcttgcaacacatggaagatttgagacattgaatgctgtattgatctgttcaattgctgcatccacattcaatagacacttggaggcatgggaaccctttgttgagccatttgatggaatattcaagtttgaaacatatgataccagtgaacaccctccttccaaagttggtaagaggattcgtgttgctgcaacaagtcctctaaatgctaacctgagctctgcaaatcttgagctgcttatagaaacgttagtttcatggagaagacagattgatcttgaaaataaatcgtcaacaaaaagcgagggtaccattgaaaacatgaaaaaagctgatgattcttcgtactctgcattgaatgaagatgatttccagagagtggtttttgagaataaattaggatgtgatgtttatcttaaaaaaaaaatggaagatagtgaaatcactattgagcttttacagcatgagagcaaagtttcgttgttgcttccgcctcccaggttttcagataaactaaatgtgttatccaattcaacagaatcaagatactatgttgttgtacagatctttgagtctaagggcttgcctatcatagatgacggcaatggtcacagctacttctgtgctttacgcttacttattggaagccatgcttctgatcagcacaaagtgttcccacagagtgccaggacgagatgtgtaaaacctgtggaaactactgagttactgacccactgtgccaagtggaatgaacattttatatttgaagttccagaacaggcatcagctaatttagagattgaagtaacaaatcttgcatcaaaagctgggaaaggtgaagtaattggttctctgtctatgcctattggacgaggagcaaccatgttgaaacgagctccttctatgaggatgattcagcatgtttctgatgtcaaacgggtgctaacatgtcctcttacaaagaagggtcagatacctaattttgaggacaggaaaaaaggtggtgttttagtactctcaagctgttatgtggaacgttctactcattcatatttccagaggttgaaagacagtataaacaatgtggagagcgacttctgtataggacttagcccagatggtccatgggaaagttttactgcagctttgccagtgaccgtccttccaaaatcgcttaataataaccgttttgcatttgaggtcactatgaggaatggaaagaaacatgcaaccttgagaggtcttgcagttattgccaatgatgctgacataaaacttgaagtgtctatatgtcctgtaaacatgcttgataactctatgttaaatactagattggcaagctccaccagtgttattgatgaagtatttgaaaatcagtggtaccgaccaattgcagggtggggacataacccttcaattggtcacagaaaagacttaaagcagtggagcacaaaggactgctcatactcatctaaggcattttttgagcctggccttccatctggttggaggtggacctcaccgtggaaaattgaaaggttgaattttgtagataatgatggatgggcatatgctgcagattttcaaaacttgaattggccatcatcatcctggagatcttctaaatcaccacacgacttcgtgagaagaaggcgttgggtacgttctagacagcagtcgcaagaacaaagtgcagaaattcctagaaaagtacttgctactgtcagtcctcattcatctactgcgttgccttggacatcgatgattagggatatggatttatgcttgcaagttcgcccatattctgaaaaatcagaggaatcatatagctggagccagatttgttcactaggttctgagagtatacctaaacagcagcactcttcactttctaggcaaagcaccgtaaagcagtcagtggtatcatcaaggaattctgttcttaagcttgctgaactcgagaaaaaagatgtgctctcatattgccatcctcctgttagcactgaaagatatttctggtttagtgttggaattgatgcttctgttgttcatacagatttgaatgtacctgtctatgactggagaatttctttcaattcaattcttagacttgaaaataaacttccctatgaagctgagtatgctatatgggagatttccactaaaagtaatatggttgaaaagcagcatggtattgtcccttcgggtggaagtgtatttatctattcagcagatatacggaaaccaatttatcttacattgtttctccaaaacggttggattctagaaaaggatgctgtattgataatggacttgttgtccttggaacatgtttcttcgttctggatggttcagaagcagagccagaggagactacgagttagtgttgagcatgacctaggtgctagtgatgctgcaccaaagacactgagattgtttgtcccttactggataaaaaaccactcgtcaattccattatgttatcgcatagtagaaggggaatccacagaaagcacagaagcagactcacttagcagaccagactcgctaagtagagtgtctaagtcttcaaaattttcccttaaatattcttcaaagtctcttgtcagaagaggaacaatgtcgcacagaaatatgcaagtactggaagatattgaagattgtagcacagactatgtgatgctatcaccacaagattacttgaaccgatctgctggtatgcgctctgagtcaagggataacaatttcagtccagctcgagttgcaatatctatggctgttggtggttgcacacagtacagcgtaggagtatcgctttttgagcttgagaacaaggagcatgttgatatcaaaacatttgcttctgatgggtcatattactggttctcagttcaattgaagatggcttcagataggacaaaggtggtaaatttactgccgagagcacttcttatcaatagaattggaagaactatttttctatctgaatatcatgatgagactgaagagcccttacaaccatatgaacctccaaaagtatttcaatggcgatcagaatttggaagtgaacttttaaagttgaggttggagggataccaatggagtacaccttttagtatcaatgctaatggagttatgtgtgtgctcatgaacagcacaacaggaaatgatcaggcttttgtcagggtaaatgtgagaagtggaacaaaaagttcacggcatgaagttgtatttcagcttgattgctggtccagcccatacagggtggagaatcgctccatgttcttgcctatacggtttcggcagtttggtggtgatgatcattcatggcgtaatctgcttccgaattcatcagcttccttctttttggaggacctgagcagaaggcatctattggaagttttggttgatggaactgaccctatgaactccatgacatatgacatcaatgtcgtaatggatcatcagccccttactaattcagatgcccttaagaaggccttacgtgtcactgtcttgaaggaggggaaattgaatgttattcaaattattgattggctgccagataatagaaatcgaggacagataactgaaaggatgttatcaccaatctttcagccatcagaggtcgactatgggcagtcatctcctgatctggatagtgaatttcatgttactttggaactaacggagcttggcatttctgtaattgaccatatgcctgaggaagttctttacctctcagtgcagcaactgttacttgcatactcatctggaattggctctggagtaaatcggctcaaaatgcggatgcattggattcaagttgataatcaattaccatttgttcctatgcctgtacttttctgtcctcaaaagattgaaaatcagtcagactatattttcaagttctctatgacagttcagaccaacaattctcttgatttttgtgtctatccttatgtcggtgtccaggttcctgagaattgtgtgttctttgttaacatccatgaaccaatcatttggcgcctccatgagatgattcaacacctaaaattcgataggatatatagcaatcaaccttcagctgtttcagtggaccccatactgaaaattgggcttctgaacatctccgagatccgatttagagtgtcaatggcaatgtccccaagccaaaggccaaggggagtatttgggttctggtcgtcgttgatgactgcattgggaaacatggagcatatgccggtccgtatagctcaaagataccgggaggaattgtgcatgcggcaaagtgcacttatgaactctgctatatctaacattcaaaaggatcttcttagccaacctcttcagctactttccggtgttgatattcttggtaatgcgagtagcgctctgagtaacatgagcaaggggatagctgcattgtctatggacaagaaattcattcagggccggatgagacaggatagcaaaggtgtggaagactttggggatgtcataagagatggaggtggtgctcttgcaaaaggcatcttcagaggtgtcacaggcatattgacaaagcccatcgagggtgcaaaatcttctggtgttgaaggttttgtgcaaggagttggaaagggtataattggcgcagctgcacaaccagttagcggagttcttgatcttttatcaaaaactactgaaggtgccaatgcggtaaaaatgaaaatatcatcagcgataatggctgaggagcagttgctgcgtaggcgtcttcctcgagctattggtgggaatagtttgctctatccttatgacggacacaaagctactggccaggctatcttgcatctagctgaatgtgctacattccttggtcaaattgatatttttaaaatccgaggaaagtttgcttctaccgatgcttatgaggatcattttttacttcctaaggggaagatttttttaatcactcacagaagagtactattgcttcagttaccaatgatgacccagcgtaagttcaatcctacgaaggatccttgttcagtaatatgggatgtattatgggatgatttggtaacagtggagatgacccatgggaaaaaagatcctccagattcctggccttctaagcttattttatacttgaaagctaaaccttcaaattcgaaggaaattgttcgtttggtcaagtgtaatcgaggttcagatcaagcatctatcatttactcggcaattgacaaagcttataaagcttacggtccaaactcgttgaaggaattcttgagatggaaggtaccaaggccatatgcccctcgcaatagtagtggccgaagtatccaagacttatcatttggttaaaaggtcaacacaaatgcacactttagtgttaaacacagtagaatcttaggatgaaggtattttaggttgacacttttggttaccaggcaaatgatatattctacatatacactataggtatcagaggataggtactttgccttcatgtaaatagatatattttaggaggcgccggtattcatgtaaatgtgaacatctctgttataaagaaaaaaaataataatgcaaattatgcaagattcattgctgctgtcttgttgcaatgtttaatgtgttctcttgcgattgtctaaagacccaaaccgttaacgtgtctttactactatggtttcatttcacagatctctatgatcataccttgctcattaaaagcatttactattcttgtgatggggagatccatgtccgagttttggccaaaccactacagatctggtttccttcggcatatacaatcacattcaatatggattttttgacggaccggttcttcgcgaagagtttatcacttcactactacaccgtgtctcttatagatgtatttatgatcggtttcaggattatgtcatgcagtttattaattgtttttcatttttagaaaactaaactagtgtctcagggttgtacatggcttaagtccctttgaatataataatagtatgcgacaatgcaaagttggtaagatgggagttcaattcatttggtgatgcaaccactactgttagacgcactaacgacatctggtcacccatcggtgatgatccctctaatgtcgctattttcacccttggggtctagacatgaaggctagggtgattgaaaatctatttttg

SEQ ID NO: 41835 - DNA, 8999 bp, Zea Mays
tcttcctgcagttatatacagtttgatcttggtcaattgaaagtaaggaatgagtttagttggcatggaggtaaagagactgacccttctgctgtaaggcttgatgttctccatgcagaaataaatggaatcaacatggcggttggggtaaatggaactctgggaaagtgtatgattcgtgatggtcgcggcatcaatatagaggtgcgacgtagcctacgggatgtcttcaaaaaggtcccgatactgtctatgaaatttcagataggattgcttcatggtgtcatgtcagataaagaatacaatgtcgcgataagctgtatttcgacaaatctgtccgatacacctaaccttcccccaagttttcgtgaaaatatgaacaggacaaaggagtcaattcgtttacttgcagataaagtcaaccttagcaaccatttgttgctttcacgtaccgttgttgtcatgaccgtggaaattcagtatgcgttgcttgaacttcgcaatggcccagatgcagagtcacctctggcagagcttgctgtggaaggtctatgggtatcctatagaacaacttcaatgcttgaaatggatctatatttgtcaatattgaaattttcaatacatgatatccgtccagatacgaagtctgagatgcgtctgatgcttggatcttgttcagagactgctaatctgtgcgttgatgactcttcaactgatgcaggggtttcgaacctcacaatgctgatactggattatcgttcgcgttcttcttttcaatcatttgttataagaatacagcagcctcgtatacttgttgtcctggattttctgcttcctgttgttgagtattttgtgccttctttaggctcgataactggcagagaggaaagcttagacccgaagaatgatcctcttatgagggctgatgatattatacttactgagcatgttttcttgcaaaaagaggattttattcaactatctcctgtaaggcagctaatagttgatggttgtgatattgacgagttcatttatgatggctgtgggggcactgtatccttatgtgaggaatttgataagaaaggacaggtatactctgggattataatcataattggttgtggcaaaagacttcgattcaaaaatgtcaaaattgagaatggtgcactgcttagaagatgtgtatacttgaacatgggaagcagttactcaatttcttctgaagatgatgtagaggtttctgtgttagaaagttctttcacgaatgatgaagactgtttaaaccttgaagaacataaaaagagaaatctgcagaatgccattgatggtcccacaaaccaaatactgaactttacatttgaggctcaggttgtatctccagaatttacattctatgacagttcaaagttatcaatggatgattcgttgcacattgagaagcttcttcgggccaagatggatttcagtttcatgtatgcttcaaaagaaaaagatatatgggctcgatctgtcattaaagaccttacaattgaagctggttctggtcttcttgttcttgaacctgtagatgtttcatggaaatatacttcagtcaatgaaaagacaaacatagtgttggtgtcgacagatgtttgcatccatctttctctgagtgttgcttctcttatgcttaaactgcaaaaccaaactcttgcagcattgcagtttggtaatattagcccactaatttcttgcacaaactttaagcgaatttggagctcaccaaaaggtgacctacctggttacaacctaacgttctggcggccacaagctccctccaattatgtcatattgggtgattgtgtgtcctcaaggtctgtgccaccttctcaggttgtggttgctataagtaatacttatggtcgtgtacgaaaacctcttggatttaggctaattcatgtattacctggttctctggatctcattgattcctgtcaatcaactgaagaaaacgaatgttctatctggattcctgtaccaccacctggatatttagctctaggaataatctctgaatttagcatctggcgtgtggacaatgtgattgcttcattctgtgcacataattctatagagcaacccactaaaacagaagctcttaatttgcaccatgttctcctccggaatccaaattgctatattgttaaagatctaagtgcagattcatctatccagaatgaccaatcttctgatcaattaaatcaccgcaagagtctttctggatgggatgtacttcgcactttgtcaagaccaagtaactattgtatgtctactccccattttgaaaggatatggtgggataaaggaaacgataccaagaagccattttctatatggagaccgttacctcgttttggttttgcttcggttggtgactgtataactgaagggtttgaaccacccactcttggcattcttttcaagtgtgacacagttgtttctgagaagcctgtacagtttactaaagtgacacaaattgacagaaaaggccttgaggaaatattcttctggtatccagtgccacctcccggttacgcttctcttggatgtatcgtaacaaaaacagatgaaatgccaagcaaggattccatttgctgccctaaactgagtctagtgagccaagcgaatatgtcagaggatcctatctccatgtcttctagctcaaaaggtccttgctgctggagcatctggaaagttgaaaatcagggctgtactttcctggccagaccagatgtcaagaagccctcagctcaactggcataccgtattgctgaccatgcgaagccgaaggcacgtgaaaacattactgctgagctgaagctgggttgtttgtcggttggcattcttgacagctcttgtggaatggtcacaccactttttgacacaacaatcgctaatataaatcttgcaacacatggaagatttgagacattgaatgctgtattgatctgttcaattgctgcatccacattcaatagacacttggaggcatgggaaccctttgttgagccatttgatggaatattcaagtttgaaacatatgataccagtgaacaccctccttccaaagttggtaagaggattcgtgttgctgcaacaagtcctctaaatgctaacctgagctctgcaaatcttgagctgcttatagaaacgttagtttcatggagaagacagattgatcttgaaaataaatcgtcaacaaaaagcgagggtaccattgaaaacatgaaaaaagctgatgattcttcgtactctgcattgaatgaagatgatttccagagagtggtttttgagaataaattaggatgtgatgtttatcttaaaaaaaaaatggaagatagtgaaatcactattgagcttttacagcatgagagcaaagtttcgttgttgcttccgcctcccaggttttcagataaactaaatgtgttatccaattcaacagaatcaagatactatgttgttgtacagatctttgagtctaagggcttgcctatcatagatgacggcaatggtcacagctacttctgtgctttacgcttacttattggaagccatgcttctgatcagcacaaagtgttcccacagagtgccaggacgagatgtgtaaaacctgtggaaactactgagttactgacccactgtgccaagtggaatgaacattttatatttgaagttccagaacaggcatcagctaatttagagattgaagtaacaaatcttgcatcaaaagctgggaaaggtgaagtaattggttctctgtctatgcctattggacgaggagcaaccatgttgaaacgagctccttctatgaggatgattcagcatgtttctgatgtcaaacgggtgctaacatgtcctcttacaaagaagggtcagatacctaattttgaggacaggaaaaaaggtggtgttttagtactctcaagctgttatgtggaacgttctactcattcatatttccagaggttgaaagacagtataaacaatgtggagagcgacttctgtataggacttagcccagatggtccatgggaaagttttactgcagctttgccagtgaccgtccttccaaaatcgcttaataataaccgttttgcatttgaggtcactatgaggaatggaaagaaacatgcaaccttgagaggtcttgcagttattgccaatgatgctgacataaaacttgaagtgtctatatgtcctgtaaacatgcttgataactctatgttaaatactagattggcaagctccaccagtgttattgatgaagtatttgaaaatcagtggtaccgaccaattgcagggtggggacataacccttcaattggtcacagaaaagacttaaagcagtggagcacaaaggactgctcatactcatctaaggcattttttgagcctggccttccatctggttggaggtggacctcaccgtggaaaattgaaaggttgaattttgtagataatgatggatgggcatatgctgcagattttcaaaacttgaattggccatcatcatcctggagatcttctaaatcaccacacgacttcgtgagaagaaggcgttgggtacgttctagacagcagtcgcaagaacaaagtgcagaaattcctagaaaagtacttgctactgtcagtcctcattcatctactgcgttgccttggacatcgatgattagggatatggatttatgcttgcaagttcgcccatattctgaaaaatcagaggaatcatatagctggagccagatttgttcactaggttctgagagtatacctaaacagcagcactcttcactttctaggcaaagcaccgtaaagcagtcagtggtatcatcaaggaattctgttcttaagcttgctgaactcgagaaaaaagatgtgctctcatattgccatcctcctgttagcactgaaagatatttctggtttagtgttggaattgatgcttctgttgttcatacagatttgaatgtacctgtctatgactggagaatttctttcaattcaattcttagacttgaaaataaacttccctatgaagctgagtatgctatatgggagatttccactaaaagtaatatggttgaaaagcagcatggtattgtcccttcgggtggaagtgtatttatctattcagcagatatacggaaaccaatttatcttacattgtttctccaaaacggttggattctagaaaaggatgctgtattgataatggacttgttgtccttggaacatgtttcttcgttctggatggttcagaagcagagccagaggagactacgagttagtgttgagcatgacctaggtgctagtgatgctgcaccaaagacactgagattgtttgtcccttactggataaaaaaccactcgtcaattccattatgttatcgcatagtagaaggggaatccacagaaagcacagaagcagactcacttagcagaccagactcgctaagtagagtgtctaagtcttcaaaattttcccttaaatattcttcaaagtctcttgtcagaagaggaacaatgtcgcacagaaatatgcaagtactggaagatattgaagattgtagcacagactatgtgatgctatcaccacaagattacttgaaccgatctgctggtatgcgctctgagtcaagggataacaatttcagtccagctcgagttgcaatatctatggctgttggtggttgcacacagtacagcgtaggagtatcgctttttgagcttgagaacaaggagcatgttgatatcaaaacatttgcttctgatgggtcatattactggttctcagttcaattgaagatggcttcagataggacaaaggtggtaaatttactgccgagagcacttcttatcaatagaattggaagaactatttttctatctgaatatcatgatgagactgaagagcccttacaaccatatgaacctccaaaagtatttcaatggcgatcagaatttggaagtgaacttttaaagttgaggttggagggataccaatggagtacaccttttagtatcaatgctaatggagttatgtgtgtgctcatgaacagcacaacaggaaatgatcaggctttttttggtggtgatgatcattcatggcgtaatctgcttccgaattcatcagcttccttctttttggaggacctgagcagaaggcatctattggaagttttggttgatggaactgaccctatgaactccatgacatatgacatcaatgtcgtaatggatcatcagccccttactaattcagatgcccttaagaaggccttacgtgtcactgtcttgaaggaggggaaattgaatgttattcaaattattgattggctgccagataatagaaatcgaggacagataactgaaaggatgttatcaccaatctttcagccatcagaggtcgactatgggcagtcatctcctgatctggatagtgaatttcatgttactttggaactaacggagcttggcatttctgtaattgaccatatgcctgaggaagttctttacctctcagtgcagcaactgttacttgcatactcatctggaattggctctggagtaaatcggctcaaaatgcggatgcattggattcaagttgataatcaattaccatttgttcctatgcctgtacttttctgtcctcaaaagattgaaaatcagtcagactatattttcaagttctctatgacagttcagaccaacaattctcttgatttttgtgtctatccttatgtcggtgtccaggttcctgagaattgtgtgttctttgttaacatccatgaaccaatcatttggcgcctccatgagatgattcaacacctaaaattcgataggatatatagcaatcaaccttcagctgtttcagtggaccccatactgaaaattgggcttctgaacatctccgagatccgatttagagtgtcaatggcaatgtccccaagccaaaggccaaggggagtatttgggttctggtcgtcgttgatgactgcattgggaaacatggagcatatgccggtccgtatagctcaaagataccgggaggaattgtgcatgcggcaaagtgcacttatgaactctgctatatctaacattcaaaaggatcttcttagccaacctcttcagctactttccggtgttgatattcttggtaatgcgagtagcgctctgagtaacatgagcaaggggatagctgcattgtctatggacaagaaattcattcagggccggatgagacaggatagcaaaggtgtggaagactttggggatgtcataagagatggaggtggtgctcttgcaaaaggcatcttcagaggtgtcacaggcatattgacaaagcccatcgagggtgcaaaatcttctggtgttgaaggttttgtgcaaggagttggaaagggtataattggcgcagctgcacaaccagttagcggagttcttgatcttttatcaaaaactactgaaggtgccaatgcggtaaaaatgaaaatatcatcagcgataatggctgaggagcagttgctgcgtaggcgtcttcctcgagctattggtgggaatagtttgctctatccttatgacggacacaaagctactggccaggctatcttgcatctagctgaatgtgctacattccttggtcaaattgatatttttaaaatccgaggaaagtttgcttctaccgatgcttatgaggatcattttttacttcctaaggggaagatttttttaatcactcacagaagagtactattgcttcagttaccaatgatgacccagcgtaagttcaatcctacgaaggatccttgttcagtaatatgggatgtattatgggatgatttggtaacagtggagatgacccatgggaaaaaagatcctccagattcctggccttctaagcttattttatacttgaaagctaaaccttcaaattcgaaggaaattgttcgtttggtcaagtgtaatcgaggttcagatcaagcatctatcatttactcggcaattgacaaagcttataaagcttacggtccaaactcgttgaaggaattcttgagatggaaggtaccaaggccatatgcccctcgcaatagtagtggccgaagtatccaagacttatcatttggttaaaaggtcaacacaaatgcacactttagtgttaaacacagtagaatcttaggatgaaggtattttaggttgacacttttggttaccaggcaaatgatatattctacatatacactataggtatcagaggataggtactttgccttcatgtaaatagatatattttaggaggcgccggtattcatgtaaatgtgaacatctctgttataaagaaaaaaaataataatgcaaattatgcaagattcattgctgctgtcttgttgcaatgtttaatgtgttctcttgcgattgtctaaagacccaaaccgttaacgtgtctttactactatggtttcatttcacagatctctatgatcataccttgctcattaaaagcatttactattcttgtgatggggagatccatgtccgagttttggccaaaccactacagatctggtttccttcggcatatacaatcacattcaatatggattttttgacggaccggttcttcgcgaagagtttatcacttcactactacaccgtgtctcttatagatgtatttatgatcggtttcaggattatgtcatgcagtttattaattgtttttcatttttagaaaactaaactagtgtctcagggttgtacatggcttaagtccctttgaatataataatagtatgcgacaatgcaaagttggtaagatgggagttcaattcatttggtgatgcaaccactactgttagacgcactaacgacatctggtcacccatcggtgatgatccctctaatgtcgctattttcacccttggggtctagacatgaaggctagggtgattgaaaatctatttttg

SEQ ID NO: 41836 - DNA, 797 bp, Zea Mays
  misc_feature (796)..(797): n is a, c, g, or t
tttgcatccatccatcttgtctctcctttatttgacggtaacacaaatggctctctacctccacctcataacaaccttaggttacagtaacgttatctctcttccatcctttctctctctacctatctgttcccaagtatagaatataggaggagtatatttttttagagatcgttaacctctcacagtaatccctccttttgcccaaaacctaaaggaagccaaagtgggagcaccaaaatattcgcggcgggtgcatagttgtttgtttaggagaagacgaggttaagaggagatgaccgagccggcacctgcggcagcagcggaggagaagaaggccgtcgcggacacggctgcggctgtggtggcgaagggaaaagagaaggaggaggcggcgccaactctggcggccggcgccagggggaggttcgtggcctacccggcgcgggtgacggagcacacggacgtggtggcggacgccgcgcgcttcagggcggcgctcgaggggctgcacgcgcacatgaacacgaggctcaaggtgccaattattggagggaaagatttggatcttcatcagctatataaggaggtcacatcacggggtggtattgacaagttgaaggcagagaatagatggagggaagtgaccgcatcatttattttccctgccactgcaacaaatgcttcttttatgttgaagaaatactatatgtcactcttatatcattttgagcagctatacttctttagagtgcaaggctggtaccaacaagaaatagattccagaacgaattcnn

SEQ ID NO: 41837 - DNA, 614 bp, Zea Mays
  misc_feature (613)..(614): n is a, c, g, or t
tttcgacttccaatcctcgccgccggtgccgatcctgttgccgcatttttaattcccttcgccttttcttttgaatctgatgcgagccgttacagttgttactatccttgttgcctttaccttaatttcttcaattcaatgcgcgaaaatggcaacttgatataaatgcgtggtgggaaagacaagtttgaggggcggtgccccagcgatctgaggagccgcatgccatcgattttgactaatcaatccgtgttcgcgttcgctttataacatttattttttatgtgtggaccaaaaaaatcccccgacatggttggggattgcggccatccatatatcggatggcctacattgggtgccaattattggagggaaagatttggatcttcatcagctatataaggaggtcacatcacggggtggtattgacaagttgaaggcagagaatagatggagggaagtgaccgcatcatttattttccctgccactgcaacaaatgcttcttttatgttgaagaaatactatatgtcactcttatatcattttgagcagctatacttctttagagtgcaaggctggtaccaacaagaaatagattccagaacgaattcnn

SEQ ID NO: 41838 - DNA, 287 bp, Zea Mays
  misc_feature (286)..(287): n is a, c, g, or t
ctattctcgattttttgttatgagatgggtgccaattattggagggaaagatttggatcttcatcagctatataaggaggtcacatcacggggtggtattgacaagttgaaggcagagaatagatggagggaagtgaccgcatcatttattttccctgccactgcaacaaatgcttcttttatgttgaagaaatactatatgtcactcttatatcattttgagcagctatacttctttagagtgcaaggctggtaccaacaagaaatagattccagaacgaattcnn

SEQ ID NO: 41839 - DNA, 283 bp, Zea Mays
  misc_feature (282)..(283): n is a, c, g, or t
tgcttgctggcttgctttgtgagggtgccaattattggagggaaagatttggatcttcatcagctatataaggaggtcacatcacggggtggtattgacaagttgaaggcagagaatagatggagggaagtgaccgcatcatttattttccctgccactgcaacaaatgcttcttttatgttgaagaaatactatatgtcactcttatatcattttgagcagctatacttctttagagtgcaaggctggtaccaacaagaaatagattccagaacgaattcnn

SEQ ID NO: 41840 - DNA, 393 bp, Zea Mays
atgaagaggtgcaggtgggatgtcgtcggcggcggcagtgccagacgaacgagtatcctcctccgggtggggaggagcagcgactgcgcgttcccggacggcgcgctcctcagcagcgcgaacgcgggcttcggctgcgttgcgttcttgctgggcaagcgcagcctcgcggtcggcatcagccgcgcgcgcaagggcagcctgacgggcggtcagagcccgtcgctagtgctcatccttggcggcgcgaagaagatcggcgcgctcagcagaggtgtcggcgatgttgggatgctgaagcacctcggagccagagacagcgtcgaggggcgacacaggaaggctagtcatggcagcgccgaatggtgggcgcgcactgaggtggaagcgtag

SEQ ID NO: 41841 - DNA, 1718 bp, Zea Mays
ctttcatcccctcaacaagccagttagccaccaggaaatcgaaaacccctgccgcattctcctccaacggctatatttgtcatgagcaccactgacacgctggcccaactcgctttctgatctccaaaataaagggtaatccccgaggaaccgattcgaaacaatcaaatagctccaggactctaacccaaagaactgagcgagccaaatcgtcgaacagatggaagccatggacacggaaccgtcctcccctgcgccggcagcagccgtcaatctgcctcctccgccgtaccatcactgcccagctccagctgatgaggttgcagcgacgccgcagccgaagccgaagcaatcaaccgcggggccggggctgaggacaccctcgccgccgccgtcggttcaggtgtccgggtactctctacacgacctgctgctgctgtccccgccacccccgagctcacgccgccaccggtcgagtacgcgtggggcagctgggacgagcgtggacgagagcctggagattgttgcggtggcggggacgcccacgcctccaaggcgcaggcggcgcgggggcgcggagcagtgtgtgacgcccgttctggcgtccccgaggaatgcacgacgggcgagacggaggctggagaaggacgtcgaggcggttgaggacgccggcaggagggcccgcaggaggaagtccacaagggctgcgccgaaagctgcagcggctgccgacaaggcagaggcggcgctgaacgaggaggatataaccatggctgtggtcccggcttgtcctgctgctacctgcggtctctgggaaaggatcgttgaattggtgatgtggaggaatatggctaaatcagcactttggttcggatttggatcgatgttcttctcatgctcattgtcaagagacgtcaccttcagcccaatctcagctctctgtcacctcggcgttatgatcttaggcttagctttcttcaaagattctgttcctcagaggccgcaggtggagaatgagagaaggttccggttgactgaagaagacatgcttcgtgcttctcaagctgtgcttccgtttgcaaactccatgatatcgacggcgcaagtgattttctctggtgaaccttcaatgactctcaaagtattgcctttacttctgttcggtgctaaatatgggggccttgttacagtgtggaggcttttagctgcaggatttttcatcagttttacagtcccaaagctatatagctgttattcaagtcgtattcataaaagagttgagattttgagagatcaggctctagaagcgtggaagtcttgcccacgcaaaaaacttgttgcagctattatagtaacaatgttctggaacatgttcagtgtgaagacacgcgtcatggcagcctttgtttcacttgtaatactgcgctataataagaaacaccacaaggcagcagaagttggaagttaccgagatgagcaggggcagacaatggagatggatagctaaaattttcagtactatgcggtcctaatgatgtagggttgtcagagtgcagccacaaggagcctttgcaaacaatggagatggataaccaaagttttcagtactatgcagtcctaaatgatgtatgattcccagagtgcattcctaaatgatgtattattccacagtgctgctactatttctgtgcaataatattcatttagttctgtctagt

SEQ ID NO: 41842 - DNA, 672 bp, Zea Mays
ccaatgaagcacctaaattgacactcaaactcaaaatagggaaacactcatgctggcagtggagatgtgacaaagactcagattatcctattcaaaccccgaaaagatcttagttctgtgctagaaccagaaggccaaagtgcatgaatttttcatttgcagacaacatagaggcaaggaaaacgagtcagacagccatatagctgacttgagaaggaattatggacaaggcacattgagacaaggatgccattacattgcaattaacatattcagtttgattattgtcctactgatgttttggtgtcttaaatggaccctgttagaagttcaaaaaaattccaactgcgaataactggcccttcggggccaggaagatatgtttgtggatgaacactcgcgaggccacatgactgttacttttgtttcttccccttttttttgtagaaaaaggtcaaggctatctaaatgttgtccggcaattgttggagttgatggaggttctgattcgtttggtcaatctggccagtcgatcgtgtactgcaaacccatttgggtactgtaaatgttatgttgataatgctacctcagttgctgtacaagttgagttggcggtatttagccaagcgtttccaggaaagcttcaataatgataaatattgttaccgcggt

SEQ ID NO: 41843 - DNA, 1685 bp, Zea Mays
agccagggaccaaatcaactcaagtcatcgagtccacagctcgcgcgcgcagccaatcgctctccctccggcctccacagcccaaaaccacctcggccccacttcttctctccgtcgccccctgtttgtccaacccatggcgacccacgccagcgacaatggcagcgggcacgcggagtggcggttcgctcgggcggcgaaggagggtgcgctggccgtggccggggacaagatgagcatccgggcggcgcggttcaagatcagcgcgagcgtggacgggcgcgacccgcggcccgtgctgccgcttgcgcacggggacccctcggtgttcccggccttccgcaccgccgccgaggccgaggacgccgtggccgccgcgctccggacgggcaagttcaactgctaccccgccggcgtgggcctccccgaagcccgccgtgctctggcggagcacctgtcaagtgatcttccatacaagctgtcaactgatgacatcttcctcaccgctggaggcactcaagccattgaggttgtcgtctcagtccttgcccaaccgggcgccaacatattgctcccaagaccaggctatccaaattatgaggcgcgtgcaggactgcacaacttacaagttcgccatttcgatctgattcctgagagagggtgggaaatcgatatcgactctctggagtcgattgctgacaagaacaccaccgcaatggtcatcataaaccccaacaatccttgcggcagtgtctacacccgtgaacatttagccaaggtcgcggaggtagcaaggaagcttggaatactagtcatcgctgatgaagtgtatggaaacctggtgtttggggacaccccttacgtcccaatgggtgtctttggccacattgcccctgtcttgagcataggatcactatcgaagaggtggatagtgcctgggtggcgacttggttgggtagctgtatgtgatcccaacaagattctgcaagaaaccaagatcattgcatcaataacaaacttccttaacgtttcaactgatccggcaacttttgttcagggagcacttccccatattcttgggaacacaaaggaagattttttcaggaggatcattggtctgctagcagaaacctcagagatatgttacagagaaataaaggacatcaagtgcatcacctgccctcacaagccagaaggttccatgtttgtcatggtgaaattaaatttgtatcttttggaggggattcatgacgatattgatttttgctgcaagctggcaaaagaagagtctgtgattttgtgtccagttgtctgtttcgggttacaggtactccaggcctacactgtatgtttgcgctcagaaatgctttaagaaaacagtgaattgatgctggaatacatgaatcatcttttgttcatatgagaaaaatgtaatataggagattcactaatatataaatgaggggtgattctcctttatcaacaacttataaatgttactgacgaatagacagagaaatatactccttggttacttttgagattttgggagtagcttttacgactaggcttaagtgtctaactgtttaggatagacatttggatatttgttactctgaggcactggttaagattctcatcttaaattgatatcagcatttaatcatacatacatgtgtttctcc

SEQ ID NO: 41844 - DNA, 1633 bp, Zea Mays
agccagggaccaaatcaactcaagtcatcgagtccacagctcgcgcgcgcagccaatcgctctccctccggcctccacagcccaaaaccacctcggccccacttcttctctccgtcgccccctgtttgtccaacccatggcgacccacgccagcgacaatggcagcgggcacgcggagtggcggttcgctcgggcggcgaaggagggtgcgctggccgtggccggggacaagatgagcatccgggcggcgcggttcaagatcagcgcgagcgtggacgggcgcgacccgcggcccgtgctgccgcttgcgcacggggacccctcggtgttcccggccttccgcaccgccgccgaggccgaggacgccgtggccgccgcgctccggacgggcaagttcaactgctaccccgccggcgtgggcctccccgaagcccgccgtgctctggcggagcacctgtcaagtgatcttccatacaagctgtcaactgatgacatcttcctcaccgctggaggcactcaagccattgaggttgtcgtctcagtccttgcccaaccgggcgccaacatattgctcccaagaccaggctatccaaattatgaggcgcgtgcaggactgcacaacttacaagttcgccatttcgatctgattcctgagagagggtgggaaatcgatatcgactctctggagtcgattgctgacaagaacaccaccgcaatggtcatcataaaccccaacaatccttgcggcagtgtctacacccgtgaacatttagccaaggtcgcggaggtagcaaggaagcttggaatactagtcatcgctgatgaagtgtatggaaacctggtgtttggggacaccccttacgtcccaatgggtgtctttggccacattgcccctgtcttgagcataggatcactatcgaagaggtggatagtgcctgggtggcgacttggttgggtagctgtatgtgatcccaacaagattctgcaagaaaccaagatcattgcatcaataacaaacttccttaacgtttcaactgatccggcaacttttgttcagggagcacttccccatattcttgggaacacaaaggaagattttttcaggaggatcattggtctgctagcagaaacctcagagatatgttacagagaaataaaggacatcaagtgcatcacctgccctcacaagccagaaggtgaaattaaatttgtatcttttggaggggattcatgacgatattgatttttgctgcaagctggcaaaagaagagtctgtgattttgtgtccagggagtgttttgggaatggaaaactggatccgcatcactttcgccattgattcatcttctcttcttgatggtcttgagaggatcaaatctttctgccaaaggcataagaagaagaatttgcttaatggccattaactgtatctacgttcaaagttacctagttccattgtattatcaacaaatgtggaactttgaaatccctctgaattaataaagttttccttgaatacgcagaaattttgattatctgtcgatcatcctaggaggtagattttaggttttgatattacacaaatacaatactatacaactaagaaaaaaaaatgcagcaatacaatctaaga

SEQ ID NO: 41845 - DNA, 2305 bp, Zea Mays
aaaagtactaggaaccaaaggcaagcattcagcaatgcatcccgttccactgttccagcttgcacccgacaagccgaacacttcaccctttcccacttcacctccgccgttccgcatctgtggtcaaatacgacgctcgcgtccataccgatccgtgtttgcccattcctctcctcccactcgcttttcctccaaagcgagcgagctaggcgttacgccggagctcgtttgggcggtggtggaggagagaggaaagggaggagatgaaggcggtggagcgagcgaaactggtgaggagcctccggcacgagtcgcggcggctgcgtctactcgtcctcgttatcggtttcttcctcgttactctcaccttcgttgtcgtctccaagcccgacgcgctcctcttcaacctgaacggcaggctgtcggtggaccaggcgccgcgctcgctcttgatccgccagcgggttgacgccgacgaggggagatccgccgaaactctcgcctcagccaccggagatccaaaggtggtcgaagacgatacctacggcgaggaagccagcgccaaagccagagccaacgccaatgcccgagggaccactgccgaggaggaacggatgctcgctagtgagcccgagcagagaaaaagggcacaggaagccactacatctgagattttagatacagaatttaatctcactccagatgttgaccagagaaatggtcgagacagatctcatcaagcagcattggataatatggagcgggacaaaccattgtgtgatttctcaaacttcagagcaaatgtctgtgagatgagaggtaacatcagaatacacccaaatggcagttcggtcatatacatggaacctacgagttcaggttcaaagagaaacgaacaatggaaaattaagccttaccctcgcaaaggtgatgaattatgcctcaatcatattacagaggtgacagtgaaatccagcatagtggcacctgagtgttccaagtaccatgacgtgcctgctgtgatctttgctctgactggatacaccggaaatctattccatgacttcaccgacgtgcttgtcccccttttcacgactgcaagcgagttcaatggtgaagttcagttcctaatcacagacatggctatttggtggacaaggaagtatgctgtggtgtttgagaagctaaccaagtaccccttgattgatttcaacaaagacaacgaagtgcattgcttcaaccatgccattgtcggccttcatgcttacatggagttcacaatcgacccgttaaaggctccacacaattactcaatggtggacttcaaccagttcatgcgcaggacctactcactgcctagggatgcagtgagagcacctggtgagaccccacagaccaggaagccaaggctgctgattatctcgaggcaaaggacaaggatgttcctcaatcttaaggagatcgtggccatggctgaggagatcggctacgaggtggtggttgaagaggccaatgtgaactccaacgtcggccatttcgccaaggtagttaattctgtggacgtgatgatgggcgtccatggcgccgggctcacaaactgcgtgttccttccgcacggcgccacactgatccagattgtaccttggggcgccctagatgggatatgcaggatcgattttggttacccagcagaacagatgggcctgaggtacaagcactacagcatcggcgtgcacgagagcagcctcacggagcagtaccctttggaccacgagatcttcagaaacccgcttgcgttccacaagaacgggttcgagttcgtcaggcagaccttcatggatacacagaatgtaaggcttgactgcaaccgtttcagacctgtgctcttggaggctcttgaccaattgaaccaataaggacccattggtctaattccacggccactgtactagatttttgttttccttggcgattctagtctcaccatttttcctctttgtaaaatttcgtgatcactgtatctggttacatgagcaacatgaaaatcaattgtttctccaaatgtgtaggatcgaaatcgggattgtactgtattttgtttaatgtaaattagcagtcgtcgatcacagaaatatcagcgagaagctgctgttacatgatcacagcgagtagaattttccaggcctgacaggcatgatagaaatggggttggtggagaccaccttttttttaggctgtgtgattcatcatgttttttgctcccacttttttggttcttggacacgaagaaacgctaatgctgttc

SEQ ID NO: 41846 - DNA, 2351 bp, Zea Mays
attcagcaatgcatcccgttccactgttccagcttgcacccgacaagccgaacacttcaccctttcccacttcacctccgccgttccgcatctgtggtcaaatacgacgctcgcgtccataccgatccgtgtttgcccattcctctcctcccactcgcttttcctccaaagcgagcgagctaggcgttacgccggagctcgtttgggcggtggtggaggagagaggaaagggaggagatgaaggcggtggagcgagcgaaactggtgaggagcctccggcacgagtcgcggcggctgcgtctactcgtcctcgttatcggtttcttcctcgttactctcaccttcgttgtcgtctccaagcccgacgcgctcctcttcaacctgaacggcaggctgtcggtggaccaggcgccgcgctcgctcttgatccgccagcgggttgacgccgacgaggggagatccgccgaaactctcgcctcagccaccggagatccaaaggtggtcgaagacgatacctacggcgaggaagccagcgccaaagccagagccaacgccaatgcccgagggaccactgccgaggaggaacggatgctcgctagtgagcccgagcagagaaaaagggcacaggaagccactacatctgagattttagctggggaagacgaccggggaaggaaaagccagcaagagggacacaaagagcaccagcagcacaagttgaccctcccaactgtttcgaattataccattcacgatgccactgacggcaccgacaatggcaaacaggaagcattggataatatggagcgggacaaaccattgtgtgatttctcaaacttcagagcaaatgtctgtgagatgagaggtaacatcagaatacacccaaatggcagttcggtcatatacatggaacctacgagttcaggttcaaagagaaacgaacaatggaaaattaagccttaccctcgcaaaggtgatgaattatgcctcaatcatattacagaggtgacagtgaaatccagcatagtggcacctgagtgttccaagtaccatgacgtgcctgctgtgatctttgctctgactggatacaccggaaatctattccatgacttcaccgacgtgcttgtcccccttttcacgactgcaagcgagttcaatggtgaagttcagttcctaatcacagacatggctatttggtggacaaggaagtatgctgtggtgtttgagaagctaaccaagtaccccttgattgatttcaacaaagacaacgaagtgcattgcttcaaccatgccattgtcggccttcatgcttacatggagttcacaatcgacccgttaaaggctccacacaattactcaatggtggacttcaaccagttcatgcgcaggacctactcactgcctagggatgcagtgagagcacctggtgagaccccacagaccaggaagccaaggctgctgattatctcgaggcaaaggacaaggatgttcctcaatcttaaggagatcgtggccatggctgaggagatcggctacgaggtggtggttgaagaggccaatgtgaactccaacgtcggccatttcgccaaggtagttaattctgtggacgtgatgatgggcgtccatggcgccgggctcacaaactgcgtgttccttccgcacggcgccacactgatccagattgtaccttggggcgccctagatgggatatgcaggatcgattttggttacccagcagaacagatgggcctgaggtacaagcactacagcatcggcgtgcacgagagcagcctcacggagcagtaccctttggaccacgagatcttcagaaacccgcttgcgttccacaagaacgggttcgagttcgtcaggcagaccttcatggatacacagaatgtaaggcttgactgcaaccgtttcagacctgtgctcttggaggctcttgaccaattgaaccaataaggacccattggtctaattccacggccactgtactagatttttgttttccttggcgattctagtctcaccatttttcctctttgtaaaatttcgtgatcactgtatctggttacatgagcaacatgaaaatcaattgtttctccaaatgtgtaggatcgaaatcgggattgtactgtattttgtttaatgtaaattagcagtcgtcgatcacagaaatatcagcgagaagctgctgttacatgatcacagcgagtagaattttccaggcctgacaggcatgatagaaatggggttggtggagaccaccttttttttaggctgtgtgattcatcatgttttttgctcccacttttttggttcttggacacgaagaaacgctaatgctgttc

SEQ ID NO: 41847 - DNA, 2305 bp, Zea Mays
attcagcaatgcatcccgttccactgttccagcttgcacccgacaagccgaacacttcaccctttcccacttcacctccgccgttccgcatctgtggtcaaatacgacgctcgcgtccataccgatccgtgtttgcccattcctctcctcccactcgcttttcctccaaagcgagcgagctaggcgttacgccggagctcgtttgggcggtggtggaggagagaggaaagggaggagatgaaggcggtggagcgagcgaaactggtgaggagcctccggcacgagtcgcggcggctgcgtctactcgtcctcgttatcggtttcttcctcgttactctcaccttcgttgtcgtctccaagcccgacgcgctcctcttcaacctgaacggcaggctgtcggtggaccaggcgccgcgctcgctcttgatccgccagcgggttgacgccgacgaggggagatccgccgaaactctcgcctcagccaccggagatccaaaggtggtcgaagacgatacctacggcgaggaagccagcgccaaagccagagccaacgccaatgcccgagggaccactgccgaggaggaacggatgctcgctagtgagcccgagcagagaaaaagggcacaggaagccactacatctgagattttagctggggaagacgaccggggaaggaaaagccagcaagagggacacaaagagcaccagcagcacaagttgaccctcccaactgtttcgaattataccattcacgatgccactgacggcaccgacaatggcaaacaggaagatacagaatttaatctcactccagatgttgaccagagaaatggtcgagacagatctcatcaagcagcattggataatatggagcgggacaaaccattgtgtgatttctcaaacttcagagcaaatgtctgtgagatgagaggtaacatcagaatacacccaaatggcagttcggtcatatacatggaacctacgagttcaggttcaaagagaaacgaacaatggaaaattaagccttaccctcgcaaaggtgatgaattatgcctcaatcatattacagaggtgacagtgaaatccagcatagtggcacctgagtgttccaagtaccatgacgtgcctgctgtgatctttgctctgactggatacaccggaaatctattccatgacttcaccgacgtgcttgtcccccttttcacgactgcaagcgagttcaatggtgaagttcagttcctaatcacagacatggctatttggtggacaaggaagtatgctgtggtgtttgagaagctaaccaagtaccccttgattgatttcaacaaagacaacgaagtgcattgcttcaaccatgccattgtcggccttcatgcttacatggagttcacaatcgacccgttaaaggctccacacaattactcaatggtggacttcaaccagttcatgcgcaggacctactcactgcctagggatgcagtgagagcacctggtgagaccccacagaccaggaagccaaggctgctgattatctcgaggcaaaggacaaggatgttcctcaatcttaaggagatcgtggccatggctgaggagatcggctacgaggtggtggttgaagaggccaatgtgaactccaacgtcggccatttcgccaagatgggatatgcaggatcgattttggttacccagcagaacagatgggcctgaggtacaagcactacagcatcggcgtgcacgagagcagcctcacggagcagtaccctttggaccacgagatcttcagaaacccgcttgcgttccacaagaacgggttcgagttcgtcaggcagaccttcatggatacacagaatgtaaggcttgactgcaaccgtttcagacctgtgctcttggaggctcttgaccaattgaaccaataaggacccattggtctaattccacggccactgtactagatttttgttttccttggcgattctagtctcaccatttttcctctttgtaaaatttcgtgatcactgtatctggttacatgagcaacatgaaaatcaattgtttctccaaatgtgtaggatcgaaatcgggattgtactgtattttgtttaatgtaaattagcagtcgtcgatcacagaaatatcagcgagaagctgctgttacatgatcacagcgagtagaattttccaggcctgacaggcatgatagaaatggggttggtggagaccaccttttttttaggctgtgtgattcatcatgttttttgctcccacttttttggttcttggacacgaagaaacgctaatgctgttc

SEQ ID NO: 41848 - DNA, 2668 bp, Zea Mays
gtcgccaacagtagcccaaaattaggttggtttctcctacacttccatgttcgacgcgagcggcgaaccgacttccctctcattcgtcttccacaaaccccataaccctagcaccgctgccaccatgtcctcgtctccatcttcagtgaaccgccgtcccccgggcccgctagcgttagggctggagtccttggcgaagaagaagacacataggaagaagctcaccgccaaacctcctccagatccagtcgttgccctccaatggtcggatacagaacgtctcgtctcttcctttgaatccagcagtcggtgctcctcctctggatccggcggtcaactccatcatccgcagcttctatggcacctcccctagtccccctccatcgccgccctcacccaccgcttctatatcgccacctctctcattatagaagaagacactgagaatctggtgagcttccacctttttagcttattccgtttagatctgttgtctatatttgattctcgttatggaagaagctgctagtgcttgcttgcatcatcgctgaggatctgctggtaggatagattagcttgatagcttgatcggtgcatccatgcgtgcaatctaaacttgcaatctagaactccacctagaaatctttctcttttgattaggtcttttctgataaattggtcggtgcatccgtggatgcagtttaaacatagcttagttttttttaaacagtgcacttcaggcttagtttttttaaacattgcactttaggcttgctttatattcttgttcctattaagaactgagcaactagctaagctgagatcaagttacagtttactaaatactggtatgttaaaaaggaaccctcatgtagctgtgagagtaaatttcttcttcttgtgccagagtatattagcatttcttggttttcaattatatgtcagtttgcatttctcacaaacacatgcattcattctctggtgctatcaaactgatgcatattttgatgagcagcactaggactatggtcatacgattagtgctagatgctgagttactgacaacaataatctcatctgttgtttgatgtggtggttgtgtcaatcaaaaaaacatttttccatcaccaacagaggaactgcgatttagcaagcgctgcgcaatgttgatgacctccattttcagattacttgttgtttctagacccgaagagtgtaggttctagtaattatttgtgcctagctctatattttttctttaaagaaaaaggaagaaaagcattagaatctttcacgctgaatttagaagaagctctatcatcaaacaattttttattgagaaatattttttccacactttttctagcagttctctaaaataaaccatggaactgagagttaaaaaagcagcttcttctcatttagttgatgcatggaatcctatatgtgtcactgagtttactttagagaattacagagaatcaattctgatgatcaatgaatcaccatacacaaagaacacaatcaggaagagctcaaccaatctgtctcttgctagctgctagggctactgtttccattttgcagactttgtgattcgtaaaattctttggttggtgcaaaatagaatttttctaaaaataattaaatatttatattgtcaaataaaagcaccagcaatggtacctccatgttcatgtttataattatctgtgattcttacatatttcaattactatgcttatttgttaaggttaaaatgtattatcatgtgacctgccttttgtccacctgcactgcttgttcgtagatgtgcatgcttgtccctcttgcactgcttgtctgttacctgcagcaatctttgccaaacggacacagggaacctatgccccacaggactgcaccacacgtgggacaggtaatgcaggtattgcccccgctgtggctggccggtgtgcaattcaccaggctgccaaacgagccctaaaggccccagcatgggcgaccctctccaggccgccgtcgcagccgcccacgcgctctccctgctatggagaaaaccgctcatggaggttaaatatcctatttatgatcaaacagtgtaccttaacgattatcataagaagatgttgaaggatcaatatgttcaagctctgcaaggtgatgtctgttcagtttggccaaaaaggcatcccctacctgaacacctacgacggccgcaccatccgctaccccgacccgctcatcaaggctaacgacaccatcaagatcgatctggagaccaacaagatcatggacttcatcaattttgatgtcggcaatgtggtcatggtgactggcgggaggaacaccgggcgtgtaggagccatcaagaacagggagaagcacaagggcagctttgagaccatccacgtgctgcttggagctttttgctatgtctagttttctcctatttgttgtacaggaaaacatagaatggaattcaaatttggtggtcgcaaaagtctgaagactttaattcatataaagttaggcttaacattagtgcaaacagttgtattttagtttagatttagagtacacttatgtatgcgttgtttgacaatgcttatttatgatatattgaatggtacttatttatattatattaattataatgttgttcagt

SEQ ID NO: 41849 - DNA, 1366 bp, Zea Mays
cgccaacagtagcccaaaattaggttggtttctcctacacttccatgttcgacgcgagcggcgaaccgacttccctctcattcgtcttccacaaaccccataaccctagcaccgctgccaccatgtcctcgtctccatcttcagtgaaccgccgtcccccgggcccgctagcgttagggctggagtccttggcgaagaagaagacacataggaagaagctcaccgccaaacctcctccagatccagtcgttgccctccaatggtcggatacagaacgtctcgtctcttcctttgaatccagcagtcggtgctcctcctctggatccggcggtcaactccatcatccgcagcttctatggcacctcccctagtccccctccatcgccgccctcacccaccgcttctatatcgccacctctctcattatagaagaagacactgagaatctgatgtgcatgcttgtccctcttgcactgcttgtctgttacctgcagcaatctttgccaaacggacacagggaacctatgccccacaggactgcaccacacgtgggacaggtaatgcaggtattgcccccgctgtggctggccggtgtgcaattcaccaggctgccaaacgagccctaaaggccccagcatgggcgaccctctccaggccgccgtcgcagccgcccacgcgctctccctgctatggagaaaaccgctcatggaggttaaatatcctatttatgatcaaacagtgtaccttaacgattatcataagaagatgttgaaggatcaatatgagggactgaagacaatcgagcagattacaatggactcagcttcggtcgagaccaatatgttcaagctctgcaaggtgatgtctgttcagtttggccaaaaaggcatcccctacctgaacacctacgacggccgcaccatccgctaccccgacccgctcatcaaggctaacgacaccatcaagatcgatctggagaccaacaagatcatggacttcatcaattttgatgtcggcaatgtggtcatggtgactggcgggaggaacaccgggcgtgtaggagccatcaagaacagggagaagcacaagggcagctttgagaccatccacgtgctgcttggagctttttgctatgtctagttttctcctatttgttgtacaggaaaacatagaatggaattcaaatttggtggtcgcaaaagtctgaagactttaattcatataaagttaggcttaacattagtgcaaacagttgtattttagtttagatttagagtacacttatgtatgcgttgtttgacaatgcttatttatgatatattgaatggtacttatttatattatattaattataatgttgttcagt

SEQ ID NO: 41850 - DNA, 1342 bp, Zea Mays
ccaaaattaggttggtttctcctacacttccatgttcgacgcgagcggcgaaccgacttccctctcattcgtcttccacaaaccccataaccctagcaccgctgccaccatgtcctcgtctccatcttcagtgaaccgccgtcccccgggcccgctagcgttagggctggagtccttggcgaagaagaagacacataggaagaagctcaccgccaaacctcctccagatccagtcgttgccctccaatggtcggatacagaacgtctcgtctcttcctttgaatccagcagtcggtgctcctcctctggatccggcggtcaactccatcatccgcagcttctatggcacctcccctagtccccctccatcgccgccctcacccaccgcttctatatcgccacctctctcattatagaagaagacactgagaatctgatgtgcatgcttgtccctcttgcactgcttgtctgttacctgcagcaatctttgccaaacggacacagggaacctatgccccacaggactgcaccacacgtgggacaggtaatgcaggtattgcccccgctgtggctggccggtgtgcaattcaccaggctgccaaacgagccctaaaggccccagcatgggcgaccctctccaggccgccgtcgcagccgcccacgcgctctccctgctatggagaaaaccgctcatggaggtaaaccactgtgttgcgcgcacatcaagatgtcaagcagtggcttctgttaaatatcctatttatgatcaaacagtgtaccttaacgattatcataagaagatgttgaaggatcaatatgttcaagctctgcaaggtgatgtctgttcagtttggccaaaaaggcatcccctacctgaacacctacgacggccgcaccatccgctaccccgacccgctcatcaaggctaacgacaccatcaagatcgatctggagaccaacaagatcatggacttcatcaattttgatgtcggcaatgtggtcatggtgactggcgggaggaacaccgggcgtgtaggagccatcaagaacagggagaagcacaagggcagctttgagaccatccacgtgctgcttggagctttttgctatgtctagttttctcctatttgttgtacaggaaaacatagaatggaattcaaatttggtggtcgcaaaagtctgaagactttaattcatataaagttaggcttaacattagtgcaaacagttgtattttagtttagatttagagtacacttatgtatgcgttgtttgacaatgcttatttatgatatattgaatggtacttatttatattatattaattataatgttgttcagt

SEQ ID NO: 41851 - DNA, 1253 bp, Zea Mays
ctacacttccatgttcgacgcgagcggcgaaccgacttccctctcattcgtcttccacaaaccccataaccctagcaccgctgccaccatgtcctcgtctccatcttcagtgaaccgccgtcccccgggcccgctagcgttagggctggagtccttggcgaagaagaagacacataggaagaagctcaccgccaaacctcctccagatccagtcgttgccctccaatggtcggatacagaacgtctcgtctcttcctttgaatccagcagtcggtgctcctcctctggatccggcggtcaactccatcatccgcagcttctatggcacctcccctagtccccctccatcgccgccctcacccaccgcttctatatcgccacctctctcattatagaagaagacactgagaatctgggaacctatgccccacaggactgcaccacacgtgggacaggtaatgcaggtattgcccccgctgtggctggccggtgtgcaattcaccaggctgccaaacgagccctaaaggccccagcatgggcgaccctctccaggccgccgtcgcagccgcccacgcgctctccctgctatggagaaaaccgctcatggaggtaaaccactgtgttgcgcgcacatcaagatgtcaagcagtggcttctgttaaatatcctatttatgatcaaacagtgtaccttaacgattatcataagaagatgttgaaggatcaatatgttcaagctctgcaaggtgatgtctgttcagtttggccaaaaaggcatcccctacctgaacacctacgacggccgcaccatccgctaccccgacccgctcatcaaggctaacgacaccatcaagatcgatctggagaccaacaagatcatggacttcatcaattttgatgtcggcaatgtggtcatggtgactggcgggaggaacaccgggcgtgtaggagccatcaagaacagggagaagcacaagggcagctttgagaccatccacgtgctgcttggagctttttgctatgtctagttttctcctatttgttgtacaggaaaacatagaatggaattcaaatttggtggtcgcaaaagtctgaagactttaattcatataaagttaggcttaacattagtgcaaacagttgtattttagtttagatttagagtacacttatgtatgcgttgtttgacaatgcttatttatgatatattgaatggtacttatttatattatattaattataatgttgttcagt

SEQ ID NO: 41852 - DNA, 2738 bp, Zea Mays
tacacttccatgttcgacgcgagcggcgaaccgacttccctctcattcgtcttccacaaaccccataaccctagcaccgctgccaccatgtcctcgtctccatcttcagtgaaccgccgtcccccgggcccgctagcgttagggctggagtccttggcgaagaagaagacacataggaagaagctcaccgccaaacctcctccagatccagtcgttgccctccaatggtcggatacagaacgtctcgtctcttcctttgaatccagcagtcggtgctcctcctctggatccggcggtcaactccatcatccgcagcttctatggcacctcccctagtccccctccatcgccgccctcacccaccgcttctatatcgccacctctctcattatagaagaagacactgagaatctggtgagcttccacctttttagcttattccgtttagatctgttgtctatatttgattctcgttatggaagaagctgctagtgcttgcttgcatcatcgctgaggatctgctggtaggatagattagcttgatagcttgatcggtgcatccatgcgtgcaatctaaacttgcaatctagaactccacctagaaatctttctcttttgattaggtcttttctgataaattggtcggtgcatccgtggatgcagtttaaacatagcttagttttttttaaacagtgcacttcaggcttagtttttttaaacattgcactttaggcttgctttatattcttgttcctattaagaactgagcaactagctaagctgagatcaagttacagtttactaaatactggtatgttaaaaaggaaccctcatgtagctgtgagagtaaatttcttcttcttgtgccagagtatattagcatttcttggttttcaattatatgtcagtttgcatttctcacaaacacatgcattcattctctggtgctatcaaactgatgcatattttgatgagcagcactaggactatggtcatacgattagtgctagatgctgagttactgacaacaataatctcatctgttgtttgatgtggtggttgtgtcaatcaaaaaaacatttttccatcaccaacagaggaactgcgatttagcaagcgctgcgcaatgttgatgacctccattttcagattacttgttgtttctagacccgaagagtgtaggttctagtaattatttgtgcctagctctatattttttctttaaagaaaaaggaagaaaagcattagaatctttcacgctgaatttagaagaagctctatcatcaaacaattttttattgagaaatattttttccacactttttctagcagttctctaaaataaaccatggaactgagagttaaaaaagcagcttcttctcatttagttgatgcatggaatcctatatgtgtcactgagtttactttagagaattacagagaatcaattctgatgatcaatgaatcaccatacacaaagaacacaatcaggaagagctcaaccaatctgtctcttgctagctgctagggctactgtttccattttgcagactttgtgattcgtaaaattctttggttggtgcaaaatagaatttttctaaaaataattaaatatttatattgtcaaataaaagcaccagcaatggtacctccatgttcatgtttataattatctgtgattcttacatatttcaattactatgcttatttgttaaggttaaaatgtattatcatgtgacctgccttttgtccacctgcactgcttgttcgtagatgtgcatgcttgtccctcttgcactgcttgtctgttacctgcagcaatctttgccaaacggacacagggaacctatgccccacaggactgcaccacacgtgggacaggtaatgcaggtattgcccccgctgtggctggccggtgtgcaattcaccaggctgccaaacgagccctaaaggccccagcatgggcgaccctctccaggccgccgtcgcagccgcccacgcgctctccctgctatggagaaaaccgctcatggaggtaaaccactgtgttgcgcgcacatcaagatgtcaagcagtggcttctgttaaatatcctatttatgatcaaacagtgtaccttaacgattatcataagaagatgttgaaggatcaatatgagggactgaagacaatcgagcagattacaatggactcagcttcggtcgagaccaatatgttcaagctctgcaaggtgatgtctgttcagtttggccaaaaaggcatcccctacctgaacacctacgacggccgcaccatccgctaccccgacccgctcatcaaggctaacgacaccatcaagatcgatctggagaccaacaagatcatggacttcatcaattttgatgtcggcaatgtggtcatggtgactggcgggaggaacaccgggcgtgtaggagccatcaagaacagggagaagcacaagggcagctttgagaccatccacgtgctgcttggagctttttgctatgtctagttttctcctatttgttgtacaggaaaacatagaatggaattcaaatttggtggtcgcaaaagtctgaagactttaattcatataaagttaggcttaacattagtgcaaacagttgtattttagtttagatttagagtacacttatgtatgcgttgtttgacaatgcttatttatgatatattgaatggtacttatttatattatattaattataatgttgttcagt

SEQ ID NO: 41853 - DNA, 1210 bp, Zea Mays
ccacaaaccccataaccctagcaccgctgccaccatgtcctcgtctccatcttcagtgaaccgccgtcccccgggcccgctagcgttagggctggagtccttggcgaagaagaagacacataggaagaagctcaccgccaaacctcctccagatccagtcgttgccctccaatggtcggatacagaacgtctcgtctcttcctttgaatccagcagtcggtgctcctcctctggatccggcggtcaactccatcatccgcagcttctatggcacctcccctagtccccctccatcgccgccctcacccaccgcttctatatcgccacctctctcattatagaagaagacactgagaatctgggaacctatgccccacaggactgcaccacacgtgggacaggtaatgcaggtattgcccccgctgtggctggccggtgtgcaattcaccaggctgccaaacgagccctaaaggccccagcatgggcgaccctctccaggccgccgtcgcagccgcccacgcgctctccctgctatggagaaaaccgctcatggaggttaaatatcctatttatgatcaaacagtgtaccttaacgattatcataagaagatgttgaaggatcaatatgagggactgaagacaatcgagcagattacaatggactcagcttcggtcgagaccaatatgttcaagctctgcaaggtgatgtctgttcagtttggccaaaaaggcatcccctacctgaacacctacgacggccgcaccatccgctaccccgacccgctcatcaaggctaacgacaccatcaagatcgatctggagaccaacaagatcatggacttcatcaattttgatgtcggcaatgtggtcatggtgactggcgggaggaacaccgggcgtgtaggagccatcaagaacagggagaagcacaagggcagctttgagaccatccacgtgctgcttggagctttttgctatgtctagttttctcctatttgttgtacaggaaaacatagaatggaattcaaatttggtggtcgcaaaagtctgaagactttaattcatataaagttaggcttaacattagtgcaaacagttgtattttagtttagatttagagtacacttatgtatgcgttgtttgacaatgcttatttatgatatattgaatggtacttatttatattatattaattataatgttgttcagt

SEQ ID NO: 41854 - DNA, 860 bp, Zea Mays
aaaaacatcacatttgcaatatttttttaggaaaacaagagaaaacctaagcacggcacagcccaaacagcaagccctgagcaccctacacatagtgacatatatacaaatgatgtaataagcagcttcttcattgccgaacttgtcacaaaagtgaccggcagctccaattgcccaaggcggacagcagccaaatccaccagaacactgccacctacacatagctcacaccaacagacctaagagaacacagctcgtcatcgcatatcgagtagctctgacatttttttgaaacgaaccggataggagagctaccggcccaaaataagcaaacaaccgcctcttgaagaggactacaacaaaagctatgtcaatcctaccaacgacagcaactccctagcaacaagagcgtgcgcacaaacaatgctggcacaacatgagcacacccagcaaaacaaagacaaaatctaacgaaaaaacaaagaaacctctgccacaaaatcccaaaaggcacgaccttttaaactcaaaagcttcttgaggaggtctggtggcaacaactcctttagatggtctgtgcaagcttaaattgaactctcgttgggcttccagtcaatcccaacaacgcccagatctttaaacacgtgacgttgtgcaagacaggcacttcaacgaagcgacgaactattataggacttacgccgacgcctaactgttgtagtcgaaagagagggggagctaaaggagggcatgcaaggtcatcttcctctctagctctagctgacaaagaagttggagagtgagagtatgggaaaccctaactagggttgagactggtatatatatcaatagatgttggg

SEQ ID NO: 41855 - DNA, 1994 bp, Zea Mays
tatctccgcccagtgaggaggcggcacgcgcgcgccgtcgaccacgcccatgccgaaatctgcctctgtgggctgtggctgccggacgagcaagcgccacgcgcgcgccgtgcctgccatgagccgtcagtccgcagtccgcagtccgcagccacacttttgctaaaccctagtaaatatacgatacgaagcgcaaacgcttgcctcatcctcgaattcgccatggcgatgcccaccacctcgtctgcttccccatgccaggcaccgtcgcccgccgggctgcccatttcccctggcgcccgcgctaccatcctctcattcagccgccgcctccgccgctcccgtggcgccatcatttctgcgcccactggttgtctgtttcttggtcttcccaagtcgtgctgttctatcgcagcctttggtgaagtggcagcggtttctgatgattatgtagaaagctcgccctcaagcagtggatatctgaatagtactatggatgcttcatctcatgaagataatcaatcagaaagggttgctaaaatgaaccaaaactccagagacaataacaaaatgatcaaaatatgtgataagttaattggcgtattcctggtggataaacctacaccaacggattggagaaaattactagcttttagcagggaatgggacaacataaggcctcatttctttaaacgctgccaggaaaaagcagatacagagctgaaccctgagatgaagcacaatcttctcagacttggtagaaaacttaaagaggtcatgcatttactgactcacagcaggacgcccatcatggtttacctgattatttgatttagggttcctcataacagatattcaattagtttgctcccccctttttcagattgatgaagatgtacagaggcataatgaacttcttgaagtagtaaaatccacaccatctgataaacttggttctattgttgctaagcggcgtaaagatttcacagtggaattcttcaaccacctttactatgttgcagagtcttgtcatgatgaaccagaaaagcaaactgagttggcaaagcttggaaatgattgtgtagatgccctacaagctcatgatgatacaacagggagccttgaagctttgaatgctgcagaattgaagttaaaagatatacttaattcaccttcggtggatgctgcttgcagaaagattgatgacttggctgagaaaaaagaactggactctgcactagtgttgatgctttcaaaagcttggtcagctgcaaagggcactgacatcacgaaatctgaggcaaaggatataatgtttcacctatatatgactgcggtggcgaatctccagagacaaatgccgaaggatataagaatactgaagcatcttataatgatagaggatccagaagaacggtcaagtgcacttaatgacgcttttactcctggccctgaacttcaaggggacaatgttgatacattatacacaggcgctgcacacttgggcaagagctatagttgatgcatattataacagcagagaaggcactctcattgggcaagcaagagacatgatgaatcctaaaatcattaagagagtcgaagagatagtgaagataatcaaggacaagtacctttaagttttagtcatcataaaatgggggtttaacatttctactgattgtacaagtcttgtgcgatgatggtcttttacaggctgctcccgtcaaaactactgccatcgttccagttggaactcctcagcactgacgaaacaatcagtgtttaaaggaaatgcaagttgttgtaactcattacaatgagaaggtgtttgtagcatgtggtatcagtttagctgctacatagatattagcggagtacttgtagctgtcctgactctaacagtgttgtaactgtactagtatcgaaccaggagacatgtatgtgtccaagcattcttgtaatgagctagtgatctcaaacaattctacggc

SEQ ID NO: 41856 - DNA, 1391 bp, Zea Mays
tttgattcttaatttatttaagctggattatataatgtaaacgtaaacaaagagccactgattgctgctccacggtctaccgtgatctgataataacaaaacctgtactcctgtaggctgtagcccaacgagaggaatcaaattggacaaccctgtcgccctctcggtctccctcgagcttttcttgtgcgcagccgcagccgcagccgctgcttttcgttcgtcttcatcctacgcgagggcgaaacccacaaaccctctccctcccgtactccggcctacacatccaggggcgatgacgctgggtagctccggcgccggatcgagcgtcgtcgttccccgaaacttcaggctattagaggagctcgagcgtggagagaagggcattggtgatggaacagtgagctatggaatggatgatgccgatgacatctacatgcggtcatggactggtaccatcattggccctcacaatactgtacatgagggtcgcatctaccagctgaagttgttttgtgacaaggactatccggagaagccaccatctgtcagattccactcaagaatcaacatgacatgcgttaatcacgagacaggaatggttgatccaaggaagtttggtttgctagcgaactggcagcgggactacacgatggagaacatcctcacccagctcaagaaagagatggctgcctcgcagaatcgaaagttagtgcagcctccagaagggacattcttctaacgaagtgttcacttggcccgtcatgggatccaacagtaattgaaagttttatgggctaaaaaacagcgtctactatccggagaagccaccatctgtcagattccactcaagaatcaacatgacatgcgttaatcacgagacaggaatggttgatccaaggaagtttggtttgctagcgaactggcagcgggactacacgatggagaacatcctaacccagctcaagaaagagatggctgcctcgcagaatcgaaagttagtgcagcctccagaagggacattcttctaacgaagtgttcacttggcccgtcatgggatccaacagtaattgaaacttttatgggctaaaaaacagcgtctacatctggtgcccctgcctgtctttgtgattttttatgacttttatgttcttgtatcgtgaaccgcagtgaacaacggttgttgcaagttccagggatatctttggaagtggtaaacaaatgcgtcttatttctatgtaatattagaccccgtgcgtgtgtggtttcaaggtacagctccctctcaactgttgccgtgcattccgtcgatttgcttgacgtctttcgtccacatgtgcccagcagtattctctatgctcttgctttcctgtcatacttccaactggcac

SEQ ID NO: 41857 - DNA, 653 bp, Zea Mays
ttgatgcatatatatgattaaccatgactgtacatgagggtcgcatctaccagctgaagttgttttgtgacaaagactatccggagaagccaccatctgtcagattccactcaagaatcaacatgacatgcgttaatcacgagacaggaatggttgatccaaggaagtttggtttgctagcgaactggcagcgggactacacgatggagaacatcctaacccagctcaagaaagagatggctgcctcgcagaatcgaaagttagtgcagcctccagaagggacattcttctaacgaagtgttcacttggcccgtcatgggatccaacagtaattgaaacttttatgggctaaaaaacagcgtctacatctggtgcccctgcctgtctttgtgattttttatgacttttatgttcttgtatcgtgaaccgcagtgaacaacggttgttgcaagttccagggatatctttggaagtggtaaacaaatgcgtcttatttctatgtaatattagaccccgtgcgtgtgtggtttcaaggtacagctccctctcaactgttgccgtgcattccgtcgatttgcttgacgtctttcgtccacatgtgcccagcagtattctctatgctcttgctttcctgtcatacttccaactggcac

SEQ ID NO: 41858 - DNA, 2095 bp, Zea Mays
ttccaccttttattttaaacttactctgttaaccgcagtattctacacggtcatacgaaacataggagttattatgaaacatagaactcccaagaacactgttttcacttatagagcatcacccctttacgtaatgcttggcgtcatgataatcaacaaatctcaccagtttgccgtccgcaccatagccgtccgcaccacggcgtcagactcagacccttcacattcccagttccctctgcgccccgtaaaccctagccgcgattcatggcccgcaagcgccgcgcgccttcgcctcctccgcctccgcaggaggagtcgtcctctgaggaatctggctccgaagagttggaggagcctcctcgcctccccgagctccgtagtcctccgcaggccgcggccaacaacgccgactcgtcggaggcggacacggactccgacaccgacgctcaagctttccagatgcgccaggtgccccgctccctcactaagcatacgcatccagttccccagccagaatccgatcccgaagaggaggagggcgagtcatcggagtcggagcatgagaaccctgtgcctgtggttcagaagaaggctgcggcggcggccgtgttgtccaaggcagagcaggaaaggaagagacccccctcggatcctgctcctaccgggaaggcaaaaaagatgaaggctgtggctacccctcttgccaaggcgaagaagggcaaggccgagctagagaagccggcgcctgaggccactccagcaggaaatgcaaagaagggcaaagctgagctagagaagccgacgtttgatgccattccagcaggaaaggcgaagaagggcaaggccaaggaggcagctcctgaggccacgccctcaggcaaggggaagaaggatggggacaaactagagaagtcagcagcgctagatccctcacattcagacagcaagtctgagaagcctgtgcgccccacatgggggaaagatgatgagatgaagattttggaggcccttgctgcgcatgtcaagcgtgagggtgagctgccaaagactgatttacttcttgctagtgttcgtgaccacctcgtcaggaagaactgcacctactcagatatctatgagaaggtgcgaaggctaaaggaacggtacaagaaagcagcgagcacgggcattgtgccaagtaaagaagatgggctccagatgtataatctctcagaagcaatctggggagagaaggcaatggaggctgctgctgccgttacgtctcaaaagggtggtgctgttataaagggtaagaagggccaggctaacaaagagaagatgcttgaaaatgcaaagagtgacgtgacaaaggagtctgcccctagtactgccaatcaaagtggtgattctcagaaagcaagtaagaaggggcaagccaggttgtcagaggaggctaccaccactgcctccccaagtaagagtaagaagcaggaaagtcacaatggggaattaaacaaagatgatggtaatttggctaagggaaagaaggggaaaactgacaaagggaagatggacatagatatggatcgtctgacaccaaaggaacccgtaaatgcaaatcagaatggtggcattgtgattaggagtaaggaaggagaaataaatgatgagggaacagaaggagatgctaatgtgcaaggtgtgcacagacgttttggtgagctccagaagttgtattccaaccttgctgtttatgtggaggagattgagacccatcatccgtgcggggaaactctgaaaagagtatttgagttcattgctgatgagaaggcagaagatctggaatccaagatcaagaagctaagagtagcacaggcgaaggcggaggtccgtcaagggaacataaaaaaggaggttcttaatttgatgctcagcttagtggactaacctttctgaattaatgtgatgggcggatagaagatttgatcaacaaaaggtgatgtgtgttgaatttatgggaaagatgcgagcagtgagcatattttgcaatttcatggtgttgtgcacgctgaaatggactgaaggagtggactgccaggaggaaaaagggcag

SEQ ID NO: 41859 - DNA, 2437 bp, Zea Mays
cttttattttaaacttactctgttaaccgcagtattctacacggtcatacgaaacataggagttattatgaaacatagaactcccaagaacactgttttcacttatagagcatcacccctttacgtaatgcttggcgtcatgataatcaacaaatctcaccagtttgccgtccgcaccatagccgtccgcaccacggcgtcagactcagacccttcacattcccagttccctctgcgccccgtaaaccctagccgcgattcatggcccgcaagcgccgcgcgccttcgcctcctccgcctccgcaggaggagtcgtcctctgaggaatctggctccgaagagttggaggagcctcctcgcctccccgagctccgtagtcctccgcaggccgcggccaacaacgccgactcgtcggaggcggacacggactccgacaccgacgctcaagctttccagatgcgccaggtgccccgctccctcactaagcatacgcatccagttccccagccagaatccgatcccgaagaggaggagggcgagtcatcggagtcggagcatgagaaccctgtgcctgtggttcagaagaaggctgcggcggcggccgtgttgtccaaggcagagcaggaaaggaagagacccccctcggatcctgctcctaccgggaaggcaaaaaagatgaaggctgtggctacccctcttgccaaggcgaagaagggcaaggccgagctagagaagccggcgcctgaggccactccagcaggaaatgcaaagaagggcaaagctgagctagagaagccgacgtttgatgccattccagcaggaaaggcgaagaagggcaaggccaaggaggcagctcctgaggccacgccctcaggcaaggggaagaaggatggggacaaactagagaagtcagcagcgctagatccctcacattcagacagcaagtctgagaagcctgtgcgccccacatgggggaaagatgatgagatgaagattttggaggcccttgctgcgcatgtcaagcgtgagggtgagctgccaaagactgatttacttcttgctagtgttcgtgaccacctcgtcaggaagaactgcacctactcagatatctatgagaaggtgcgaaggctaaaggaacggtacaagaaagcagcgagcacgggcattgtgccaagtaaagaagatgggctccagatgtataatctctcagaagcaatctggggagagaaggcaatggaggctgctgctgccgttacgtctcaaaagggtggtgctgttataaagggtaagaagggccaggctaacaaagagaagatgcttgaaaatgcaaagagtgacgtgacaaaggagtctgcccctagtactgccaatcaaagtggtgattctcagaaagcaagtaagaaggggcaagccaggttgtcagaggaggctaccaccactgcctccccaagtaagagtaagaagcaggaaagtcacaatggggaattaaacaaagatgatggtaatttggctaagggaaagaaggggaaaactgacaaagggaagatggacatagatatggatcgtctgacaccaaaggaacccgtaaatgcaaatcagaatggtggcattgtgattaggagtaaggaaggagaaataaatgatgagggaacagaaggagatgctaatgtgcaaggtgtgcacagacgttttggtgagctccagaagttgtattccaaccttgctgtttatgtggaggagattgagacccatcatccgtgcggggaaactctgaaaagagtatttgagttcattgctgatgagaaggcagaagatctggaatccaagatcaagaagctaagagtagcacaggcgaaggcggaggtccgtcaagggaacataaaaaaggaggttcttaatttgatgctcagcttagtggactaacctttctgaattaatgtgatgggcggatagaagatttgatcaacaaaaggtgatgtgtgttgaatttatgggaaagatgcgagcagtgagcatattttgcaatttcatggtgattgaagcgtatggaaagagctttgaatcaagacgaagctggtcaatgagaggtcgaagctaggaggcgtcgccgaaggagatacatctctaggacatgtgaatcttcagtaaaggggaacagaacaagaaggtcagagagagaaaatgtgtatgatatttcatgcaattgtatcccctagttctaaagatattagtaggaagggcattcttataactttatgaatagaggaacaataccgctgctatagggattaggcattttgtaatctcgtgtctacatcttcttccgatagagctacttgtctcaatagatcttccgaaggtataacgataatgaagctttattattagcatactcttgtctaagatgttgaatgctctttaccatacaaaaatgaat

SEQ ID NO: 41860 - DNA, 4907 bp, Zea Mays
tgaactgatacccgcaagcacacgccgtcctaatcctagtttctaacttggcgactgggcgagtgaaggcgaaaccaaggcgacgccatcgtcgagctcagcgacgccggcgccgttgcgaaagcacccgcgctccgtcgaggttcggtctcccagactctcacccgtgcttctccccgtctgcgctctgccccacctcctaccgctcccccccccccgacgtctcccgttcccgtccgttcccgcgctgttcggtgggctcgctcctgccgcccactgctcgtcgttgtcgcttcccccagcggcttccgcccccatttgccatagccgcttgggcgaacaaggaagacggcgaggtcgagggggattgggcgtcgctgctgacataactgtgggtgggtagcgctctgccttttctccctggggtcttcagcatgctgcgcaataggaccctcccattggtaagttttggggtacgttgtctccttgggcgctgctgaggggtccttggagctgggtcgcggtggctgccgttaggggttgggagatggagtttgggcctgaagatgacaaggttgatgacgatttggatttcacattctcaagggtgagaatgatggcaaagccaaaaactgatataggccattcatgcaaggatgctcaacatggccttgcgatttccaagatggaagtcggttctaccaccagggatggtcgtttggaagttgggaaggagaagcaaggttgtttgggcctctccctggcccaggtgttcagacattcctggaggcccattaacccgaaatggttatgggtgcccaggtccaacattctctcaggtaaaggataccaggcaagaccagaagaggttcgccggctagggcaaagggctagacgtatcaagagagttgagccaccgacgccatttgtgcgatccttttctcaggtggttaaggagggaaggatggcgtggagaagagaatcggggggaaatagctggaagcgacccccaaaggattggatggaagaggatgacttactggattcggagttcagcagggaggaagacctacgatccaagctccagagggccccaggggaacacactgagcaggatcagcaagatgtggggcatcatcgtcaaggaagctttacaggtaacaaaattcctcggaggggtggtttctggagagggcgtgggaattttgtgccagctaggggtggctttgggggttttcgctctgttgataggaatgagacagggggtaggggaagcaaaaaccaagaaaatcgtgatagggaacaaggctctcagccatgttcagagaggggaagaccttctggttttggagtttgcatgcagcagggcagggattctaaaatccaggaaggtctggtcaaggagattagatgcttccgttgctctcaatctggacaccatcaagctgactgcccgaatgaccctctatgctacaaatgtaaagagtctgggcatatggcggcggaatgccaaaataacaagaaacttaggttgtttggatttggaattccggagcagggcttctttggttttgatattcctgagaaaaaagtgcaggtgaatatgttgaatgctgttattcacattcttgagggggaacccacagaagagaaattggacagagagcttaaaatctggtgttcggtggatgatcgggccaaggtggctcctgagaaatctcagattgaaatgatgaaacagagagtggatgatcagactttctgctcaaacaaagagattaatacacttacaaacagtcgggtcaacagaaacagtattgggctggatggtatgaatcattttgggggaagaattaaccttcagcttgctaaccaggagaaaaaggatcaggatttgaagctcatgctcgatgactttccaatagaggacaatgaggaagattggcatgggaacataatggagcaagttgagctttatcacacagaagaagatggtgaacatgaatgggagaaggcactaagcaagaaagggaagaaaaaaagtagaaggaactttccagtgatagctacaagagccagctcgagaattgccagagatggaattcccatacttgagaaagccaccaaaagagctcgtgagaaaaatcagctacaaggtacttcacgtccaaatccttttctcattctgaataatgaatctaatgaaaacctgtctactgttatgaaagatataggcattgttctagaaaattatgacaatcaaatagatttgttcaaagctgaagagcgggttagagccactatagctgaagctaactataacaagtatgtggataaaattaacagtaaaaatgcccctcaaactgaagaggacctgcaagaattagccatggaggctataacaaataaagagagattggaggctcctttaatttcccaggaaggcccagggggggctgaacccgagaaaaataaaaagaaagggagacctgggaaacagtctaaaaaaggataaatgaaatttcttagttggaatattaggggaatgggtcagttagggagaatcaatcaacttagggaatttctgactcaagaaaaagtggacataattgggatccaagaaaccattaagcaagaattttcggttagagagcttaactggatctcctctaattgttgtttccaatggaattggattcccgcgagaggtcattctggtggtattttactaggggtcaaggaagactctctcgaggtggaaaattgggaaaacttcaattttgctattaaggctacggtcagaaacaaattcagcaattaccgttgggtggtgttgtgtgtttacgggcctgctcagcaccaccagtctgctagttttctacaagagctgtcggagatatgcgaaagggagacccttcctgtggtgttgggggtgattttaatttaataaggaataggcaagagaagaattcccataatatcgatcagagcctcatgaacatgttcaatgaatttattaatctctacaagcttcgagaaattgccaggggggccctcagtatacttggactaataatcaagttaatccggtgctagttaagttggacaggttccttgtttctactgagtgggaggagagattccctctttgcttttctaaaggattaactagagtggggtctgatcattgtcctattgtgcttgactctggtgagaataatcctaataaatctcattattttttctttgagaataactggcttctccaacaagacttcagggctttgatttcgcaaaaatggactgatcttaaggatcgtaggcctgaaggttcctactcgatggatgggtggcatgggagcctggtttctatcagaagattcttaagagggtggaacagacaaaaaagaggtgatcaaaataagattaaacaagatctgttattaaaactaaaaagcttggatgatggtttggttatgaaggacaatcttccccaaaattggaacgaaagatatagagttgagaaagaattagagcatgtgtatcatatggaagaagtgtattggcaacaacgggccggaaaaaactggattctcaaaggtgactctaattctagttttttccacctgtttgctaacggtaggaggaggaaaaataatattctacagttggtggcagattcttgtaccttggtggaccagaaagatattagcaatcacgtggttgatttttataaacagctttttggaccatctactccttgtgcgatgaagttacgcgagaatttctgggaaggtagaagtgaattatcaattgaggaggccattcacctgattaagccttttgatgaagaggagataaaacaggtgattgaccttatgcatgttgactctgccccgggtccaaatgggtttggagtggccttcttcaaaaacttttggcatataatcaaaggagatcttatgaaaatgtttagagatttccatggaggaaatttagatattcagaggctgaattatggggtcatctccttggctccaaaaattaaagatgccacctcgattaagcaatatcgtccaatttgtcttcttaacgttgatttcaaaattttcaccaaagtcctttctagtaggcttgcccaggtagccaaggtggctgttgggggcaatcaaacaggcttcataaaaaacagaaacattcttgaaggagtagtgatacttcatgaggtaattcatgatttgaaattaaaaaaacagagaggtctgattctgaagattgattttgagaaagcctatgataaggttagatggaattttttagctgaggtcttaaaattgaagaagttcccggacagatggaccaatatggttatgagaacaatggagaatgggaaagtgtgtgtgaacattaatggtgagaggagtaaatattttaagacttttaggggtcttaggcagggcgaccctctctcccctttacttttcaatttggtggctgatgctcttagtgtgctgttggatgtagggattgccaaagggcacatctctggagttttgaacgatgttctaccaggaggtatttcacatatacaatacacagatgacacagtgattatgattgatgggtcaaaaaaaacaattttaaatctgaaattaattttgtattgctttgaatggttatcagggctgaaaataaatttccataaaagcgaggtctttgtgtttggagctgatgaccaggaggaaaaagagatggccaatatgcttaactgttccctgggatccttgccgatgaaatatctaggtatatctatctctgatcataacattaactcagtaatctcggagcctattttggagaaaatgaggaaaaggctagacccatggaagggcaagcacctctcttct

SEQ ID NO: 41861 - DNA, 1283 bp, Zea Mays
atggacaaaaatgccagagttgtagattattatgaggaaggggagtggcatatcgacctcaagcgccccctgacgattgctgattttcaggtttgggatgaacttgttactaagcttgtcgatcaggagctcactcatgggagagatgaggtgaaatggaaggtgttgctatctgaagatgaccaaagcatgttagagaagaaggtagaggaggtgcagtcttggatcttcagcttcaaaagtgttgatggagggggaagcgacatagtagtgatttgaagtattagaaaatctttgttagagatttctctacactttctggagtgtttcagagtgttttactcttagctggtggttcacctttgctgggaggaaaattctggaggtttttctttttctttttggtggagttcatggctcctgtgtgctgtctatattacttctagctgatcggttcactgattgcatcttggctatgctagtctataggttcctttagttctggtggttggttgtctgatgattgtaaactggtatccccagtatgtgtttgaacattgttatatgctttcttaaaagcagagtaaaatctcgtttcaaaaaaaaggactcttttgtatactggtgcagtgtacggaactacggatttgggcatttggcagcacatccacatcagttaccaattaaacaagaaaaaagagttaaaattgtgtgttatgttgaataacttgaaaaggcatcaggatactttcggtttaggtcctgtctggaagcaacccagtttttaagaaactggttttatcttttagctaggagagaccaacctcttggtttttaagaaattggtaatccaatttctataaattgaggcataaactggtatgtttggaggcaacttaattttcataaaccagtttcttgggtcaacggccctgttttcttgcttcgaccacttgagttctatctctgcctaagcaaaatactttctccagaggccagcgcaactggcaaggtggactgggggtggagcagtagtacaaaactaggaaagcgatgtttccagtttccacaactatcgatatcaaacgtgaatagcaccaaacatttaaatggctggtacaagtaataatattaccgatatatctcattacgacggcgaaatatataaaaaataaatcctacagaaagcagagacacgatccccactcccaaaattcagcgagatatatattatcaaatgatagaaggacaaattaaataatgaagaggagggaggagagatc

SEQ ID NO: 41862 - DNA, 598 bp, Zea Mays
atggatcaccaacaaactatccagatccttcttaccaggaactatgcagcaaacatagaccaaagtctctgttgcttggcatctcaaattctgatctatgatcacagaaggaataatctttggtatgtacaacttgtcagttcgatcaactcttatgtataccttcttccatttgatatgagaatgctcggtgaaaaactagagacgttttcctcaactagaacaattcatcattggacagtcatgcaactattgagatcaccaatcctggatccactctggagcagtgagatcatctgggtcttcaatcggcacggaaggagatgcggataagtcctcattaagagtttctatacagtagttgatgcgctcagtgatttcttcaggtgctgcacaagtcccagatgctattcgctcccaatcagtgccatcaaaccaggggtgtttcttcacagcttcagcaccactggttccaaggcgcgcgttttcgtcgaccacgagtagctgttaacatagttataaatgaaaataagcagagctgctgtatgaagttcgaataagctgaaattaaatgaataggtgaactactattttcaga

SEQ ID NO: 41863 - DNA, 668 bp, Zea Mays
atggcacgagaaaggggcgccaggcaaaccgattcgaccagcagacactgcgacgaggactggccgcgggggctgtcgcgtgcacagccacgtcggaatcaaatcctctacagtaacatccttttgacgtatggggccaggcaccggtcggccccacacgtcaaggatgagggcagcaagagcgtcatcgccttcgtggtgtgggccctgacgggtgacggctacaagtttgagaggcctggaacgctggagcatacctacaactatggtgtcaccgacaccgagtatgacaaggggaattgcatatgcccaggtgtgcaatctggttttcttcgcgctaggtccctgcagctgagatgcttctctggacacaacatgatgctgagttgtgagccattgcccttgccagggatcaatccacaccaatgcatgtcacatccatcctggaccctgatgagtgaaatcggtactatccaatgcaccgacgtttttggactatagagaaggatgattcccttcgcttttcgacaaacttcctacggtgttcatatatcgtaattcgtaatgcaggtgttcgtcaacgacatcgactttgccaaggaacaaatgagctcaaacactctgcgaacaggattctgtctcgaaaacaagaacaagcgttagactaa

SEQ ID NO: 41864 - DNA, 1591 bp, Zea Mays
ctcatctatcttcaaggatgtcgtggctcggaacctccgttgaacatcaccgacgagcattttctggacggtcttcttagcgctgatttccgctatatgtcgtgccggagtcgctatgagttcgccgtctaccacaagacttcgtcgcacaagccgtccccctacctcatcgctaacctccggaagcatgaagcgctccagaagcgatgcggccctggaacggccgcgcacaagaaggcagtccggcggctcgactccggtgagggcgtcgtcgacgatgacgatggctgccgctacctcgtctacatcagctaccgtggcctcggcaaccgcatgctcggcattacgtcggccttcctctatgcggtgctcaccgagcgcgtcctcctcgtcgacggcggcaaggacactggcgcgctcttctgcgagccctttccaggaacgacgtggctgctaccgcaagccggctggttctccttctccccgctaagtagactccaaggctacgagggcggctccaaggagaacctcggggacatgctgcagagcggcggcatcaccgtgtccgccgacgggaacgtgtcgtggtcggcgccgcggccgccactgtacctgtacctccacctctccggctcctacggatttcacgacaagctcttcttctgcgacgcgcaccagagactcctcggcgaggtgccgtggctgttcatgtggacggataactacatcgtgccggggctcttcctcacgccagcgttcagcgacgagctcgaggccatgttcccggagaaggagtccgtgttctaccacctcggacggtacctcttccacccgacgaaccgcgtctggcacgccataaagagctactaccacgccaaccttgccgacgtcgaccagcgcgtcggcgtccagatcagggtgttccagaagaagcagccgccacggttcgtgctggagcagatcctgtcgtgcctccgcgacgtgaagctcctctcggggacgaagacggacgcggcaggcggcggcaacggcacgtcgtcctcgttctcgcgcgccgtcctggtgacgtcgctgagctcgtggtactacgaccggatcagggacgagtacggcggcaggatctccggcggcgtgcaccagccgagccacgaggggcggcagcggtggcgcgacgcggcgcacgacatgagggcgctgagcgagatttacctgctgagcatgtgcgacgtgctcgtcaccagcggctactccacgttcgggtacgtcgcgcaggggctcgctgggctgcgtccctgggtcatgcccagggcgccgatgtgggctgccgactggagggaggagctggacccgcgagacatgccgtgccggcgggcagactccgtcgagccgtgcttccacgcaccgtcggcctaccgctgcgcggcggggagggacgtggacctgggcaaggtgtcgccatacatcagacgctgcgtcgacgttaagtacggcataaatcttgtcaatgaaagcagcggacagtggtaacatttgtctaacaaaaatggctacatcatagcgcttagttgcaaaaagattctcaaaatttaag

SEQ ID NO: 41865 - DNA, 1354 bp, Zea Mays
cggccgattccatgtgccgccgctgcgcctgctctagttccggagggcgtcggcctcctaagcagaaacgatgccagcggttgtccaaaaccacagacatcccccaagcccccaacaagaaaccagaggcgagaggaggcagctgcagccggccgctccagctgagagcctcgagacggagagggatctccggatagctatgggtgacgcgaagacttcggtactaatcacgatgcccagccgcgaccgcgaccgggaccggctcgtgcctaccgctgccgttgccacccatgagtccccgtccgccctcactgtcggcgactccgatgacgacaagagcaagccctcctctgcttccgccgccgctgccgccgcgcagaccggccgtgagtgtcatcctcttcccaattgcagttacattctatgtgacatggtggttctttcgctttgtggatgggtttttctccccaatatatgctcacctgggaatcaaaatatttgggcttggttttgtaacatcgatatctttcatttttgtggttggtttattcatgtcatcttggctgggagcatctatccttggccttggagagtggtttataaaacgaatgccatttgttcgccatatttacgatgcatctaagcaaatcagtgctgccatttcacctgatcaaaacaagcatgcattcaaagaagtggtcatcattaggcacccaagaattggcgaatatgcatttggatttatcacttcggaagttctacttcagggttattctagtgaagaacagatgtactgtgtttatgttccgaccaaccatctctatattggtgacatatttctggtcagctcaagtgacgtgattagaccgaacatgtctgttcgcgaaggcattgaaattgttgtctctgtgggcacatcgatgcctcaagtattgtcgattctggaaactgagccaaaccagttgaacaggatcagatccacccgaagctgagatgacttcacattttgtaatttcgtgttacaaagtccttgttgtacaagagtaggttctgacagattgtacagttctcctgggtagaaagcaaaatctgtttgtgaacacatctcacctgaacgcgattgcttgtatggccgtctcagcttcttcagaaatgtaacttagcagttgagtagagttgacctatgttaagagttgtcaagttttgaagtggaagaattttcttaaccatttggtttatgtgtccagggagtcttgtgaggcctgtttgaatgggagggattcattttttttacagtctggttcaaacttgacctgaattccaaaaagattattcaattacatgatcgtgtaaa

SEQ ID NO: 41866 - DNA, 915 bp, Zea Mays
aggtgtgcttgccagttatccaaacacatatctagctgcgaatcctctctgggcaaggccagggcttggttttgtaacatcgatatctttcatttttgtggttggtttattcatgtcatcttggctgggagcatctatccttggccttggagagtggtttataaaacgaatgccatttgttcgccatatttacgatgcatctaagcaaatcagtgctgccatttcacctgatcaaaacaagcatgcattcaaagaagtggtcatcattaggcacccaagaattggcgaatatgcatttggatttatcacttcggaagttctacttcagggttattctagtgaagaacagatgtactgtgtttatgttccgaccaaccatctctatattggtgacatatttctggtcagctcaagtgacgtgattagaccgaacatgtctgttcgcgaaggcattgaaattgttgtctctgtgggcacatcgatgcctcaagtattgtcgattctggaaactgagccaaaccagttgaacaggatcagatccacccgaagctgagatgacttcacattttgtaatttcgtgttacaaagtccttgttgtacaagagtaggttctgacagattgtacagttctcctgggtagaaagcaaaatctgtttgtgaacacatctcacctgaacgcgattgcttgtatggccgtctcagcttcttcagaaatgtaacttagcagttgagtagagttgacctatgttaagagttgtcaagttttgaagtggaagaattttcttaaccatttggtttatgtgtccagggagtcttgtgaggcctgtttgaatgggagggattcattttttttacagtctggttcaaacttgacctgaattccaaaaagattattcaattacatgatcgtgtaaa

SEQ ID NO: 41867 - DNA, 1430 bp, Zea Mays
gaattgaggatatgactcagtatatagggtaatgtatgtaggactcgagagactgagccctataattatttgatgaaattttataaaatagagccaatgttggaagagtgttttatggttttgattcatataattaaaataggattatgtttagagtctttatgatcttagctacctaattccactgccaatttttagccaaataactagctaaacaaacacccctcggcactgatagaagagagaagaaacagacagcctaaagcccttcctctctcctcggcgccggaatggcgaaaagcggcggcgagtccactgtggaggttcctattcccgcttccgcgtcggctacgaggccgaaggcgaaacaccgtatagagatcgaggggtaccctgtggatggcgtctccattggcggtcaagagacttgcgtcatcttcccgactctgagcctcgccttcgacatcggccggtgcccgcagcgcgccgtctcccaggagttcctcttcgtctctcacgggcacctcgaccacatcgggggccttcccatgtatgtggccacgcgggggctcttcaggctgcgtccgcccaccatcttcgtccccgcgtgcctccgggacctcgtggagaggctatttgaggtgcaccgcgccatggaccagtccgagctcaaccacaacctggtccccctggaggtcggggaggagtacgagctcaggagggacctcaaggtcagggctttcaggacctatcacgccatacccagccaggggtatgtgatatactcggtgaagcagaagcttaagcaggagttcattggcctaccagggagcgagatcaagcggctcaagctatcaggtgtggagatcacaaatacggtgtccacccctgaaattgctttctcgggggatacaacagcagatttcattcttgatccggataatgcagatgtgctgcaggcaaaaattcttgttgtcgagagtacctttctagacgactcaatttcagttgagcatgcaagagaatatgggcacacacatttatttgagataacaagtcaggccgacaagcttcaaaacaaagctattctactgatccacttttctgctcgttatactacagaggaaattgatgcggcaataaacaaattgccaccgtctttccgtagcagagtttatgccttgaaggaaggcttctaataaaaacatgaaccaggaaatcagtattgaagttttgtcggagcagttttccaaattggattgcgtgggtatttttcaccggaaacctttttgctatgtgtgctctgatgatactataccaatcatctgaaggttcatgcggggctttttgttgtcggtactcatgcttgtgacattggaatgtttgaatggtgaaatgcgaaacatcatgtccagaacaggaactctcct

SEQ ID NO: 41868 - DNA, 849 bp, Zea Mays
ttatttctgtgaaacaggggggggaaatcgtactagcattacaccaactgaaggtccacagtactttggaccttgagaaaactgcattgggtggggtggtcaaaagcggtaccagcaagcaaatcaatgaactggggccaaaacttgcgagccatgtaacggacaattcgacagaatagtgtgcacgaaccaagcaaacgaataagaaatagttatatgagctcctatctcgtactgcattccatccgattctaattcctaaggtagagtgaatggaaaccctcacctggtccagttctccgccgccgccgtgctcccgaccggcggcgatggccctcccaccccgtcgcctgctccggcgtacctcccgcgccacgtcgtggatctcccagagactggcgccgagctggcgcgccgaggccgagctcctcctcgccgcggcggaagcggccgcaggcgcaagcgcggacggcccctcccggactccgtcgtcctccatcttccacgacggcgtcggtgtgacaggtcccgcccgccgacgggccctcccgaggcgcagccgcagcggcacctcccgccccccgcggctcgccttcacggagccctcgggccccgtctgttgcacctcgactctggccccggccccggaagccggctccgcagcgacagcctcggcgcgctcggcccctcgtggcgctgcgggggcgggcggttccatgcctatgtccctgcacccgagcagacatgcacgcggcgaaggctagggcctcctagtccatggtagagggttgagctggcagagggacagggaagagtgggaggaccggaggagggtctgcttgtcctttt

SEQ ID NO: 41869 - DNA, 1797 bp, Zea Mays
gcatagaacagtaggcctcactcctttttaggacaggatccaatgcctttggccctctgcccatcactccccctctctctccttttactcttcctgtagtctcctcactcttccaaccaaaacaatcaataaactagcagaagtcagcgcctccctcctccgcccgtttcctcaagcgacaagaacccaaccactccgcgtcgtcgtctgctgccaatggaggaggagcgctgcttcaacaactgggatctggacgccgtcgtgcgcttgggctgccgccgcctcctctccccgtcgccgcagcccgacccgttcgcttcgtttctcccgccgccgccgcagaaggagaagcccgtggcgccagcgccggctaaagagccagagccacataccgcgtggcgcttccctgaccttggtgctggcggcgggcaagacggcgaagagctcctcagggccctgttagccgaccagcctcccctgcatcagcctctgccaacgccagcggcaacgccaacgccaacgccaacggcaacgcctcccccaccatcacaacagcagcatctacagccgactgtgacagccgtggacgtggctccaccccaggaagaaccaggtgaagaaggtggtctgccacgttccggcggacggctcgtcgccggacgtgtgggcgtggcgcaagtacggccagaagcccatcaagggctccccctacccaaggggatactaccgatgcagcagctccaaggggtgcgcggcgcggaagcaggtggagcgcagccgcgcggaccccaacactttcatcctcaccttcaccggggagcacaaccacgcggcgccgacccaccgcaactcgctcgccggcaccacccgccacaagttcccgtcgtcggcggcgcctcagccgccgccgccgtccgtcgtggtgggcggtgacgcgcaggaccggcagccgagcccgagcccgacgtccacgtcgaccgcggggctctcgcccacgacgccgctgcgcacgccgtccatggaggaggaggaggaggaggaggaggaggaggaggaggaggacgagctgctggtggaggacatggagatggctggcgaggacgagctcctgttcctcagcaccgacgccgacgccggggcaccgacgtcctcgctcttcgacgtcgtcggcgagcccttcctaagccctccctgggtgacagccgccagcagcgccggcgagccagccacaggggcagccggcgctgggagctgacttcttctagagagagatgtgccgtctgtccttgcagatggagcaaaatcaagggaggagaagagagcatctgatgtcccattctagtagtagttctagcatcggtagtcagccctgactagtacgtacagagcttgatgcatcaaccgaccctcaagcagttcttcttctttcctgatcagaagaacatctttgcatcctgttctttttgctctttttttaggtatggttggcactctgcatctcttttctttaggtgcctgttttttgttttttttttgcatttgtgtatagaaagtggtagatgatgaaccaacaaaagaagtgaaaaaaaactaaagaagaaaagtggatcatggtgtggtttagttggctcttcttgctgcttcttttcccctgctcaacgacttctttcttcatgtgttctgaagagagacgacaaccctttagcggcaattttaatcgctttcgttgtcctcaggaatgaaaccctccatccatctttgcctttttgatggttccatgccgctccgtcgatggat

SEQ ID NO: 41870 - DNA, 2617 bp, Zea Mays
cacccacccacctccgcggctcccaagccctagatgtccccttcccactcctcctgcctccgcagcgccgccgctgccgcctgcgccccgagccgatcaccccagatctcgcgcgaatcagaggtcccgcgcctccccgtggcccgattcgccgtccgtgcgcccgggaacggcgccgatttgagacggttttggaggtgaggcggggtgcgatttaggtggtcctgggccttgcgggcccggtggatggatgcagtggaactgccgttaccagccaaggtggagttcgggaaaatcctggcgcaggcagccgcggtggagggggtggacggaggcatccccggaggcgggggcggggaggtgctcaggcgctgcgccgacgcggaccggcggcacgatgtgaagcagcacaatcagaatgcagaaggctttccatctcatagaagtaaaaggatgtctttggaagtctctatgcagaaatctcttggttttggcttgaagtctgataatggcaaacatgattatgttgcaaatgatacggttcaatccctgcataagcaagatagtaagatagtgataaaaaagaccataaaattgttggacggtccaccttatccaaaaaggccaaagcttgagccagcacaaactggtagagatgctgaggctaagggacatgaattcatatcacagaagaatgtgcctgatttaacaccatgcacaacatctgaaaaatctcggttgctcaagcagaagcgcatttctgatggaaagagaactgataagaagaatattaggtctggtgtcagatcgaaacatgattgtttctcatcaaaggctggtttagcaaattttgattctggtttctcaggaaacagcgtgcttgtattccagtttaggaagagataaaggaaagaaggtattgcacacgaaggaggaactcctagtctctgtcagaaaaactttttctatgctttctgacatggactatcgccatggaaaggactctaatctcattctgagccctaaactttcttctgcaagtacttctagctgtgatatcaaagaacaatgtggtgacaagccacccctcttggttaaggacccatcacaaattaatctctgtgatagtgcactttgtcatccaaaagatatcttaagccgtttaactcttcctcatcgacaagatctagactctcttttagcacccggaagggagagcacagctgcagttaagccttatatgccttccatgacagttcatggagctagtttgccaccatttccttggtcacattcacaggctgggggctgtcgacaaggtgttgactgtggtaaacatggatcaagtaggagtaactcccagtggcaatgggtgcgggttggctccaacctcacttctctagatcatgaagacacgtctgtccatagaattgatgatctccttcaagagatggatgcagcaaaattatgtatattggatccatgtgatggacaacataatttgtgtggcacagaatcaacttctggatcacttgtacaaaacattcactccagaaaaattgggggtgagcatggttctcagcaactgcagccccaggatcatcttgactctttagatggtttccagaagcatgacattgattattctcttttaaaaacatctcaagtatcgccaaagatacagtgcgccgctgagatcttatgtgatatgagaaggagcactgaatcatggattggccaaggatacagcaatgggacaattaagtggccaaaatcaccacctgaaaaggcgatgaaagcccggaagccctcatcccagtttggtacaactgagagctcgtcaggttctcgtaacaatgaggcaacttggaatgggagcagtcactctaccaagaaaattgttgacaggaacaatgattctgcacgcttgaataaccctggtaagggaactataagatggcctgtccctgttgaagacaatgcttctcctgtcaggtccgagcggggtcttatggtcgacatgaggcagccccatggaaatggcggaaggcatctggtccaggtgtcatcacagacacggcttgagaaggagtatgagaaccagcagaagttgaggaaggcaacactgacctcttctctaggatctgcaggagattggaatagggagaagaacaggagaatgtgaagtgtacattattcatgtcaaaatcatagggtacggtatatcgtctgggggacagcgggaaccaggcaactgtttcataagaggtcacagaacattggcagatgtcataatttaggtggctggtgatgtatctattgggccatttgttgttggggggaaactgctgtatttagtgtaatttattttttattgccatcgtatcacaggtctcgtctcaaagtcgcccgttttgtattatatagtactattattatgtgtcgacttattcgtaaaagcaataatagcaggcgaggtaattgcgttccaggcgtcagccctcagtagtttacggcgcgagcggattatctgcggtaactttctggacgtagccgcgggtggatcacggcggtggtcggaagttaccgtagaggatccagctgcggaagctcagtg

SEQ ID NO: 41871 - DNA, 2547 bp, Zea Mays
attgatctttttgtctatttgtgtttcttttcgagtattgagtattttctgaagatcaattctattttcctcttaaatttcttatatttatattttttggggacattcaagagagctgtttgtcatttatcagagaatcaaagaaaggatcggtcccttccggagccctagggtgatgaccaaacttagacatgcacgcagaaacactagttatccttgctgattgtgacatttacacatgtgaagcagcacaatcagaatgcagaaggctttccatctcatagaagtaaaaggatgtctttggaagtctctatgcagaaatctcttggttttggcttgaagtctgataatggcaaacatgattatgttgcaaatgatacggttcaatccctgcataagcaagatagtaagatagtgataaaaaagaccataaaattgttggacggtccaccttatccaaaaaggccaaagcttgagccagcacaaactggtagagatgctgaggctaagggacatgaattcatatcacagaagaatgtgcctgatttaacaccatgcacaacatctgaaaaatctcggttgctcaagcagaagcgcatttctgatggaaagagaactgataagaagaatattaggtctggtgtcagatcgaaacatgattgtttctcatcaaaggctggtttagcaaattttgattctggtttctcaggaaacagcgtgcttggagcacatggccttaaatctgatattcgtgacatcacacatcacattgagaacctgtcattgatcgaacttcttgatggcacttacaagtattccagtttaggaagagataaaggaaagaaggtattgcacacgaaggaggaactcctagtctctgtcagaaaaactttttctatgctttctgacatggactatcgccatggaaaggactctaatctcattctgagccctaaactttcttctgcaagtacttctagctgtgatatcaaagaacaatgtggtgacaagccacccctcttggttaaggacccatcacaaattaatctctgtgatagtgcactttgtcatccaaaagatatcttaagccgtttaactcttcctcatcgacaagatctagactctcttttagcacccggaagggagagcacagctgcagttaagccttatatgccttccatgacagttcatggagctagtttgccaccatttccttggtcacattcacaggctgggggctgtcgacaaggtgttgactgtggtaaacatggatcaagtaggagtaactcccagtggcaatgggtgcgggttggctccaacctcacttctctagatcatgaagacacgtctgtccatagaattgatgatctccttcaagagatggatgcagcaaaattatgtatattggatccatgtgatggacaacataatttgtgtggcacagaatcaacttctggatcacttgtacaaaacattcactccagaaaaattgggggtgagcatggttctcagcaactgcagccccaggatcatcttgactctttagatggtttccagaagcatgacattgattattctcttttaaaaacatctcaagtatcgccaaagatacagtgcgccgctgagatcttatgtgatatgagaaggagcactgaatcatggattggccaaggatacagcaatgggacaattaagtggccaaaatcaccacctgaaaaggcgatgaaagcccggaagccctcatcccagtttggtacaactgagagctcgtcaggttctcgtaacaatgaggcaacttggaatgggagcagtcactctaccaagaaaattgttgacaggaacaatgattctgcacgcttgaataaccctggtaagggaactataagatggcctgtccctgttgaagacaatgcttctcctgtcaggtccgagcggggtcttatggtcgacatgaggcagccccatggaaatggcggaaggcatctggtccaggtgtcatcacagacacggcttgagaaggagtatgagaaccagcagaagttgaggaaggcaacactgacctcttctctaggatctgcaggagattggaatagggagaagaacaggagaatgtgaagtgtacattattcatgtcaaaatcatagggtacggtatatcgtctgggggacagcgggaaccaggcaactgtttcataagaggtcacagaacattggcagatgtcataatttaggtggctggtgatgtatctattgggccatttgttgttggggggaaactgctgtatttagtgtaatttattttttattgccatcgtatcacaggtctcgtctcaaagtcgcccgttttgtattatatagtactattattatgtgtcgacttattcgtaaaagcaataatagcaggcgaggtaattgcgttccaggcgtcagccctcagtagtttacggcgcgagcggattatctgcggtaactttctggacgtagccgcgggtggatcacggcggtggtcggaagttaccgtagaggatccagctgcggaagctcagtg

SEQ ID NO: 41872 - DNA, 2359 bp, Zea Mays
ttggtcatgcgatggggatgcccagatttccagtgtgccttatcgcctagatgtgaagcagcacaatcagaatgcagaaggctttccatctcatagaagtaaaaggatgtctttggaagtctctatgcagaaatctcttggttttggcttgaagtctgataatggcaaacatgattatgttgcaaatgatacggttcaatccctgcataagcaagatagtaagatagtgataaaaaagaccataaaattgttggacggtccaccttatccaaaaaggccaaagcttgagccagcacaaactggtagagatgctgaggctaagggacatgaattcatatcacagaagaatgtgcctgatttaacaccatgcacaacatctgaaaaatctcggttgctcaagcagaagcgcatttctgatggaaagagaactgataagaagaatattaggtctggtgtcagatcgaaacatgattgtttctcatcaaaggctggtttagcaaattttgattctggtttctcaggaaacagcgtgcttggagcacatggccttaaatctgatattcgtgacatcacacatcacattgagaacctgtcattgatcgaacttcttgatggcacttacaagtattccagtttaggaagagataaaggaaagaaggtattgcacacgaaggaggaactcctagtctctgtcagaaaaactttttctatgctttctgacatggactatcgccatggaaaggactctaatctcattctgagccctaaactttcttctgcaagtacttctagctgtgatatcaaagaacaatgtggtgacaagccacccctcttggttaaggacccatcacaaattaatctctgtgatagtgcactttgtcatccaaaagatatcttaagccgtttaactcttcctcatcgacaagatctagactctcttttagcacccggaagggagagcacagctgcagttaagccttatatgccttccatgacagttcatggagctagtttgccaccatttccttggtcacattcacaggctgggggctgtcgacaaggtgttgactgtggtaaacatggatcaagtaggagtaactcccagtggcaatgggtgcgggttggctccaacctcacttctctagatcatgaagacacgtctgtccatagaattgatgatctccttcaagagatggatgcagcaaaattatgtatattggatccatgtgatggacaacataatttgtgtggcacagaatcaacttctggatcacttgtacaaaacattcactccagaaaaattgggggtgagcatggttctcagcaactgcagccccaggatcatcttgactctttagatggtttccagaagcatgacattgattattctcttttaaaaacatctcaagtatcgccaaagatacagtgcgccgctgagatcttatgtgatatgagaaggagcactgaatcatggattggccaaggatacagcaatgggacaattaagtggccaaaatcaccacctgaaaaggcgatgaaagcccggaagccctcatcccagtttggtacaactgagagctcgtcaggttctcgtaacaatgaggcaacttggaatgggagcagtcactctaccaagaaaattgttgacaggaacaatgattctgcacgcttgaataaccctggtaagggaactataagatggcctgtccctgttgaagacaatgcttctcctgtcaggtccgagcggggtcttatggtcgacatgaggcagccccatggaaatggcggaaggcatctggtccaggtgtcatcacagacacggcttgagaaggagtatgagaaccagcagaagttgaggaaggcaacactgacctcttctctaggatctgcaggagattggaatagggagaagaacaggagaatgtgaagtgtacattattcatgtcaaaatcatagggtacggtatatcgtctgggggacagcgggaaccaggcaactgtttcataagaggtcacagaacattggcagatgtcataatttaggtggctggtgatgtatctattgggccatttgttgttggggggaaactgctgtatttagtgtaatttattttttattgccatcgtatcacaggtctcgtctcaaagtcgcccgttttgtattatatagtactattattatgtgtcgacttattcgtaaaagcaataatagcaggcgaggtaattgcgttccaggcgtcagccctcagtagtttacggcgcgagcggattatctgcggtaactttctggacgtagccgcgggtggatcacggcggtggtcggaagttaccgtagaggatccagctgcggaagctcagtg

SEQ ID NO: 41873 - DNA, 3193 bp, Zea Mays
aagagattatattcagatagttaaagtgcctaacagcagttgattaactgatttagtgagctctagttaggtaaagattggctcacctttttttgtttctggaattgatggcattgggtcagcacatcccattaggaaatggactttagccatctcattatagtaagtctagaaatcagttggcagaccgaatgagccaaaaagaagaaaaaaatgtgcccgatgttcctgctacttactggacactttgctcatacaaaattgatagccactcattaacaagatctgccatattagttactacttgtcatactttttttaaatcaggtttcagaatgcagattcaatgagccaaaaggaagaaaaaacatgtgcctgttcttcttgctgcttactggccattttgctcatacaaaattaatagccactcattaattagacctgcagtactaattactacttgccatacttttttttaaaatttgtatatacacacacatttgatttgatgtagttgagtgctcatttgttctactcgcattaatgcacatgatgctgttcggtttgatatgctgacaataaataattttgcacttatcctaattatatacagaaaaatctcggttgctcaagcagaagcgcatttctgatggaaagagaactgataagaagaatattaggtctggtgtcagatcgaaacatgattgtttctcatcaaaggctggtttagcaaattttgattctggtttctcaggaaacagcgtgcttggagcacatggccttaaatctgatattcgtgacatcacacatcacattgagaacctgtcattgatcgaacttcttgatggcacttacaagtattccagtttaggaagagataaaggaaagaaggtattgcacacgaaggaggaactcctagtctctgtcagaaaaactttttctatgctttctgacatggactatcgccatggaaaggactctaatctcattctgagccctaaactttcttctgcaagtacttctagctgtgatatcaaagaacaatgtggtgacaagccacccctcttggttaaggacccatcacaaattaatctctgtgatagtgcactttgtcatccaaaagatatcttaagccgtttaactcttcctcatcgacaagatctagactctcttttagcacccggaagggagagcacagctgcagttaagccttatatgccttccatgacagttcatggagctagtttgccaccatttccttggtcacattcacaggctgggggctgtcgacaaggtgttgactgtggtaaacatggatcaagtaggagtaactcccagtggcaatgggtgcgggttggctccaacctcacttctctagatcatgaagacacgtctgtccatagaattgatgatctccttcaagagatggatgcagcaaaattatgtatattggatccatgtgatggacaacataatttgtgtggcacagaatcaacttctggatcacttgtacaaaacattcactccagaaaaattgggggtgagcatggttctcagcaactgcagccccaggatcatcttgactctttagatggtttccagaagcatgacattgattattctcttttaaaaacatctcaaggtaggccaaagtctatttgggaaaaagttactctgatatacatattaccttgctgaaaatagtacttcattccaaactgtaagttgatttgacttttctaggtacatagattttgttgtgcacctagatatacacaatgtctaaatatagtatatgtatctagaaaagtcagaatggcctataacttcgaacggacagagatttggaatggagggagtagctgctaagaaatactatatgtatctagaaaagctaaaatgacttacaatttggaagggagggagggagtagttgctaagaaatttgaatatttcgacaaaagtattttgcttatagaacactattctagatgtacttgtacaaatgctttgttggcctcacatattaaacattatactgaaccatattatgccatatgtgttatcatgtagcatttgcaagttaagccagaatagaagtacctaggaattctttatccctatagctaggcactcgttctatatcggaaaataatattttctgtccattcatctagtattactcattttcagtttatcttattttgataatacttacgtgagctttccttccccaaaagcagtatcgccaaagatacagtgcgccgctgagatcttatgtgatatgagaaggagcactgaatcatggattggccaaggatacagcaatgggacaattaagtggccaaaatcaccacctgaaaaggcgatgaaagcccggaagccctcatcccagtttggtacaactgagagctcgtcaggttctcgtaacaatgaggcaacttggaatgggagcagtcactctaccaagaaaattgttgacaggaacaatgattctgcacgcttgaataaccctggtaagggaactataagatggcctgtccctgttgaagacaatgcttctcctgtcaggtccgagcggggtcttatggtcgacatgaggcagccccatggaaatggcggaaggcatctggtccaggtgtcatcacagacacggcttgagaaggagtatgagaaccagcagaagttgaggaaggcaacactgacctcttctctaggatctgcaggagattggaatagggagaagaacaggagaatgtgaagtgtacattattcatgtcaaaatcatagggtacggtatatcgtctgggggacagcgggaaccaggcaactgtttcataagaggtcacagaacattggcagatgtcataatttaggtggctggtgatgtatctattgggccatttgttgttggggggaaactgctgtatttagtgtaatttattttttattgccatcgtatcacaggtctcgtctcaaagtcgcccgttttgtattatatagtactattattatgtgtcgacttattcgtaaaagcaataatagcaggcgaggtaattgcgttccaggcgtcagccctcagtagtttacggcgcgagcggattatctgcggtaactttctggacgtagccgcgggtggatcacggcggtggtcggaagttaccgtagaggatccagctgcggaagctcagtg

SEQ ID NO: 41874 - DNA, 816 bp, Zea Mays
ccaagatctcgctggtcgattccaccatgcggtattactgtgactactgcgacacctacctgacccatgactcgccatctgtccggaaacaacataatgctggatacaaacacaaggcgaatgttcgaacctactatcagcaatttgaggagcagcaaactcaaagtttaattgatcaaagaatcaaggagcatcttggacaagctgcagctttccaagcaggtgcccctttcaaccaacatctgcttgcattcccaggagctatggcccgccctcgtcttccaattctgccaacccctggcatgcctcatgggtttcctcaagcacctggcgcaccattgatgccaggaattaggcctccagccatttaccaagcaaatccacaagcatctgcaggtccaacttctggtgctcctccagctccaccgactgctccacagcctgcgttctcctatgctcccccatcagaggggaaccactgattctgttccttaggcatgacttgggaggccatatgaagtatgtgcagaaaggctgttcctttggaggttgatgttgtcatcttttaactaaggtcatttctatcatcctgaattcaagatattattgagaaaatcttccaatttgtgtggctgggtctctgttgttcgatgcatgttaactatgttagtttttatataaatttcaataaaaaggacgcttgaaaaatcaaaactaaattctctgagaattgtttgtggcatgggatgcttgaactcggtgttgtgattcgccagtattcatgttttagatgttcttatgtccacttttaccatc

SEQ ID NO: 41875 - DNA, 799 bp, Zea Mays
gtctgtgctgcactgtattactgtgactactgcgacacctacctgacccatgactcgccatctgtccggaaacaacataatgctggatacaaacacaaggcgaatgttcgaacctactatcagcaatttgaggagcagcaaactcaaagtttaattgatcaaagaatcaaggagcatcttggacaagctgcagctttccaagcaggtgcccctttcaaccaacatctgcttgcattcccaggagctatggcccgccctcgtcttccaattctgccaacccctggcatgcctcatgggtttcctcaagcacctggcgcaccattgatgccaggaattaggcctccagccatttaccaagcaaatccacaagcatctgcaggtccaacttctggtgctcctccagctccaccgactgctccacagcctgcgttctcctatgctcccccatcagaggggaaccactgattctgttccttaggcatgacttgggaggccatatgaagtatgtgcagaaaggctgttcctttggaggttgatgttgtcatcttttaactaaggtcatttctatcatcctgaattcaagatattattgagaaaatcttccaatttgtgtggctgggtctctgttgttcgatgcatgttaactatgttagtttttatataaatttcaataaaaaggacgcttgaaaaatcaaaactaaattctctgagaattgtttgtggcatgggatgcttgaactcggtgttgtgattcgccagtattcatgttttagatgttcttatgtccacttttaccatc

SEQ ID NO: 41876 - DNA, 1103 bp, Zea Mays
gaatttgatatactgaaccgacggctttcaatcggaagggcccctgtccccctcctaagtcctaactcctatccacaatggcacaatattatcgctgccctcccctttcgtcatccatgacttccctccccgccgcggtcatggccaccgcgacgacgctgcccctaggcctcctcccctccaaaacgctgaccctctcccctctcccttctgcgcgccgatccctctccatcgccgccgaggagcccgcggtaccggagcccgtagaggcgcagctcgccgccgcgggggctgggaaggacgccgacatcttcgctgttgtcatgattggttcaagacaatacattgtgatgccgggcaggtatatatacacacagagactgaaaggtgccaatgtcaatgatcagatcatattaaacaaggtgctactggtgtcaactagagaaaaagcttacattggcatgccagtggtgaccaacgctgctgttcacgcagtggttgaagaacagggacgtgatgataaagttatagtcttcaagtacaagaagaagaagaagtaccagaggaaacttggtcacagacagccaaacacaaggttaagaatcacaggcataagtggatacgaagagtaccctgctgacccaatacttgaccctgctgcagcttaagctaaattgtaagttatgtagttacaaatcggctggtagtacagtagcatgcaagttttgttcttgtttactttttttttctctggaaggaacacttttcatcaaaattttaccttgttttgtgttccaaatgctgccagtcaacaagtggttccatgtatttatttcatgagctcttattcttgttccttttcaacttgtgtgtgctagccactagccagttgtattacatgacattccataaagaagagatttctttttactacaagttgggcattctagccttcatttgggcagtttgcatggtaggtgatacgctcaccacttaaatttgttagtttggtggtattgtatagatttgtgctgcatccgatgtcataatattattatttactgagtgatcgtgacaatacgagtataaagcaatttgcgcag

SEQ ID NO: 41877 - DNA, 3195 bp, Zea Mays
tttccttttgtttttagaaatgggatccagcgcgcctattgggtgagtgagcctcagcaaaagcgggtcaggccgtcagatactcagatcactgggatcaacgagtaaggaggccgacacgtcagcggggacacccactccacacctcctctcgtgccaaaagcccaaaaccaacggcaccaggatggctggcgagtggcgacccggacgccgccgcgaccattcctcgctcgcccgcccgcctgacgcctcggcgctgcggggcccacgcacaatcccaggcagcgctcaccagcatctctctgctccatttctcctcgtccctccggcatcgcatcgcgtcaccgccgcctctcgctttctcccctctcccccctactgcgtctccgaggcgcggacgacggcgacgaagcgaacggccccgccgcctagagattcagtcattcggctggatgagagttgttgctggagacttacgagtgtagcactgttgtcggcttgtgattaaatagcatcacttcacatacagcactggataatggatcgtagggatacttcagggtttgttagtggagggtgcaaaaataatgaagcctactgatttctgtagatcttctaaattggtagctttgttgacaattatttaacccagaagtgaggccagctggtacttcccataaagcttggttactctaggagcaatggatcccaggcacgggcgttcagcattcactataagtttctcaaatccaaatggctttgcgtatcagtgcactcccattccagccgtcagttatccagcaactggttctagccagcttgatgtgctagctcctagaggttgcaagagaaagtggactgagttggccctaggtctgggtgactcatcaagctcagacagcagcaagaggagcatgggtactggctgcactgtatcttctgccaagggaagcgatgacgtctcatgtatggactacgacataggttttgagctatctctcggcaatgaaggtacttcgaggctgtgtaaacaggcctgtgactctacaaggaccatggagaagcctgggttggatcttaagttatctttggctccatctcaatctgatgtaactgatgcagatgtaattagaagcagtgcacctcaggacatgtttgtgcatcatcagtacttaatgtcgtcagcgccaacagttgatgaaggatctacatccgctcgacgcttatctggaggcatggtgggttcgtttcttaaccaggatgggatttctctggaccaagcgctcccggttaaccctaatcaggttcaagtcccagctccttcagcaccaaaaagttcagctgcctcttcttctgggtttgtccatccacagcagcgcagcagtatcacaaaaatctgttcgcacccaggctgtgcaaaaggagcgaggggttcatctgggcggtgcattgcgcacggtgggggcagaaggtgccagaaaggaggctgcagcaaaggagctgagggaaagaccatcttctgtaaagcccatggaggggggaagcggtgtgaacaccttggatgcaccaaaagtgcggaaggccggactgatttctgcatagcccatggcggcgggcggcgctgcagccatgaagggtgcaagagggcagcacgaggcaaatcgggcctctgtatcaagcacggtggtgggaagaggtgcgaaaagccaaactgcacaaagagcgccgaagggcgttcaggcatgtgcattgcccacggtggcgggcgccgctgccagtacgctggctgcgggaagggagctcagggcagcaccagtttctgcaaagcccacggtggcggcaagagatgcacacgccccgactgttccaagggcgcagagggaagcacggcgttctgcaaagcgcacgggggcggcaagcgatgctcggctgacgggtgcacgaagagcgtgcatggtgggacccagttctgcgtcgcgcatggaggcgggaagaggtgcgtggtggaaggatgcaggaagagcgcgagaggccggagcgaccgctgcgtcgggcacggcgggggcaagcggtgccactccgctggctgtgggaagagcgcacagggaagcaccgatttctgcaagtcgcacggtggaggcaggcgctgttggtggggacatctcgggtcgggtggcgctccttgcgaccgtctggcgagaggcagaaaggggctatgcgatcgacacaacccgctggtggacgacaacagcgtccacgggggtgtatcgtttggtggtttttccaccctttctgagggaggcgccgaaacaagcttcttcatgcacacggtggaggatcctcgccacgtggcgccatcggcccgtgaaggccgggtgcatgggggcaactttatgcctttcatgctggatggtggtgtgggactcggcaagaagccagccaacaacgctgactctagtacctctgcccctcgcagctgcaaaaatatggagaagcctggtgcctctgcgcagcgcagctggctgtgatgccagaagtccgtggcccgcccgcccttccccatctcggtgtgctctgctcgattcaagtatctcccctgccctctggtgtggtgtgaaactgaaatctattatgcgtggactgtcggtgtgtagactggttggtcaggacatgtttggtagtgtggacgttgtggtttgtttgtgcttttttgcatcagtcaatcagtctggtcgaacatacctggtagcaagagtagtgtgtgaatggcctgtaaaaggaacccatcatcatgatgtatgtatatatctaaataataaaaggaggaaggctgcatcagtcggtgtaattaatcgaagtgttaatggtacgtactgcttccatgggctggtatggttttttttatatttatgtatatatgtatttaaaatttaaaatgttgttcaacactgtttgtggcactagtcatgaccgggcggtctgatccgtacggtccgccttttgggcgtggacagtccgcgattggatcagagtaggcggattaatcctatctctacgcgtgtttatcactctaaactcgtgggagttgttggaggacgctaaactcgtgggagttgttggaggatgactaggaatgagtccagacctcttcttatatatttgaaggggtacagacgattgaagcatcaactatcg

SEQ ID NO: 41878 - DNA, 3150 bp, Zea Mays
cgctcgcccgcccgcctgacgcctcggcgctgcggggcccacgcacaatcccaggcagcgctcaccagcatctctctgctccatttctcctcgtccctccggcatcgcatcgcgtcaccgccgcctctcgctttctcccctctcccccctactgcgtctccgaggcgcggacgacggcgacgaagcgaacggccccgccgcctaggattcgtttgcccctggagagcttgcaagatcgttcagttcttagctcaatccgtgtcgttggggaaccgttctgagtgagatctttagtggtgtctgggcctatgtgggaggcacatttgctgggaattagggcaatcgacttttaagtacatttggtgtacggctgtttgattattactgagattcagtcattcggctggatgagagttgttgctggagacttacgagtgtagcactgttgtcggcttgtgattaaatagcatcacttcacatacagcactggataatggatcgtagggatacttcagggtttgttagtggagggtgcaaaaataatgaagcctactgatttctgtagatcttctaaattggtagctttgttgacaattatttaacccagaagtgaggccagctggtacttcccataaagcttggttactctaggagcaatggatcccaggcacgggcgttcagcattcactataagtttctcaaatccaaatggctttgcgtatcagtgcactcccattccagccgtcagttatccagcaactggttctagccagcttgatgtgctagctcctagaggttgcaagagaaagtggactgagttggccctaggtctgggtgactcatcaagctcagacagcagcaagaggagcatgggtactggctgcactgtatcttctgccaagggaagcgatgacgtctcatgtatggactacgacataggttttgagctatctctcggcaatgaaggtacttcgaggctgtgtaaacaggcctgtgactctacaaggaccatggagaagcctgggttggatcttaagttatctttggctccatctcaatctgatgtaactgatgcagatgtaattagaagcagtgcacctcaggacatgtttgtgcatcatcagtacttaatgtcgtcagcgccaacagttgatgaaggatctacatccgctcgacgcttatctggaggcatggtgggttcgtttcttaaccaggatgggatttctctggaccaagcgctcccggttaaccctaatcaggttcaagtcccagctccttcagcaccaaaaagttcagctgcctcttcttctgggtttgtccatccacagcagcgcagcagtatcacaaaaatctgttcgcacccaggctgtgcaaaaggagcgaggggttcatctgggcggtgcattgcgcacggtgggggcagaaggtgccagaaaggaggctgcagcaaaggagctgagggaaagaccatcttctgtaaagcccatggaggggggaagcggtgtgaacaccttggatgcaccaaaagtgcggaaggccggactgatttctgcatagcccatggcggcgggcggcgctgcagccatgaagggtgcaagagggcagcacgaggcaaatcgggcctctgtatcaagcacggtggtgggaagaggtgcgaaaagccaaactgcacaaagagcgccgaagggcgttcaggcatgtgcattgcccacggtggcgggcgccgctgccagtacgctggctgcgggaagggagctcagggcagcaccagtttctgcaaagcccacggtggcggcaagagatgcacacgccccgactgttccaagggcgcagagggaagcacggcgttctgcaaagcgcacgggggcggcaagcgatgctcggctgacgggtgcacgaagagcgtgcatggtgggacccagttctgcgtcgcgcatggaggcgggaagaggtgcgtggtggaaggatgcaggaagagcgcgagaggccggagcgaccgctgcgtcgggcacggcgggggcaagcggtgccactccgctggctgtgggaagagcgcacagggaagcaccgatttctgcaagtcgcacggtggaggcaggcgctgttggtggggacatctcgggtcgggtggcgctccttgcgaccgtctggcgagaggcagaaaggggctatgcgatcgacacaacccgctggtggacgacaacagcgtccacgggggtgtatcgtttggtggtttttccaccctttctgagggaggcgccgaaacaagcttcttcatgcacacggtggaggatcctcgccacgtggcgccatcggcccgtgaaggccgggtgcatgggggcaactttatgcctttcatgctggatggtggtgtgggactcggcaagaagccagccaacaacgctgactctagtacctctgcccctcgcagctgcaaaaatatggagaagcctggtgcctctgcgcagcgcagctggctgtgatgccagaagtccgtggcccgcccgcccttccccatctcggtgtgctctgctcgattcaagtatctcccctgccctctggtgtggtgtgaaactgaaatctattatgcgtggactgtcggtgtgtagactggttggtcaggacatgtttggtagtgtggacgttgtggtttgtttgtgcttttttgcatcagtcaatcagtctggtcgaacatacctggtagcaagagtagtgtgtgaatggcctgtaaaaggaacccatcatcatgatgtatgtatatatctaaataataaaaggaggaaggctgcatcagtcggtgtaattaatcgaagtgttaatggtacgtactgcttccatgggctggtatggttttttttatatttatgtatatatgtatttaaaatttaaaatgttgttcaacactgtttgtggcactagtcatgaccgggcggtctgatccgtacggtccgccttttgggcgtggacagtccgcgattggatcagagtaggcggattaatcctatctctacgcgtgtttatcactctaaactcgtgggagttgttggaggacgctaaactcgtgggagttgttggaggatgactaggaatgagtccagacctcttcttatatatttgaaggggtacagacgattgaagcatcaactatcg

SEQ ID NO: 41879 - DNA, 3092 bp, Zea Mays
cgcgccgcctctcggtcggcgtcggcgtattttaccgatggtttcgttttcgtcatcgcatctcctttttgtcccagcgaagcttgcgcggaaatttctcttcttgttggccccgcggtttcttggctttcacgaattgcgatttttattattatttttctcttgtcgcggggtggcacagtggtaccgctattttaaccttcgttggcaacaagttggtccttcccagctccggcgcagtgttccggagaggtgcaaggcacatttgctgggaattagggcaatcgacttttaagtacatttggtgtacggctgtttgattattactgagattcagtcattcggctggatgagagttgttgctggagacttacgagtgtagcactgttgtcggcttgtgattaaatagcatcacttcacatacagcactggataatggatcgtagggatacttcagggtttgttagtggagggtgcaaaaataatgaagcctactgatttctgtagatcttctaaattggtagctttgttgacaattatttaacccagaagtgaggccagctggtacttcccataaagcttggttactctaggagcaatggatcccaggcacgggcgttcagcattcactataagtttctcaaatccaaatggctttgcgtatcagtgcactcccattccagccgtcagttatccagcaactggttctagccagcttgatgtgctagctcctagaggttgcaagagaaagtggactgagttggccctaggtctgggtgactcatcaagctcagacagcagcaagaggagcatgggtactggctgcactgtatcttctgccaagggaagcgatgacgtctcatgtatggactacgacataggttttgagctatctctcggcaatgaaggtacttcgaggctgtgtaaacaggcctgtgactctacaaggaccatggagaagcctgggttggatcttaagttatctttggctccatctcaatctgatgtaactgatgcagatgtaattagaagcagtgcacctcaggacatgtttgtgcatcatcagtacttaatgtcgtcagcgccaacagttgatgaaggatctacatccgctcgacgcttatctggaggcatggtgggttcgtttcttaaccaggatgggatttctctggaccaagcgctcccggttaaccctaatcaggttcaagtcccagctccttcagcaccaaaaagttcagctgcctcttcttctgggtttgtccatccacagcagcgcagcagtatcacaaaaatctgttcgcacccaggctgtgcaaaaggagcgaggggttcatctgggcggtgcattgcgcacggtgggggcagaaggtgccagaaaggaggctgcagcaaaggagctgagggaaagaccatcttctgtaaagcccatggaggggggaagcggtgtgaacaccttggatgcaccaaaagtgcggaaggccggactgatttctgcatagcccatggcggcgggcggcgctgcagccatgaagggtgcaagagggcagcacgaggcaaatcgggcctctgtatcaagcacggtggtgggaagaggtgcgaaaagccaaactgcacaaagagcgccgaagggcgttcaggcatgtgcattgcccacggtggcgggcgccgctgccagtacgctggctgcgggaagggagctcagggcagcaccagtttctgcaaagcccacggtggcggcaagagatgcacacgccccgactgttccaagggcgcagagggaagcacggcgttctgcaaagcgcacgggggcggcaagcgatgctcggctgacgggtgcacgaagagcgtgcatggtgggacccagttctgcgtcgcgcatggaggcgggaagaggtgcgtggtggaaggatgcaggaagagcgcgagaggccggagcgaccgctgcgtcgggcacggcgggggcaagcggtgccactccgctggctgtgggaagagcgcacagggaagcaccgatttctgcaagtcgcacggtggaggcaggcgctgttggtggggacatctcgggtcgggtggcgctccttgcgaccgtctggcgagaggcagaaaggggctatgcgatcgacacaacccgctggtggacgacaacagcgtccacgggggtgtatcgtttggtggtttttccaccctttctgagggaggcgccgaaacaagcttcttcatgcacacggtggaggatcctcgccacgtggcgccatcggcccgtgaaggccgggtgcatgggggcaactttatgcctttcatgctggatggtggtgtgggactcggcaagaagccagccaacaacgctgactctagtacctctgcccctcgcagctgcaaaaatatggagaagcctggtgcctctgcgcagcgcagctggctgtgatgccagaagtccgtggcccgcccgcccttccccatctcggtgtgctctgctcgattcaagtatctcccctgccctctggtgtggtgtgaaactgaaatctattatgcgtggactgtcggtgtgtagactggttggtcaggacatgtttggtagtgtggacgttgtggtttgtttgtgcttttttgcatcagtcaatcagtctggtcgaacatacctggtagcaagagtagtgtgtgaatggcctgtaaaaggaacccatcatcatgatgtatgtatatatctaaataataaaaggaggaaggctgcatcagtcggtgtaattaatcgaagtgttaatggtacgtactgcttccatgggctggtatggttttttttatatttatgtatatatgtatttaaaatttaaaatgttgttcaacactgtttgtggcactagtcatgaccgggcggtctgatccgtacggtccgccttttgggcgtggacagtccgcgattggatcagagtaggcggattaatcctatctctacgcgtgtttatcactctaaactcgtgggagttgttggaggacgctaaactcgtgggagttgttggaggatgactaggaatgagtccagacctcttcttatatatttgaaggggtacagacgattgaagcatcaactatcg

SEQ ID NO: 41880 - DNA, 1107 bp, Zea Mays
tacctattacacgcaccagacttgcatcctattgcacttggcaataaaacaacaaaaagacagatcgagatgcatacatgctacagaagaggaggcagggtgaccaagcatccatcataggcggggtggtggactacatcaaggagcttcagcaggtgctgcgttcgctggagacgaagaagcaccgcaaggcgtacgcggagcaggtgctgagcccgcggcctctcccagcagtcaagtccacgccgccgctcagcccgcacgtcgcggtgcccatgagcccccggacgccgaccccgggcagcccgtacaagcccgcatccggcgcggcggcgacgacgactggaagctgcagactcccacaccgggccgccgccgccgccgccgcctacatcggaacgccgacgacgtcgtcctcctcgtcgtcctactcgcacgatcagcagcggcactactcgacgtacctgccgaccctagacagcctcgtgaccgagctcgccgcgcaggcagcagcctgcagcaggccggcggcgtccggcgggctcacccggctccccgacgtgaaggtggagtttgcagggcccaacctcgtgctgaagacggtgtctcaccgctcgcccgggcaggcgctcaagatcatcgcagcgctcgagagcctcccgctggagatccttcacgtcagcgtcagcaccgtggacgacaccatggtgcactccttcaccatcaagattgggatcgagtgcgagctcagcgcggaggagcttgtgcaggaaattcagcagacgttattgtgataacgtagggttgttgttggcttatacttgcactggctagctacgtacctgcatgcatgcatggcttccatgcattattcacagttagtaacaagcagagcagcagcagggtgcaatataatctacgtccggctgtactgtacgtacaagctgttggctctctagtagtacgtagttagtttagcagtatgctagagacagatggctagctgttatgtcttcatttttcactgctgatcgaataatggatcgctttttcgatcgatcttcatcgacctgtgtgtacgttctttctttctcttgtatatctgcg

SEQ ID NO: 41881 - DNA, 534 bp, Zea Mays
ctttgccgcggtcagggttgtgcagcccccgcgttgcattggggtcccgtgccgatcgccaggccgcgtgatccacccgtgctcgagcaagcgcctcacgctcctcttcttcatcttcgttgcggccacctttgccttctgggaccgccaggcgctcgtcagcgagtacgagtctgatttgtagctggatctggttaattgaaaacgggtggcatggagccatctcttccgcctggcgcctgctgccgctgactgggagttcgacaccatttcttcgttctgaggagtagtaggtggcaacagtcgccgatctggtgagcctccactcgcttcccgttgtatactctgatttgtcaaatcttctactggttctggttcagaagtattgactttgaaagctcacaaatcccttttttcccctctatgctgcccgttgtatattatgttttagcggtatatttagtcgcacgataacttaaagagctttttaaaagtggcccagggcgtcaattttatagagctccgccactgtat

SEQ ID NO: 41882 - DNA, 1837 bp, Zea Mays
ctttcacacatgacgtcagacgaggcgaggtgcctctctgccgccctgccccggaagattcgattgaagtatattgcgttacgtgcgcgcgtactgctggatcatcctcctgtgtgctgtctgcgcacttgtcgtccgtccattgagctgagcgagccatcccgtgatcgccgatcccccagttgccaccctcaccggctgcctgccgttccctccgcctctcaaatccagtgccgtgcgggcgcggcggcggctccccagttggcagttgcccagcccccagcagcatgactactacgaccaagaatcataagcagcagcagctgctgcatatgctgcccacggcggctgccccgccttggcccgtaaggaccaagctcctgctctgcgccgccctcggcttcgcgctcggcgtcgtggccaccgcgtccctcgtgaactccccctcctacgcgacgtcgtccgccgccgccgccgcgctacggggaggaggaggagcgctgggcctcgtcttaccgccgtccgccaccaggaacgccgctcaggaccgccgcccgccgcccaaacaagcaggcgcggcacgggcaacggtccgccggtcccgaccggagccgccggctggcacgggcatcactagcgctgcagccccgccgccgtctgttgttggcgccgagggaccagcagcgcctagtgcctgccggctgcagggtccccagggtggcgttcctgttcctcgcgcgctgggacctgcccatggcgccgctgtgggacgagttcttccgcggccaccgcggcctctacaacgtctacgtgcactccgacccggcgttcaacggctccgacccgcccgagacctccgccttctaccgccggaggatccccagcaaggaggtgaaatggggcgagatcagcatggtggaggcggagcgccggcttctggcgcacgcgctgctggacgaccactgcaacgcgcgcttcgtcctcctgtcggagtcgcacgtcccgctgttcgatctccccacggtgcactcctacctcgtcaactccaccaggctgtacctcgagtcctacgaccagccaggcgcgacgggccgcggccgctacaaccgccgcatgagccccgtcgtggccgcggggcagtggcgcaagggctcccagtggttcgacctggaccgggccctggccacagacgtggtcgccgaccgcgtctacttcccgctcttccgccgcttctgccgccgtcgccactgctacgccgacgagcactacctgcccacgctcctcaacatcgtccggcgcccgtcggcgggggccaaccggagcctcacgtgggtcgactggtcccacggcggctgtcaccccgcgcggttcacgaggatggaggtcaccgtcgacttcctccggtggctcagggaaggcagcacgtgcacgtataacggcaggaccaccacagtctgcttccttttcgccaggaagttcctgccgaactcgctcaccaggttcttgaggttcgcgcccaaggtgatggggtttggttaaaaaccatcatgcatagacgacggggtacaaattttaaggatcagcgtctaacgtgattgactgattgtctttgtgaaggacctcaaatccattgattcattcattcatgtgcagtcataatttaatgttactctttactagctcagtagcttcgtgtgcaaattctttttgaattctcattttgtaaagaaaagtgtacagagcaccagaaaggggaaacgatcaaaagctcaccattgtctttaatatgatttcttttggacaaaaattaactagctggattcactgctgaaagcaa

SEQ ID NO: 41883 - DNA, 1677 bp, Zea Mays
agcacaatgttcgcaaggagaaaattacacaaagtgatcctaaaactggtgatattgtgctgatataggttgcctgttgaaaggcatgagcggggaggaggcaggcggcgcaatctggcaccggccatcacgttccctccggccgcttccccctccctgccctccctttccccagatccgaagccattaaaaccagcggatctcacctcggggcgcgtccgcggcatctgggcaagcgagtggtagagccagcagccatgagatggtatgcatcggtagcctcctgagggcgctggtcctgagtgcggcggcgtctgcgggcaggcgccgggggcccaggatcctgtgtggccacgaggcggatgtacgcgtgactcctcggcacggacacggctggcgcggattccgggcagtcacgggaaggatgatgctggactcctctgactgtgcctctgctgccgccgccgcggagacggggcaggtgcagccgcagcgccgcgcggtgggggccgtgcccctggcgcacgacggcggctacgccagcggcggatgggagagagaagatggcaaactgagttgtggatactcaagttttagaggcaagagagctacgatggaagatttctatgatgtaaaactaactgaaattgatggacaagctgttagcctgtttggtgttttcgacggtcatggaggatcacgtgctgctgagtatttgagggagcacttgtttgataaccttctcaagcaccctgatttcttgacagatacaaagcttgcgataagtgaaacatatcagaaaacagatacagatttcttggaatcagaagcaagcgctttcagggatgatggttcaacagcttcaactgcacttttggtgggtgaccatttatatgttgcaaatgttggtgattctcgtgccgttatttcaaaagctggcaaagctatggcgctttcagaagatcacaaacctaacagaattgatgagcgaaagagaattgaaaatgctggtggtattgtcatttgggctggcacttggagggtgggtggtgtattggcaatgtcccgtgcatttggcaatcgtttactgaagccatatgtggtggcagaacctgaaattcaggaagaacaggtcagtggtgggctggaatgcctggttcttgctagtgatgggctttgggatgttgtggaaaatgaggaagctgttttccttgggagatcggaggacacgccagagtctgcagctaggaaattgacagagattgcttactctcgcggcagcgctgacaatatcacatgcatcgtggtccaatttcaccatgacaaaaccggatgagccgtatggctgccaatttcagttgtaccctgcttcagtctattattatcctgcaagctgggtggtgggcttctcccagatttaccctgcttcatgctattattatcctgcaagccgggcggaaacatttgttccgacaggtgtagtagacacttttaaactgataattcaataaacgtatgtttacgattactgtttagtggaaattggttttcattttgccttatataagaagattttaactagtctgtcatgtgcgtgtgccatccctaattaggtatgaaaatggatacttttttggatattatttttttgtctttttctttgaccgtgaataaata

SEQ ID NO: 41884 - DNA, 1632 bp, Zea Mays
ttgataataataataatagttcggtgcctttttctagcggggaggaggcaggcggcgcaatctggcaccggccatcacgttccctccggccgcttccccctccctgccctccctttccccagatccgaagccattaaaaccagcggatctcacctcggggcgcgtccgcggcatctgggcaagcgagtggtagagccagcagccatgagatggtatgcatcggtagcctcctgagggcgctggtcctgagtgcggcggcgtctgcgggcaggcgccgggggcccaggatcctgtgtggccacgaggcggatgtacgcgtgactcctcggcacggacacggctggcgcggattccgggcagtcacgggaaggatgatgctggactcctctgactgtgcctctgctgccgccgccgcggagacggggcaggtgcagccgcagcgccgcgcggtgggggccgtgcccctggcgcacgacggcggctacgccagcggcggatgggagagagaagatggcaaactgagttgtggatactcaagttttagaggcaagagagctacgatggaagatttctatgatgtaaaactaactgaaattgatggacaagctgttagcctgtttggtgttttcgacggtcatggaggatcacgtgctgctgagtatttgagggagcacttgtttgataaccttctcaagcaccctgatttcttgacagatacaaagcttgcgataagtgaaacatatcagaaaacagatacagatttcttggaatcagaagcaagcgctttcagggatgatggttcaacagcttcaactgcacttttgctatggcgctttcagaagatcacaaacctaacagaattgatgagcgaaagagaattgaaaatgctggtggtattgtcatttgggctggcacttggagggtgggtggtgtattggcaatgtcccgtgcatttggcaatcgtttactgaagccatatgtggtggcagaacctgaaattcaggaagaacaggtcagtggtgggctggaatgcctggttcttgctagtgatgggctttgggatgttgtggaaaatgaggaagctgttttccttgggagatcggaggacacgccagagtctgcagctaggaaattgacagagattgcttactctcgcggcagcgctgacaatatcacatgcatcgtggtccaatttcaccatgacaaaaccggatgagccgtatggctgccaatttcagttgtaccctgcttcagtctattattatcctgcaagctgggtggtgggcttctcccagatttaccctgcttcatgctattattatcctgcaagccgggcggtggggtttctcagatctatcgctcatgtagcaactttcaagcactcgtccattgattcttttgttgtcttgtaggaaacatttgttccgacaggtgtagtagacacttttaaactgataattcaataaacgtatgtttacgattactgtttagtggaaattggttttcattttgccttatataagaagattttaactagtctgtcatgtgcgtgtgccatccctaattaggtatgaaaatggatacttttttggatattatttttttgtctttttctttgaccgtgaataaata

SEQ ID NO: 41885 - DNA, 2919 bp, Zea Mays
gaacaatcctgtggatttatttaaaaaaaactatatatctaaaaaatatacttgcaatttggaaatggtggagtagtttttttttaaaaaacgagcccgaccttgctccaactccctcgattccctctccctattcgcgttccccacttccgttcgccgccgacaccgcgtgcgctctctccccccctccgtctctgtctgcgacgactgggtgggctaccgctgccgccctacccatgtgctgaggcttctgcctacctcttcgccggcgaagagcgcccagcagttgaatatttgatcagctattgacttcgctgctggcctgttttctcctttggagaccaaagaagccatggcgggccgggaggagagatatgtgaggtttcatgactggaaatcagagcaatctgtttctgttatttcagatagggtagtatcagaaaaagggcataacatctttggcttgttaaaggacagaacagcaggagccttttcattcctggggaactcttcacattctgaagccctaaacaaattaggcctaggggagaagtcaaaaacaaaagttcttgatcctcaagggccatttttgcagagatggaacaagatatttgtgatatcatgtctttttgcagtttttgtggacccattgttcttgtatgtcccagtaattgatggtggcaacaactgcctgtacttggacaagaagttagagaccacagcaagtatcctgcgctttttcacagatatcttctatttactccatatactgtttcagttcagaacaggctttattgctccctcttctagagtgttcggtcggggtgccttggttaaggacacatttgcaatagcaaagcgatatctatcaacattgttcctggtggatttcttagcggttctgcccctccctcaggtgtttgtgttggtggtgctgcctaagctccaaggtcctgaaattatgaaggcaaaaattgtactgttggttattattatttgtcaatatgtgcctcgactgctccgaataataccactttaccttcaaatcacaagatctgctggcatacttacagagacagcatgggctggtgctgctttcaaccttataatttatatgcttgccagtcatggctttggagctctttggtacattctttccatccagcgagaagacacctgttggagacaagcatgtatcaatcagactggctgtgatcctacatctttgtactgcgggtatcattcacttgcaaataattctttcttacaaaatgcgtgcccaacaaatagcactgccaatccagaccctatatttggaatctttctaccagctctccaaaatgtttcacaatcgacgagtttctttgaaaaactattctattgcttttggtgggggctacaaaatctaagttcccttggccagaacatgaaaacaagcactaatacattggagaatctgtttgctgtttttgtctcgacatcgggtttggttctatttgcactacttattggtaatgtgcagacctatttacagtcagcttctgtgcgtatcgaagaaatgagagtgaaaaggcgtgatacagagcagtggatggcacataggctactccctgagaatctaaaggatcggattatgcgccacgaacaatataggtggcaagaaacaagaggggttgacgaagagggccttcttaaaaatcttccaaaggatcttagaagagagataaagagacatctttgtttgtcacttctcatgaaggttccaatgtttgaaaacatggatgaacagctgttggatgccatgtgtgatcgtctaaagcctatgctgtacacagaaggaagctgcatcattcgcgaaggtgatccagtgaatgaaatgctcttcatcatgagaggaacactagagagtaccacaacaaatggtgggcaaactggtttcttcaactctaatgttctaaaaggtggagacttctgtggtgaagagctcctcacgtgggcccttgaccccacttcagcttcaaatcttcctggctcaactaggacagtgaagacgttgtctgaagtcgaagcttttgctctgagggctgacgacttgaagtttgttgccacacaatttaggaggctccacagcaaacaacttcagcataccttccggttttactcacagcaatggaggacctgggctgcttgcttcatacaggcagcttggcacagatactgtaggaagaagctggaagaggctttatatgagaaggagaagaggttacaagcagcaattgtaagtgatggcactacttcgctcagtctcggtgcagcgctctatgcttcacgttttgctggcaacatgatgcggatcttacggagaaatgccaccagaaaggcccgtttgcaggaaagagtacctgcaagactgttgcaaaagccagcagaacccaacttcttcgctgaagatagctgaacttgtaccctgtagcaagcagggattcatggtccaaccggtgaagtttgtgcagaagttaagattggatgctgtagatagacagatcaggtgctctaaagccgtctggtttaaatcacctaattcgcgaaaaggcctggtccgagttagattctccgttgaaataaatttgaagctgacgttaaaaaaaaaatccgcttttgctccacgttaaattctggcttccatagtggtcggactagggtgctgagataagggtattgagattttttagatctgtgtgaaaagattttctgtaacgtaatatctgaaggctgtcttatcctctgtaggttattttaaaaaaaacacgtatatttcgattgtatacaggtttcatgtattataaacactctaatttaccttgtgcatttgaaaaaagagagaagatgctgtgaatataatcgattaattgtttgttc

SEQ ID NO: 41886 - DNA, 2745 bp, Zea Mays
ttttttaaaaaacgagcccgaccttgctccaactccctcgattccctctccctattcgcgttccccacttccgttcgccgccgacaccgcgtgcgctctctccccccctccgtctctgtctgcgacgactgggtgggctaccgctgccgccctacccatgtgctgaggcttctgcctacctcttcgccggcgaagagcgcccagcaggtttcatgactggaaatcagagcaatctgtttctgttatttcagatagggtagtatcagaaaaagggcataacatctttggcttgttaaaggacagaacagcaggagccttttcattcctggggaactcttcacattctgaagccctaaacaaattaggcctaggggagaagtcaaaaacaaaagttcttgatcctcaagggccatttttgcagagatggaacaagatatttgtgatatcatgtctttttgcagtttttgtggacccattgttcttgtatgtcccagtaattgatggtggcaacaactgcctgtacttggacaagaagttagagaccacagcaagtatcctgcgctttttcacagatatcttctatttactccatatactgtttcagttcagaacaggctttattgctccctcttctagagtgttcggtcggggtgccttggttaaggacacatttgcaatagcaaagcgatatctatcaacattgttcctggtggatttcttagcggttctgcccctccctcaggtgtttgtgttggtggtgctgcctaagctccaaggtcctgaaattatgaaggcaaaaattgtactgttggttattattatttgtcaatatgtgcctcgactgctccgaataataccactttaccttcaaatcacaagatctgctggcatacttacagagacagcatgggctggtgctgctttcaaccttataatttatatgcttgccagtcatggctttggagctctttggtacattctttccatccagcgagaagacacctgttggagacaagcatgtatcaatcagactggctgtgatcctacatctttgtactgcgggtatcattcacttgcaaataattctttcttacaaaatgcgtgcccaacaaatagcactgccaatccagaccctatatttggaatctttctaccagctctccaaaatgtttcacaatcgacgagtttctttgaaaaactattctattgcttttggtgggggctacaaaatctaagttcccttggccagaacatgaaaacaagcactaatacattggagaatctgtttgctgtttttgtctcgacatcgggtttggttctatttgcactacttattggtaatgtgcagacctatttacagtcagcttctgtgcgtatcgaagaaatgagagtgaaaaggcgtgatacagagcagtggatggcacataggctactccctgagaatctaaaggatcggattatgcgccacgaacaatataggtggcaagaaacaagaggggttgacgaagagggccttcttaaaaatcttccaaaggatcttagaagagagataaagagacatctttgtttgtcacttctcatgaaggttccaatgtttgaaaacatggatgaacagctgttggatgccatgtgtgatcgtctaaagcctatgctgtacacagaaggaagctgcatcattcgcgaaggtgatccagtgaatgaaatgctcttcatcatgagaggaacactagagagtaccacaacaaatggtgggcaaactggtttcttcaactctaatgttctaaaaggtggagacttctgtggtgaagagctcctcacgtgggcccttgaccccacttcagcttcaaatcttcctggctcaactaggacagtgaagacgttgtctgaagtcgaagcttttgctctgagggctgacgacttgaagtttgttgccacacaatttaggaggctccacagcaaacaacttcagcataccttccggttttactcacagcaatggaggacctgggctgcttgcttcatacaggcagcttggcacagatactgtaggaagaagctggaagaggctttatatgagaaggagaagaggttacaagcagcaattgtaagtgatggcactacttcgctcagtctcggtgcagcgctctatgcttcacgttttgctggcaacatgatgcggatcttacggagaaatgccaccagaaaggcccgtttgcaggaaagagtacctgcaagactgttgcaaaagccagcagaacccaacttcttcgctgaagatagctgaacttgtaccctgtagcaagcagggattcatggtccaaccggtgaagtttgtgcagaagttaagattggatgctgtagatagacagatcaggtgctctaaagccgtctggtttaaatcacctaattcgcgaaaaggcctggtccgagttagattctccgttgaaataaatttgaagctgacgttaaaaaaaaaatccgcttttgctccacgttaaattctggcttccatagtggtcggactagggtgctgagataagggtattgagattttttagatctgtgtgaaaagattttctgtaacgtaatatctgaaggctgtcttatcctctgtaggttattttaaaaaaaacacgtatatttcgattgtatacaggtttcatgtattataaacactctaatttaccttgtgcatttgaaaaaagagagaagatgctgtgaatataatcgattaattgtttgttc

SEQ ID NO: 41887 - DNA, 2874 bp, Zea Mays
ttttttaaaaaacgagcccgaccttgctccaactccctcgattccctctccctattcgcgttccccacttccgttcgccgccgacaccgcgtgcgctctctccccccctccgtctctgtctgcgacgactgggtgggctaccgctgccgccctacccatgtgctgaggcttctgcctacctcttcgccggcgaagagcgcccagcagttgaagatttgatcagctatcgccttcgatgcagttgaatatttgatcagctattgacttcgctgctggcctgttttctcctttggagaccaaagaagccatggcgggccgggaggagagatatgtgaggtttcatgactggaaatcagagcaatctgtttctgttatttcagatagggtagtatcagaaaaagggcataacatctttggcttgttaaaggacagaacagcaggagccttttcattcctggggaactcttcacattctgaagccctaaacaaattaggcctaggggagaagtcaaaaacaaaagttcttgatcctcaagggccatttttgcagagatggaacaagatatttgtgatatcatgtctttttgcagtttttgtggacccattgttcttgtatgtcccagtaattgatggtggcaacaactgcctgtacttggacaagaagttagagaccacagcaagtatcctgcgctttttcacagatatcttctatttactccatatactgtttcagttcagaacaggctttattgctccctcttctagagtgttcggtcggggtgccttggttaaggacacatttgcaatagcaaagcgatatctatcaacattgttcctggtggatttcttagcggttctgcccctccctcaggtgtttgtgttggtggtgctgcctaagctccaaggtcctgaaattatgaaggcaaaaattgtactgttggttattattatttgtcaatatgtgcctcgactgctccgaataataccactttaccttcaaatcacaagatctgctggcatacttacagagacagcatgggctggtgctgctttcaaccttataatttatatgcttgccagtcatggctttggagctctttggtacattctttccatccagcgagaagacacctgttggagacaagcatgtatcaatcagactggctgtgatcctacatctttgtactgcgggtatcattcacttgcaaataattctttcttacaaaatgcgtgcccaacaaatagcactgccaatccagaccctatatttggaatctttctaccagctctccaaaatgtttcacaatcgacgagtttctttgaaaaactattctattgcttttggtgggggctacaaaatctaagttcccttggccagaacatgaaaacaagcactaatacattggagaatctgtttgctgtttttgtctcgacatcgggtttggttctatttgcactacttattggtaatgtgcagacctatttacagtcagcttctgtgcgtatcgaagaaatgagagtgaaaaggcgtgatacagagcagtggatggcacataggctactccctgagaatctaaaggatcggattatgcgccacgaacaatataggtggcaagaaacaagaggggttgacgaagagggccttcttaaaaatcttccaaaggatcttagaagagagataaagagacatctttgtttgtcacttctcatgaaggttccaatgtttgaaaacatggatgaacagctgttggatgccatgtgtgatcgtctaaagcctatgctgtacacagaaggaagctgcatcattcgcgaaggtgatccagtgaatgaaatgctcttcatcatgagaggaacactagagagtaccacaacaaatggtgggcaaactggtttcttcaactctaatgttctaaaaggtggagacttctgtggtgaagagctcctcacgtgggcccttgaccccacttcagcttcaaatcttcctggctcaactaggacagtgaagacgttgtctgaagtcgaagcttttgctctgagggctgacgacttgaagtttgttgccacacaatttaggaggctccacagcaaacaacttcagcataccttccggttttactcacagcaatggaggacctgggctgcttgcttcatacaggcagcttggcacagatactgtaggaagaagctggaagaggctttatatgagaaggagaagaggttacaagcagcaattgtaagtgatggcactacttcgctcagtctcggtgcagcgctctatgcttcacgttttgctggcaacatgatgcggatcttacggagaaatgccaccagaaaggcccgtttgcaggaaagagtacctgcaagactgttgcaaaagccagcagaacccaacttcttcgctgaagatagctgaacttgtaccctgtagcaagcagggattcatggtccaaccggtgaagtttgtgcagaagttaagattggatgctgtagatagacagatcaggtgctctaaagccgtctggtttaaatcacctaattcgcgaaaaggcctggtccgagttagattctccgttgaaataaatttgaagctgacgttaaaaaaaaaatccgcttttgctccacgttaaattctggcttccatagtggtcggactagggtgctgagataagggtattgagattttttagatctgtgtgaaaagattttctgtaacgtaatatctgaaggctgtcttatcctctgtaggttattttaaaaaaaacacgtatatttcgattgtatacaggtttcatgtattataaacactctaatttaccttgtgcatttgaaaaaagagagaagatgctgtgaatataatcgattaattgtttgttc

SEQ ID NO: 41888 - DNA, 2701 bp, Zea Mays
ttttttaaaaaacgagcccgaccttgctccaactccctcgattccctctccctattcgcgttccccacttccgttcgccgccgacaccgcgtgcgctctctccccccctccgtctctgtctgcgacgactgggtgggctaccgctgccgccctacccatgtgctgaggcttctgcctacctcttcgccggcgaagagcgcccagcagatccgtcctcgcttccacgctgcagttgaagatttgatcagctatcgccttcgatgcagttgaatatttgatcagctattgacttcgctgctggcctgttttctcctttggagaccaaagaagccatggcgggccgggaggagagatatgtgaggtttcatgactggaaatcagagcaatctgtttctgttatttcagatagggtagtatcagaaaaagggcataacatctttggcttgttaaaggacagaacagcaggagccttttcattcctggggaactcttcacattctgaagccctaaacaaattaggcctaggggagaagtcaaaaacaaaagttcttgatcctcaagggccatttttgcagagatggaacaagatatttgtgatatcatgtctttttgcagtttttgtggacccattgttcttgtatgtcccagtaattgatggtggcaacaactgcctgtacttggacaagaagttagagaccacagcaagtatcctgcgctttttcacagatatcttctatttactccatatactgtttcagttcagaacaggctttattgctccctcttctagagtgttcggtcggggtgccttggttaaggacacatttgcaatagcaaagcgatatctatcaacattgttcctggtggatttcttagcggttctgcccctccctcaggtgtttgtgttggtggtgctgcctaagctccaagatctgctggcatacttacagagacagcatgggctggtgctgctttcaaccttataatttatatgcttgccagtcatggctttggagctctttggtacattctttccatccagcgagaagacacctgttggagacaagcatgtatcaatcagactggctgtgatcctacatctttgtactgcggctctccaaaatgtttcacaatcgacgagtttctttgaaaaactattctattgcttttggtgggggctacaaaatctaagttcccttggccagaacatgaaaacaagcactaatacattggagaatctgtttgctgtttttgtctcgacatcgggtttggttctatttgcactacttattggtaatgtgcagacctatttacagtcagcttctgtgcgtatcgaagaaatgagagtgaaaaggcgtgatacagagcagtggatggcacataggctactccctgagaatctaaaggatcggattatgcgccacgaacaatataggtggcaagaaacaagaggggttgacgaagagggccttcttaaaaatcttccaaaggatcttagaagagagataaagagacatctttgtttgtcacttctcatgaaggttccaatgtttgaaaacatggatgaacagctgttggatgccatgtgtgatcgtctaaagcctatgctgtacacagaaggaagctgcatcattcgcgaaggtgatccagtgaatgaaatgctcttcatcatgagaggaacactagagagtaccacaacaaatggtgggcaaactggtttcttcaactctaatgttctaaaaggtggagacttctgtggtgaagagctcctcacgtgggcccttgaccccacttcagcttcaaatcttcctggctcaactaggacagtgaagacgttgtctgaagtcgaagcttttgctctgagggctgacgacttgaagtttgttgccacacaatttaggaggctccacagcaaacaacttcagcataccttccggttttactcacagcaatggaggacctgggctgcttgcttcatacaggcagcttggcacagatactgtaggaagaagctggaagaggctttatatgagaaggagaagaggttacaagcagcaattgtaagtgatggcactacttcgctcagtctcggtgcagcgctctatgcttcacgttttgctggcaacatgatgcggatcttacggagaaatgccaccagaaaggcccgtttgcaggaaagagtacctgcaagactgttgcaaaagccagcagaacccaacttcttcgctgaagatagctgaacttgtaccctgtagcaagcagggattcatggtccaaccggtgaagtttgtgcagaagttaagattggatgctgtagatagacagatcaggtgctctaaagccgtctggtttaaatcacctaattcgcgaaaaggcctggtccgagttagattctccgttgaaataaatttgaagctgacgttaaaaaaaaaatccgcttttgctccacgttaaattctggcttccatagtggtcggactagggtgctgagataagggtattgagattttttagatctgtgtgaaaagattttctgtaacgtaatatctgaaggctgtcttatcctctgtaggttattttaaaaaaaacacgtatatttcgattgtatacaggtttcatgtattataaacactctaatttaccttgtgcatttgaaaaaagagagaagatgctgtgaatataatcgattaattgtttgttc

SEQ ID NO: 41889 - DNA, 2357 bp, Zea Mays
cacacttcggttctaggtaatgcttatacaagaatgaagggctatggtaaatgttagcaattttaggttactttagggtgcgtttggttgtaatgatagaacaggatgggatatgacgttccttaaataatgttgtttggttcagggtgaggggttgggacaaaactatcccagtgttgtccctcaaaattggagggacgagagaggacgccagaggacgtccctgtcttgcctgtccccggatgtcccgcaaccaaacacatcctcaatgaacttcaatgcaccaaaggcacataacacatgcatgcataagccatcggtgcaactgtgctacaaaatggaaatatagaataggtgtttgtgttggtggtgctgcctaagctccaaggtcctgaaattatgaaggcaaaaattgtactgttggttattattatttgtcaatatgtgcctcgactgctccgaataataccactttaccttcaaatcacaagatctgctggcatacttacagagacagcatgggctggtgctgctttcaaccttataatttatatgcttgccagtcatggctttggagctctttggtacattctttccatccagcgagaagacacctgttggagacaagcatgtatcaatcagactggctgtgatcctacatctttgtactgcgggtatcattcacttgcaaataattctttcttacaaaatgcgtgcccaacaaatagcactgccaatccagaccctatatttggaatctttctaccagctctccaaaatgtttcacaatcgacgagtttctttgaaaaactattctattgcttttggtgggggctacaaaatctaagttcccttggccagaacatgaaaacaagcactaatacattggagaatctgtttgctgtttttgtctcgacatcgggtttggttctatttgcactacttattggtaatgtgcagacctatttacagtcagcttctgtgcgtatcgaagaaatgagagtgaaaaggcgtgatacagagcagtggatggcacataggctactccctgagaatctaaaggatcggattatgcgccacgaacaatataggtggcaagaaacaagaggggttgacgaagagggccttcttaaaaatcttccaaaggatcttagaagagagataaagagacatctttgtttgtcacttctcatgaaggttccaatgtttgaaaacatggatgaacagctgttggatgccatgtgtgatcgtctaaagcctatgctgtacacagaaggaagctgcatcattcgcgaaggtgatccagtgaatgaaatgctcttcatcatgagaggaacactagagagtaccacaacaaatggtgggcaaactggtttcttcaactctaatgttctaaaaggtggagacttctgtggtgaagagctcctcacgtgggcccttgaccccacttcagcttcaaatcttcctggctcaactaggacagtgaagacgttgtctgaagtcgaagcttttgctctgagggctgacgacttgaagtttgttgccacacaatttaggaggctccacagcaaacaacttcagcataccttccggttttactcacagcaatggaggacctgggctgcttgcttcatacaggcagcttggcacagatactgtaggaagaagctggaagaggctttatatgagaaggagaagaggttacaagcagcaattgtaagtgatggcactacttcgctcagtctcggtgcagcgctctatgcttcacgttttgctggcaacatgatgcggatcttacggagaaatgccaccagaaaggcccgtttgcaggaaagagtacctgcaagactgttgcaaaagccagcagaacccaacttcttcgctgaagatagctgaacttgtaccctgtagcaagcagggattcatggtccaaccggtgaagtttgtgcagaagttaagattggatgctgtagatagacagatcaggtgctctaaagccgtctggtttaaatcacctaattcgcgaaaaggcctggtccgagttagattctccgttgaaataaatttgaagctgacgttaaaaaaaaaatccgcttttgctccacgttaaattctggcttccatagtggtcggactagggtgctgagataagggtattgagattttttagatctgtgtgaaaagattttctgtaacgtaatatctgaaggctgtcttatcctctgtaggttattttaaaaaaaacacgtatatttcgattgtatacaggtttcatgtattataaacactctaatttaccttgtgcatttgaaaaaagagagaagatgctgtgaatataatcgattaattgtttgttc

SEQ ID NO: 41890 - DNA, 1926 bp, Zea Mays
gtgcaactgtgctacaaaatggaaatatagaataggtgtttgtgttggtggtgctgcctaagctccaaggtcctgaaattatgaaggcaaaaattgtactgttggttattattatttgtcaatatgtgcctcgactgctccgaataataccactttaccttcaaatcacaagatctgctggcatacttacagagacagcatgggctggtgctgctttcaaccttataatttatatgcttgccagtcatggctttggagctctttggtacattctttccatccagcgagaagacacctgttggagacaagcatgtatcaatcagactggctgtgatcctacatctttgtactgcgggtatcattcacttgcaaataattctttcttacaaaatgcgtgcccaacaaatagcactgccaatccagaccctatatttggaatctttctaccagctctccaaaatgtttcacaatcgacgagtttctttgaaaaactattctattgcttttggtgggggctacaaaatctaagacctatttacagtcagcttctgtgcgtatcgaagaaatgagagtgaaaaggcgtgatacagagcagtggatggcacataggctactccctgagaatctaaaggatcggattatgcgccacgaacaatataggtggcaagaaacaagaggggttgacgaagagggccttcttaaaaatcttccaaaggatcttagaagagagataaagagacatctttgtttgtcacttctcatgaaggttccaatgtttgaaaacatggatgaacagctgttggatgccatgtgtgatcgtctaaagcctatgctgtacacagaaggaagctgcatcattcgcgaaggtgatccagtgaatgaaatgctcttcatcatgagaggaacactagagagtaccacaacaaatggtgggcaaactggtttcttcaactctaatgttctaaaaggtggagacttctgtggtgaagagctcctcacgtgggcccttgaccccacttcagcttcaaatcttcctggctcaactaggacagtgaagacgttgtctgaagtcgaagcttttgctctgagggctgacgacttgaagtttgttgccacacaatttaggaggctccacagcaaacaacttcagcataccttccggttttactcacagcaatggaggacctgggctgcttgcttcatacaggcagcttggcacagatactgtaggaagaagctggaagaggctttatatgagaaggagaagaggttacaagcagcaattgtaagtgatggcactacttcgctcagtctcggtgcagcgctctatgcttcacgttttgctggcaacatgatgcggatcttacggagaaatgccaccagaaaggcccgtttgcaggaaagagtacctgcaagactgttgcaaaagccagcagaacccaacttcttcgctgaagatagctgaacttgtaccctgtagcaagcagggattcatggtccaaccggtgaagtttgtgcagaagttaagattggatgctgtagatagacagatcaggtgctctaaagccgtctggtttaaatcacctaattcgcgaaaaggcctggtccgagttagattctccgttgaaataaatttgaagctgacgttaaaaaaaaaatccgcttttgctccacgttaaattctggcttccatagtggtcggactagggtgctgagataagggtattgagattttttagatctgtgtgaaaagattttctgtaacgtaatatctgaaggctgtcttatcctctgtaggttattttaaaaaaaacacgtatatttcgattgtatacaggtttcatgtattataaacactctaatttaccttgtgcatttgaaaaaagagagaagatgctgtgaatataatcgattaattgtttgttc

SEQ ID NO: 41891 - DNA, 1873 bp, Zea Mays
caacggcgctcaaacgtcgtggtccagagcctcgcccttctcaccaccactcataccttcttagaagccgcagctccaacaagggctttggagctctttggtacattctttccatccagcgagaagacacctgttggagacaagcatgtatcaatcagactggctgtgatcctacatctttgtactgcgggtatcattcacttgcaaataattctttcttacaaaatgcgtgcccaacaaatagcactgccaatccagaccctatatttggaatctttctaccagctctccaaaatgtttcacaatcgacgagtttctttgaaaaactattctattgcttttggtgggggctacaaaatctaagttcccttggccagaacatgaaaacaagcactaatacattggagaatctgtttgctgtttttgtctcgacatcgggtttggttctatttgcactacttattggtaatgtgcagacctatttacagtcagcttctgtgcgtatcgaagaaatgagagtgaaaaggcgtgatacagagcagtggatggcacataggctactccctgagaatctaaaggatcggattatgcgccacgaacaatataggtggcaagaaacaagaggggttgacgaagagggccttcttaaaaatcttccaaaggatcttagaagagagataaagagacatctttgtttgtcacttctcatgaaggttccaatgtttgaaaacatggatgaacagctgttggatgccatgtgtgatcgtctaaagcctatgctgtacacagaaggaagctgcatcattcgcgaaggtgatccagtgaatgaaatgctcttcatcatgagaggaacactagagagtaccacaacaaatggtgggcaaactggtttcttcaactctaatgttctaaaaggtggagacttctgtggtgaagagctcctcacgtgggcccttgaccccacttcagcttcaaatcttcctggctcaactaggacagtgaagacgttgtctgaagtcgaagcttttgctctgagggctgacgacttgaagtttgttgccacacaatttaggaggctccacagcaaacaacttcagcataccttccggttttactcacagcaatggaggacctgggctgcttgcttcatacaggcagcttggcacagatactgtaggaagaagctggaagaggctttatatgagaaggagaagaggttacaagcagcaattgtaagtgatggcactacttcgctcagtctcggtgcagcgctctatgcttcacgttttgctggcaacatgatgcggatcttacggagaaatgccaccagaaaggcccgtttgcaggaaagagtacctgcaagactgttgcaaaagccagcagaacccaacttcttcgctgaagatagctgaacttgtaccctgtagcaagcagggattcatggtccaaccggtgaagtttgtgcagaagttaagattggatgctgtagatagacagatcaggtgctctaaagccgtctggtttaaatcacctaattcgcgaaaaggcctggtccgagttagattctccgttgaaataaatttgaagctgacgttaaaaaaaaaatccgcttttgctccacgttaaattctggcttccatagtggtcggactagggtgctgagataagggtattgagattttttagatctgtgtgaaaagattttctgtaacgtaatatctgaaggctgtcttatcctctgtaggttattttaaaaaaaacacgtatatttcgattgtatacaggtttcatgtattataaacactctaatttaccttgtgcatttgaaaaaagagagaagatgctgtgaatataatcgattaattgtttgttc

SEQ ID NO: 41892 - DNA, 2230 bp, Zea Mays
gcgaatatagctaacaaccgtagcacaaaactcggaaccctaatctgttctgcgcacgcgcggaccgtccggcccataggcacggaccgtccggaccgcggactgtccggccttgtccgccggctcaaaaccggttcgaacactagctaatacgcgcgctacaatatcattgtaataaaatgtacgcacggtaataaatcacgtgtcaccgtccatacgcacaagaaactacggatggttcccaggctcccagcacagaatccacctccgccgtcaccaccgagcaacgcgcgccggcgcccttctatttctccagcccccgctccgccgccgccgctctcctcctccgcacccccgccctgtttcgccatcggcccatcgcgcacctgcctgtgccacctgcagcagcagcagcagagataaagttggctggtagttggctgcccacaccgtctggttcccgttcccatgtcagagggccacgtttcccatgctcctcggtttgtgcctgcaatcgcttgctgcttagcctccgtgctgctgctttgatccagaggctgggaactccaaagaggaacagcgtccatggaggctggaggcgcaggaagtggtttgaatggggcggtgcaggcaaaggggactggggctgatgatggctctgccaagcggctgccgccttgctgcgtcaaggccagagccgccgcgccggagtccgaggccaggtgccacgccaccgtcgtttcaggatggttcactgaaccgcgatcgcgctgtggcaaagccagcaaagttcagtattacaataacccgatgtggccaggagaggccaattctttgaaagtggagaagatcttataccaggggaaatcgctataccaagaagtcttagtcttcgagtcgtcgacctatggtaaagtccttgtgcttgatggtattgttcagttgactgacaaggatgaatgtgcataccaggaaatgattactcacctgccactttgctcaattccatcccctaaaaaagttttggttattggtggtggtgatggaggtgtacttcgagaggtatccaggcatagttcagtggagtccattgacatatgtgagattgatcagctggttattgatgtgtgcaaagatttcttcccacacttgtctgttggatttcaagatcctcgtgttcaacttcatgtcggcgatgctgtggagttcttgagaaatgctcctgaagggacatatgatgctatcattgttgattcgtcagatccaatagggcctgctcaggaacttgtagagaagcctttttttgatacaattgctagagctttgaggcctggaggcgttctttgtaatcaagctgagagtatgtggttacatacacatttgattcaggatatgctttcaatttgccgtgaaactttcaagggttctgtacgctatgcatggacaagtgtcccaacatacccgagtggggtgattggatttttactatgtgccaaagaaggtccattggtgaactttctgactcctataaatccaattgaaaagctggaaggagctacaaaagctggaagggagatcagattttataactcagagatgcatagggcagcatttgttctcccgacctttgcaaggagagagctagaagcatattgcgtttccactgaaacagagcaagcggaggaaacaccggcggcaccactgaagttgactcttgcatccaggagtgaaattttcgctacatcctagctagaccaggactcgcgatgtaccacaagatatcaagaaaccattccttccttcctggtgccgtacctccagtatcgccattggttcatagtcttactatcacatgctatgagacgcataatgaggcatcatgtcagtaattcagtatccaaacaatgagatgagattggcatgctaagaaaggacgagctgatattacaatgtactcccttcaccatgtcagtaatttattgtccaaacaattagatacattgcgttatatgaaggagtttcttaggtgtatctagtgctcggagaaccgaaacgtagtatctaggttgtacatgttcacccttgtacttctacttattaagtgatgtaataaatgcagagatagtcttgctcaatacaaaatgttagaaatcctgatcttgggttggctggcacacaaacacaagtgtgacaatgatagtcttgctcaataaaaaatgttagaaatcct

SEQ ID NO: 41893 - DNA, 2006 bp, Zea Mays
cgtgtcaccgtccatacgcacaagaaactacggatggttcccaggctcccagcacagaatccacctccgccgtcaccaccgagcaacgcgcgccggcgcccttctatttctccagcccccgctccgccgccgccgctctcctcctccgcacccccgccctgtttcgccatcggcccatcgcgcacctgcctgtgccacctgcagcagcagcagcagcagagataaagttggctggtagttggctgcccacaccgtctggttcccgttcccatgtcagagggccacgtttcccatgctcctcggtttgtgcctgcaatcgcttgctgcttagcctccgtgctgctgctttgatccagaggctgggaactccaaagaggaacagcgtccatggaggctggaggcgcaggaagtggtttgaatggggcggtgcaggcaaaggggactggggctgatgatggctctgccaagcggctgccgccttgctgcgtcaaggccagagccgccgcgccggagtccgaggccaggtgccacgccaccgtcgtttcaggatggttcactgaaccgcgatcgcgctgtggcaaagccagcaaagttcagtattacaataacccgatgtggccaggagaggccaattctttgaaagtggagaagatcttataccaggggaaatcgctataccaagaagtcttagtcttcgagtcgtcgacctatggtaaagtccttgtgcttgatggtattgttcagttgactgacaaggatgaatgtgcataccaggaaatgattactcacctgccactttgctcaattccatcccctaaaaaagttttggttattggtggtggtgatggaggtgtacttcgagaggtatccaggcatagttcagtggagtccattgacatatgtgtgcaaagatttcttcccacacttgtctgttggatttcaagatcctcgtgttcaacttcatgtcggcgatgctgtggagttcttgagaaatgctcctgaagggacatatgatgctatcattgttgattcgtcagatccaatagggcctgctcaggaacttgtagagaagcctttttttgatacaattgctagagctttgaggcctggaggcgttctttgtaatcaagctgagagtatgtggttacatacacatttgattcaggatatgctttcaatttgccgtgaaactttcaagggttctgtacgctatgcatggacaagtgtcccaacatacccgagtggggtgattggatttttactatgtgccaaagaaggtccattggtgaactttctgactcctataaatccaattgaaaagctggaaggagctacaaaagctggaagggagatcagattttataactcagagatgcatagggcagcatttgttctcccgacctttgcaaggagagagctagaagcatattgcgtttccactgaaacagagcaagcggaggaaacaccggcggcaccactgaagttgactcttgcatccaggagtgaaattttcgctacatcctagctagaccaggactcgcgatgtaccacaagatatcaagaaaccattccttccttcctggtgccgtacctccagtatcgccattggttcatagtcttactatcacatgctatgagacgcataatgaggcatcatgtcagtaattcagtatccaaacaatgagatgagattggcatgctaagaaaggacgagctgatattacaatgtactcccttcaccatgtcagtaatttattgtccaaacaattagatacattgcgttatatgaaggagtttcttaggtgtatctagtgctcggagaaccgaaacgtagtatctaggttgtacatgttcacccttgtacttctacttattaagtgatgtaataaatgcagagatagtcttgctcaatacaaaatgttagaaatcctgatcttgggttggctggcacacaaacacaagtgtgacaatgatagtcttgctcaataaaaaatgttagaaatcct

SEQ ID NO: 41894 - DNA, 1899 bp, Zea Mays
cgtgtcaccgtccatacgcacaagaaactacggatggttcccaggctcccagcacagaatccacctccgccgtcaccaccgagcaacgcgcgccggcgcccttctatttctccagcccccgctccgccgccgccgctctcctcctccgcacccccgccctgtttcgccatcggcccatcgcgcacctgcctgtgccacctgcagcagcagcagcagagataaagttggctggtagttggctgcccacaccgtctggttcccgttcccatgtcagagggccacgtttcccatgctcctcggtttgtgcctgcaatcgcttgctgcttagcctccgtgctgctgctttgatccagaggctgggaactccaaagaggaacagcgtccatggaggctggaggcgcaggaagtggtttgaatggggcggtgcaggcaaaggggactggggctgatgatggctctgccaagcggctgccgccttgctgcgtcaaggccagagccgccgcgccggagtccgaggccaggtgccacgccaccgtcgtttcaggatggttcactgaaccgcgatcgcgctgtggcaaagccagcaaagttcagtattacaataacccgatgtggccaggagaggccaattctttgaaagtggagaagatcttataccaggggaaatcgctataccaagaagtcttagtcttcgagtcgtcgacctatggtaaagtccttgtgcttgatggtattgttcagttgactgacaaggatgaatgtgcataccaggaaatgattactcacctgccactttgctcaattccatcccctaaaaaagttttggttattggtggtggtgatggaggtgtacttcgagaggtatccaggcatagttcagtggagtccattgacatatgtgagattgatcagctggttattgatgtgtgcaaagatttcttcccacacttgtctgttggatttcaagatcctcgtgttcaacttcatgtcggcgatgctgtggagttcttgagaaatgctcctgaagggacatatgatgctatcattgttgattcgtcagatccaatagggcctgctcaggaacttgtagagaagcctttttttgatacaattgctagagctttgaggcctggaggcgttctttgtaatcaagctgagagtatgtggttacatacacatttgattcaggatatgctttcaatttgccgtgaaactttcaagggttctgtacgctatgcatggacaagtgtcccaacatacccgagatgcatagggcagcatttgttctcccgacctttgcaaggagagagctagaagcatattgcgtttccactgaaacagagcaagcggaggaaacaccggcggcaccactgaagttgactcttgcatccaggagtgaaattttcgctacatcctagctagaccaggactcgcgatgtaccacaagatatcaagaaaccattccttccttcctggtgccgtacctccagtatcgccattggttcatagtcttactatcacatgctatgagacgcataatgaggcatcatgtcagtaattcagtatccaaacaatgagatgagattggcatgctaagaaaggacgagctgatattacaatgtactcccttcaccatgtcagtaatttattgtccaaacaattagatacattgcgttatatgaaggagtttcttaggtgtatctagtgctcggagaaccgaaacgtagtatctaggttgtacatgttcacccttgtacttctacttattaagtgatgtaataaatgcagagatagtcttgctcaatacaaaatgttagaaatcctgatcttgggttggctggcacacaaacacaagtgtgacaatgatagtcttgctcaataaaaaatgttagaaatcct

SEQ ID NO: 41895 - DNA, 672 bp, Zea Mays
ctccctctcatcagcaccacgttgcagcagtcgccatgatgcatagggcagcatttgttctcccgacctttgcaaggagagagctagaagcatattgcgtttccactgaaacagagcaagcggaggaaacaccggcggcaccactgaagttgactcttgcatccaggagtgaaattttcgctacatcctagctagaccaggactcgcgatgtaccacaagatatcaagaaaccattccttccttcctggtgccgtacctccagtatcgccattggttcatagtcttactatcacatgctatgagacgcataatgaggcatcatgtcagtaattcagtatccaaacaatgagatgagattggcatgctaagaaaggacgagctgatattacaatgtactcccttcaccatgtcagtaatttattgtccaaacaattagatacattgcgttatatgaaggagtttcttaggtgtatctagtgctcggagaaccgaaacgtagtatctaggttgtacatgttcacccttgtacttctacttattaagtgatgtaataaatgcagagatagtcttgctcaatacaaaatgttagaaatcctgatcttgggttggctggcacacaaacacaagtgtgacaatgatagtcttgctcaataaaaaatgttagaaatcct

SEQ ID NO: 41896 - DNA, 741 bp, Zea Mays
gccgattggagccaccaccgtcacccagtcagtggccgattggagccgcctccgcgaggcctgtggtcgtcagcccgtcagccgccgattggagccgccgctgcgagatgcatagggcagcatttgttctcccgacctttgcaaggagagagctagaagcatattgcgtttccactgaaacagagcaagcggaggaaacaccggcggcaccactgaagttgactcttgcatccaggagtgaaattttcgctacatcctagctagaccaggactcgcgatgtaccacaagatatcaagaaaccattccttccttcctggtgccgtacctccagtatcgccattggttcatagtcttactatcacatgctatgagacgcataatgaggcatcatgtcagtaattcagtatccaaacaatgagatgagattggcatgctaagaaaggacgagctgatattacaatgtactcccttcaccatgtcagtaatttattgtccaaacaattagatacattgcgttatatgaaggagtttcttaggtgtatctagtgctcggagaaccgaaacgtagtatctaggttgtacatgttcacccttgtacttctacttattaagtgatgtaataaatgcagagatagtcttgctcaatacaaaatgttagaaatcctgatcttgggttggctggcacacaaacacaagtgtgacaatgatagtcttgctcaataaaaaatgttagaaatcct

SEQ ID NO: 41897 - DNA, 696 bp, Zea Mays
tataatcgagtgagagaacatacgccttggtcatgccaactagttcagggaaggagttattgatgcatagggcagcatttgttctcccgacctttgcaaggagagagctagaagcatattgcgtttccactgaaacagagcaagcggaggaaacaccggcggcaccactgaagttgactcttgcatccaggagtgaaattttcgctacatcctagctagaccaggactcgcgatgtaccacaagatatcaagaaaccattccttccttcctggtgccgtacctccagtatcgccattggttcatagtcttactatcacatgctatgagacgcataatgaggcatcatgtcagtaattcagtatccaaacaatgagatgagattggcatgctaagaaaggacgagctgatattacaatgtactcccttcaccatgtcagtaatttattgtccaaacaattagatacattgcgttatatgaaggagtttcttaggtgtatctagtgctcggagaaccgaaacgtagtatctaggttgtacatgttcacccttgtacttctacttattaagtgatgtaataaatgcagagatagtcttgctcaatacaaaatgttagaaatcctgatcttgggttggctggcacacaaacacaagtgtgacaatgatagtcttgctcaataaaaaatgttagaaatcct

SEQ ID NO: 41898 - DNA, 1357 bp, Zea Mays
ccacgacccacttgggtggttcacggtggcccagactgctgcgcctcaccaaccaacgagagagcacgaagcacctagcagcccggccttgtcgttgtacggtcccaccggcgccgcagcggaagagatggaagcttatgcccccgccggcagctaccggccggtgtgcgacacggtggtgttcgtctgcctcgcgtccgcctccgccctcatcgtgttcatggtggccgtctgcttccgcaacgccttcgccgccaacgggtacgcgaccgctgccgtggccacaaacggtgccgccggagccaccgctgccaacggcagaagccggtgcgggctggcgccgtccgcgctgtcggcgatccccgtgctcgcttaccgccggaggggcgccgggtgggcgcagtgcgcgatctgcctcgccttggtgcgggacggggagacggtgcgattgctgccggcgtgcggccacctattccacgtcgagtgcatcgacctgtggctgcgctctcacgcaacatgcccgctttgccggcgtggcgtcgtcgaggctcccgtcgaaaagatggttattcagctgaactgagaggcttattttgtaaggctgtgagttatgcttatacttctaggctgggtttgggagcaactagatcatcaaagaccactttctctgggctgccgggtcccgttggtggcgtcgtggcgtcagcgtgatttgagatgagattggacccggctgcgcggtattcgctgtgaaggtagacggccatgacgaccaacaccaagcacgcctacaagctccaggagtttgtggcgcactcatccaatgttaactgcctcaagatctccagggacgccggctgctacaaggtcatcctcgactgcacccctgagctgcgtgcctactatgccaagtgcggattcgtggagaagggtgtccagatggtcgtctacttctgagttctgatctagaggtatgctactttgcattgatatggctcctctgattaagtgatggacgaaatgatgtagttgttcgttggaaaaaacatttagttttagtagagcgtcttaggtggaccaagctttaagcctacaagaatcaaatgcatctgatctgagccaaaagcacaaacactccaaactgtaagtgcataacatttcttatgtgtagtcagcttggtttgctgcaggtacctctgtctgaaaataaaaagggtgtatttgtcatgaaaataagctttaatgaactctgtagctttcattcaaatagcttagttctcttcctttttgtagaagcatatttttgctaccaaaaaagatctggtatgtttacccactcttatgctatttctcttgt

SEQ ID NO: 41899 - DNA, 580 bp, Zea Mays
gggtggttcacggtggcccagactgctgcgcctcaccaaccaacgagagagcacgaagcacctagcagcccggccttgtcgttgtacggtcccaccggcgccgcagcggaagagatggaagcttatgcccccgccggcagctaccggccggtgtgcgacacggtggtgttcgtctgcctcgcgtccgcctccgccctcatcgtgttcatggtggccgtctgcttccgcaacgccttcgccgccaacgggtacgcgaccgctgccgtggccacaaacggtgccgccggagccaccgctgccaacggcagaagccggtgcgggctggcgccgtccgcgctgtcggcgatccccgtgctcgcttaccgccggaggggcgccgggtgggcgcagtgcgcgatctgcctcgccttggtgcgggacggggagacggtgcgattgctgccggcgtgcggccacctattccacgtcgagtgcatcgacctgtggctgcgctctcacgcaacatgcccgctttgccggcgtggcgtcgtcgaggctcccgtcgaaaagggtccatcacctcagccagaagcttcccaga

SEQ ID NO: 41900 - DNA, 578 bp, Zea Mays
gggtggttcacggtggcccagactgctgcgcctcaccaaccaacgagagagcacgaagcacctagcagcccggccttgtcgttgtacggtcccaccggcgccgcagcggaagagatggaagcttatgcccccgccggcagctaccggccggtgtgcgacacggtggtgttcgtctgcctcgcgtccgcctccgccctcatcgtgttcatggtggccgtctgcttccgcaacgccttcgccgccaacgggtacgcgaccgctgccgtggccacaaacggtgccgccggagccaccgctgccaacggcagaagccggtgcgggctggcgccgtccgcgctgtcggcgatccccgtgctcgcttaccgccggaggggcgccgggtgggcgcagtgcgcgatctgcctcgccttggtgcgggacggggagacggtgcgattgctgccggcgtgcggccacctattccacgtcgagtgcatcgacctgtggctgcgctctcacgcaacatgcccgctttgccggcgtggcgtcgtcgaggctcccgtcgaaaaggtttggtatgcacttcactctggttttga

SEQ ID NO: 41901 - DNA, 923 bp, Zea Mays
ccgctttgccggcgtggcgtcgtcgaggctcccgtcgaaaaggtttgaaagctcgccgctcttggccccaaaaaaaaaaaaagccaagatcacacgctggctgctatactagctagttcagcagacgctcactagttaagcttgttccctgccgtgatgttggatatcttataccaagggttgtagatgctagggcttaggcgtagtttatatatttctggtctctggaatcgaaactttttttttgctagggaaaagtcatatttttatgatgcactatgttttgtgttttctataattaatcttcaatcatgatgctaatgaaatattaaacgtgactatgtcatggactcatgggacttggcgagggcctctggaatgaattagattggagcctagacactactggaaacagcttttttaaaaaacactcggtgaaaacgttactaagtatatataggatgataaagtaggtagtgtgatattattggtcaactttggttgtatcttttactaatctacgcatttcataaggacaaattattataaaattttgctttgtcgtgcaacgtgtgcatcctgatttgacgttaggcaagtgaaatattgtttgaaatggatgctaaatattgtttgaaatggaagcttccgtcttcctacacgcatatgcatgctagttaatttattgccctagaacttctgcgctgctttttcttccaaatataaaaagatgttaaatttttttacaaccaaagcttaatatttgacatatatatacgtatagcaaatataaaaaacatagtcgagcatgctttcatatatttataggatttgtgcataatttaaagttgtttatgataaaaaaagatacctatagtttaacatagttaattgataatatataaagtatatggtcatataga

SEQ ID NO: 41902 - DNA, 332 bp, Zea Mays
cggcgggcggctggctggcgaccagggacaggcggacagcagcgtccggcgccgacgaggctacacagcggcacaggggcggacgcaggcagccatgcggggacgcacaggaccgaaggatggaggcgcggagctgcagaggagagggagcaccagaggttggaggctgcggaagtgcggatgaagaggaagcggcggcgacggcggcgtgacctcgaagacgagagccgacgagccgtgagcaagacgctggccgcgggctattgggccaaattcacaggctctatctgggctacgactagggccactattatcctaggcctgcatccgcc

SEQ ID NO: 41903 - DNA, 6618 bp, Zea Mays
catcagactacatggttgagaagatgctttctccatttcaaagtttcaatattacataactcgaccagtgtagggtaagacagctcacaaccattatattaagataaaaagaatactttctcacataggtcgagaaaacctttgaacctctgacccacccatatatatgggcacccaatgtgagaaacgaccacgattaggacagggtccatgacctgtgatttggtgtaggacagacaagtggattttttaaccataacctgaagttcgttctcatggagagtcgaactcataacctgaggaatgctattcagaccaactaattaactcgactagaatccctttcgctcaacattacagaacacctggaaattttatgtaacttatcaacaactagccaaaagcacttcctaactttatcaactagcttcaagctaagagtgtcccacagcaacacaggaaacacgcacgcccacagccttggatgcctgtcacctgcagcatatatagatccagcctccagccctccacgccatctgcatgcagagttgagaggcaaagaaagaaaaagaaaacaaacatgactcaagctcattcaaagtcatgcttccaacaattttgggatggagttcaagttaagaggaacagtggcagcttcaccatcgagctcctgccatctcttggcgcaacaataaaccaatctaacaagctgcggaagttcatcatatctccctacgatccctgctacagatactgggagctgttcctcatagtcctggtcatttactccgcctggatctgcccgtttgaactagcgtttttgcgggacttgccctctaagcttctgctagctgagaacatcgtcaatggcttcttcgcggttgatattgttttgacgttcttcgtagcttatgtcgacagcaaaacacatcttcttgtggatgaccagaagagaattgcagtaaggtacctatcaacctggttcatctttgatgtatgttcaacagctccatttcaaccaatcagccttctcttcacacgtaaggggaacggccttgcttttaagatactcaacatgttgaggctatggcgtcttcaccgagtcagctcgctgtttgcaaggctggagaaggacataaggttcaactatttctggactaggtgctcaaagcttatttctgttactctgttcgcggtgcactgtgcggggtgcttcaactacatgattgccgacagatatcctgatccagagaaaacgtggataggtgctgtaatgcctaccttcagatcggagagtttatgggctagatatgtaactgccctttactggtcgattacaacactaacaacgacaggttatggggatctacatgctgagaacccaagagagatgctgtttgatatctgctacatgctgtttaatctgggcctgacagcctatcttattggtaatatgaccaacctggttgttcatgggaccagccgcacccggagttttgtatgtttctcaacttattggcaaagtccattaatcctgaactcggttacttctgcctcactaacaatcattcagggacacagattttatttatgaagtgcatgcataagggacaacacattaactgagccaacaaataccatgccattataggcacaacctagctttctttagtcatggtgacttggtggggaaatgacatgagcatctttatacagacaatgcttattcaaagtttgtataagaattcaagggggcaaaactctacacactatggcatctactaaactgagagggaatcagagagatagttttgactggacatcctaataagttcttacacaaactccgagcagtaggactccaatcaagaaaatcagtcaaggcaaccaattaatggaacccaatttttgatagtcatctctcatatgtgctgtaagcccaaagttgttatatcctttagtcatttaaacattcttataacaatagcaccaataaagaaaaaaacaaaattcatggttagtaatatacaaaaatatcaaatcaaatgtaacagatctaatcctttacaaaagcagttagcttacttgttccatttataactttgcaaatgatgcagagggactcaatccaatcggcatcggaatttgcatcacgaaatcagttgcctgataagataaagcagcaaatgttgtctcacttctgcctacagttcaagacagaggggctcagccagcaagctatgctaaattgtctcccaaaaggaattcgttcaggcatagcatacaacctattctttacaatcatacgaaaagcctacctctttcatggggtatctaatagtttcattgcagaactggtaatggaagtacaggctgagtatttcccaccaatggaagacataatgttgcaaaatgaggcggcagcagatatttacataatagtttcaggagtagcgaatttgataacaacagcaaatggtaatgaacaggtgtacgaaaaagttgaagagggagacatgttcggagaggttggtgctctgtgtgacataccccagccatttacttgccgcaccactaccctatcacagctcttgagaataaggaagataagactgacagagatcatgcaagaacacaaggaagacagcaagattctaatgaacaatctatttcagaagctaaagctgcatgagagtttaccagaattaaaacaactagatcgaagattcatgcacaagtacgagctattccatgctcctcaagaagcatggttgttacctcagccttacctgcagtacacagagcacaaattggaagacattggtaagaagatcccaacattttgtggagatcatggttcaacaaaactagcagctgaaacaaaccagatgaggttgacacaacaaggaaacagccatgaccatggcaattatatggcgacggatgggatggcaggcgaagaaggcgaacgcaatgaggttcacataaattgtgaaaccaaagaagtctccattcatataaattctgaagattgtgacgcagcaagccattggcaaacagaccatgaaacggtgaggctggggtcttcccacaatacatccgatggcataactatgagagaaaaccaagatagcagtaacataaaatcatccaacaaaagggtcacaattcacacatatcctcgtaatgcagcaggttctttagtacagaacgggaagcttatcaacctgcctggttcactggacgagatcttcgaaattggatgccagaagtttccgggtctccgccctacaaaactattcagtggagactatgctgagatagatgacattagtgttatacgagatggtgaccacctattccttcttcagatgtaaaaccagaataacattgaattaacctaacgtaacaatagaggattcaagtcctccaatctggcaaaagcagcagattgtaaatcgagatatgcatgtggagatatgaagaggaataccgttttacaaattgttctgatcatttctgacattgtataaatatctgttcttgcataagctgctatctcatgcaaaagttatgcgaggcggtttcctgtttttttttcttttatttgataaaacaatagaatctccacaaaccgaacttacggggtgtttgaatgcattagagctaatagttagtgtttaaaattagttggagacatacaaacaacctaactaatagtttaactattaactatttttagtaaattagttaatagtttgctagttaattccattagtaattttttagataactaaataaaggtgagacaataaaaacaccagtaatggggaattaaccactaatgcagtatcatggcataaaatgaaagcttgtgattcagaactatgagaaacatcctgagatgaaatgtctagaaaggattgtctttatgcagcctacaggccagcaggggtttgattgtcaacaaatctaaacaaggtcatgttagggaggacatcatgacttactcttgttcccctttttcggcaccaatggcaaatctcaaacaaagcatttcaaagagtttagcgatgcagagcgggtgttttagtagagctttttttttttgctattataaatttcattccaagcggcttctacgtaatagtccctacaatttggaattcgataaaacagtcttttctaccgcgttcaaccgttacaatagaattattagtcaatttaaactattttttctcttttatgtttttagccacgtgaacagaccattttgcccctgctctgttttaagttgcctaataattctattgtgacggttgaacacggtagaaagggtcattttaagggggtgtttggttagagggactaaagattagtctctagtttttagtctcatttagtcccttttttgtcaaacactaggactaaaatatggactaaaatgatttagtctttagtccttcacatatgtgctaaaatggactaaatcatattaattacacatttacccctcatttagttcaattatactaatagcaggagaatgttaagagtcattttagtcttcttatgagtcatttagtatattcttagtatttttagcctctaaaaccaaaaatgttatggactaaattttagtccctaaactaaagaaaccaaacatgacctaactaatcacaaattgttgcgactattatgtcgaagccgcttagaatgtggtttataatagcaaaaatacgcgtcttagtaatagctggtctaagatgtctccatgctgttattacaaagaaaaatcaatatttctacctcactcatgaatgggaaaaataactagtagctaatttactaaaaatagctaataactgaattattagctagagtttagatgtcgctaactaattttagccattaattattatctctagagcattcaaaatttgataattatttaaaatgaaaatagataattagaaaagaaatagaaattctcttgaaggttttttagttgtagagatagaaaagtcttagaattgttgatagagatattatttaaaataaaagttgtatgtagacagtctctgatcgtgagcgtccgtttctgtccagacggtcaagccgcgaacatttcccgcccaatcaaacccaaaccaccgctcacctccgctgacggccgccagcccgccacgatggagctctccgccgccttcgaggaacgcgtccggcagatggaggacgcccgcaaccaacgcctcgccctcctcaacgtctcctacgacgctcccctcctcatctcgaattccttcatctgcctcctccccgaaaccctccaaaccctgactccgtggcctcaccgcggcgcccctttcctccccttgccttgatgcgcaggcggagaaggagacccaggccgccaagtcccgtattctctcggccaagctcgccgccacgcgccgactcgagtgccgccgtctcctcctcgagcgccgcgccgccgacctcgccttccgcgccctcgccgcccgcgccgacatcgacgccgcccgcgcgcgccgcctccttgtcgcccgcgacctcagctgaaatctacactgcaagagctgcagagcagcgagatgtactcgaacaacacggagattgctgctgcagaagctaggaagtccgacctgactgctaagaaggcaaagatggaggagagcctggcttcagcccgccagttcagagcgctgcttcagcagcagctccagaaagcctttcagtcacaggtggacgatggggatcaagaggcagctcaagctaccatttgaacttgaagtgctacttcaggtccaatcgtgcgtaaggaaagcgagcgagggcgcctgcatcggtacgcccggtgacttctttcggtttcatgcttgacgcattgcatcggttgtacaggtggaagaaatctggcagggtccaagaaacaccgaatgtcttttttggttgttcgccgaagaacaccgtatggcacttctttcacggcaatggaagcatgtttctcaattgttacctggtaggctggtactatagcttcattgcgacgcttgaccagaactcatcaggcaggaggcatgtgccttcgccatatgcagcaagtgcaatgtactcatcgcatttgcttcaggatctttggcgaagcgtgagcctttttcacccagctagcggactggattggtactgacactgcaaagtgttcattaatgtgtagggctagtcaccctcatttgcatatttgcatgcagccgagaggcaaagtggacgctttagggtttgtgcctcctctccaactactctcgcacttgtaccatctcgttaaatgctgctgcatgaggaagcttttcttgctatgtcaggtgaatcgtccgtgcattgtagaacagcgaaatacggctgtaattcgtaaattcttggaaataaatatcgtgtcagtggctggatatcgaaaaaaatcacagagcacagttgtgagaggatcgtgatgttgagagggggtgaatagagtttctgaaagtgaaatgggctttaagccattttttattgattttggtgtttgtgacaatcacaacttaataaactggctggtttgct

SEQ ID NO: 41904 - DNA, 2001 bp, Zea Mays
aaaaaacttttttaaaaaaaaatcactcccacgtcgcctcgcccgctgcgacagcgcatacgccaccctcccgttgcgtacaccgtatgtatctacggtgactcggggggcacgcagacgcagtggggactggggagagcgagagcgaccgaccgaccgagcaagggtttcgtctccggcggctgcagcggagacggatctgggagggatggggaaccggataggcgggaggcggaagccgggtgtggaggagcggttcacgcggccgcaggggctctacgagcacaaggatatcgaccagaagaagctgcgcaagctgatcctcgaggccaagctcgcgccctgctacccgggcgccgacgacgccgcggccggtggaggggacctcgaccttgaggagtgtcccatctgcttcctgggatattctaggggctgtgtttccacaaggtcgtctgaggaccagccgagtactacccaagcctcaaccgttcaaagtgttgctcaaaggggatatgtacagagtgttttcttcaaatgaaaccgactcatactgctcggcctacacagtgcccattctgcaaaacggccaattatgctgtggagtatcgtggcgtcaaaacaaaggaggaaaggagcatagagcagtttgaagaacagaaagtcatagaagcacaattgaggatgcgccaaaaagaactccaagatgaagaggctaaaatgaaaagaaaacagagcaggtgttcttctagcagaacagtaaccccaacaacagaagttgagtatcgagatatttgcagcacatccttttcagtgccatcatatcaatgtactgaacaaggaaatgaatgctgttcatctgaaccttcatgctctagccaggctaacatgcggcctttccattctaggcacaaccgtgatgataatgttgacatgaatctggaggatatgatggttatggaagcaatttggcgttccattcagcaggaacaagggcatctagtaaatcctgtctgtggcagctactttcctgtaatcgagccaccatcacgtgagaggcaggcatttgttccggctgctcctctagaaatgcctcatccaggtggatattcgtgtgcagttgcggctttggctgagcaccaggcaccaagcatggatttctcttacatgagtggcagtagcacatacccagtctttgacatgatccgacggccatgcaacatgtccagtggaagcctgtgcggcgccgagaacagttcactggacacctggagcgggatagcgccaagttgcagcagggaagtggtaagagacgagggagagtgctcggccgaccactggtcggagggcgcggaggcaggaacaagctacgccggatcggacatcatggcggatgcaggggccatgcagccgctgcctttcgccgagaacttcgccatgggtccaagccacttccgcccggagagcgtcgaggagcagatgatgttttccatggccgtgtcactggcagaagctcatcacggtaggacgcaggcgcaagggctggcatggttgtaagttgtaacactaattttgacgcttcggtgcccccctgcccccttcctgttgcgctgccgttccacttgccccgccccgcttctctgttttttattatttttttggtgccaccttgtttggcattttgctcttttctttctttctctttttttttttgcatgtgttgcttcatggcttgatatagatcttgctatagccctccattgccattgcttatatgtatgtaaaatggaatatgtggaaataggaaagaaaatgggtcagagttcttttgccggtagaggatggggcagtgtgtttttttcgcatcgcagagcattcttaatatcttgcaagtttgcattgtaaccattctcttccgttgacgtgttcttgggtcctgtaaagatgcttgtctgtatggggaaaaaaatgttctagactcggccgatcgaggctgtttttcag

SEQ ID NO: 41905 - DNA, 3946 bp, Zea Mays
attacagatccatgatcaatcgggcaggtagaggtagagaagaaacaaaataaaaacacctttttatctccaccgccaatcgttccatcggacggccgagaaaattcctaaaatgaagactggagacccagcaggtacgcggagcgtagcaaattcttcacgacaccccgatcgagactctggagcgcagagacggcagagagcacagtagccaagcgactggagactcatcactggagactggagagcatccggagccagtgctcgcaccaccgctcccgattcccaatcgccttcccgccgccgaaggggcgccgcactgtcccccggcctcgatctctctcgggccagccgtcggccgtggccctgcgcctcctgcgttatctggctggagatccggccggagtgccattcctactctcggtcaataagtattctggaatgtttttccgagctgaaatagatagcttctggagctggatctcagtattctgttagggacatgctccaaccgagggaagctgatttgcctgcactctttcttgtcttcattgtacttcctgtggtagcttattttcttctcgggagatggcatgatgctgcaagtaagaaggcaagggtaagtgtgcttgctcagcgagctgcagaagaagcctatagagaggaaacaatggcgtgcccagacattattctgccagggtcttccttgagaactatgccctatttcagacctatgcctgcattaagacaggaataccatgaatgtgcaacttgccatgcccctgcaaagactcgttgctccagatgcaaggctgttagatattgctctgggaagtgtcaaatagtacactggaggcaaggacataaggaaacatgccaaaagtggcttggtagtggttctagcagctttggtggatctagcactgaggctactgaacagatgccgttcttgactaacttaaattcacctcttccgggtggtgacattcacttgcgtgacttgaacttcgatactttatcagaaccatcctttcccacaactgatggttataatctagatactgatccatttttggcagacagaagcaacatgaataaatcaaatcaaggtattcatatgagcgaaaatggtgctgttggtgtatcttttgaaaagaataattataatgctgatgatgaaatccactcaccggaaaatttatctagaaacaaggtgtcaaacaactattttggttcagatgcaataagtggtaatggggatgcaatttatcctgccaaaagtaatgcacagcagcctagcagctgtgctcctgacatgagaaaacagccaaaagcaagcatcacagtttatcagcctgacataggtgtctatttaacttctgacatggtcagttcttgtgaggggtcatatgcttctgccagtgagccactgcaaaggagcttgtcatctggaagaactattgggaaagcaaacgcggtgaataagaggcctccatacccatcaagtaaggtggtttcagcacaaaagccacaggatagggtgtctacatcatatcaaaatgatggccatgagaagaatccttgcaacaaaaatgaccaaagatctacccccaaatgtgaatcaagtcaatcaacaagcagcaatctacaaaagtttggagcatccaaggttgaagttttaaagaagccttcaaaatttctcaaaaccagccttgtgggattgatcaatgataataagaggaacaaggtattgttcccatatgaagatcttgtcaagttttttcagtatgaagcccggggtatttcccctagaggtcttttcaattgtggaaacagctgctatgctaatgctgttcttcaatgtctcatgtgcacaaagccactgatgatctaccttcttctgagattgcattctaaagattgttcttcaaaaaaatggtgccttatgtgtgaacttgagcaatatgcttcaactttacgtgaaagtggtgggcccttatctccaagtagaattctttctaatctgaggaatattggatgtcgcttgggtggtggaactcaggaagatgctcatgagtttttaaggcatcttgtgatgtctatgcaagcagcttgcttggatgggctgggtggtgagaagcatgttgagccaagtttgcaggaaacaacactgatacaacagatgtttggtggccgtcttaaatccaaggttaagtgcctcagatgttatcacgagtctgaacgatatgagaatataatggatcttactttggagattcacggctgggtagagtccttgcaggatgctttgacacagttcactgcccctgaagatttagatggtgataatatgtataaatgtggaagttgtgctgcctatgttaaagccaggaagcaactgagcgtgcatgaggtgccaaacatattaacagttgttcttaaaagatttcagtcaggaaaatatggcaagatcaacaaatgtgttactttccctgatatgttggacatggttccttttgtgactgggtctggtgacaatccccctctttatttcttgtatgccgtggttgtacatgtggatacagaaaatgcatcattctctgggcactatatatcatatgtcaaagatatgcagggtacatggttgagaattgatgattcagaggtccaggttgtatcagtgaatcaagttatgtcagaaggtgcatatatgcttttctacatgaggtctttcccccgaccaccaagaatatacatcgagaaggggccgactgttccatccgcgaagcgccacacatcaaagtattccaagggctctaaacacgagcgcgagcagacagagttactcctctcggcgaacgatccagcatacggtgtttatgactttagacctgatggcgagggctacacgcaagatcagcaagcagagttgagatccagggatttccatcgcgccgacgatgccttcgcagactcggtcagcgcggacttctcggaggccacgtcaagcgaatggtcgctgtttaccagctccgacgagtcctcattcaccaccgagagcacaagggactcgttcagcgttgtggactacggcgacaacgctggcctggacccaatctcctcgatatttgggccaagctatgctccggagcatcatcccggtccacctggcagtttcgccgcgtgcacgaggctctcgccttccaacccacagacaaggtacttctcggagagcacagggttcgtctcggactactcttccagcggcattgtacatagaggaagggatccaggtagggcatacacctgttcagcggaaccgctcgcttcggctgcggcggcgcaccagcaccagcggtacgcccttagcggccgagacggtttggtccagacatctgggttctgccaaatgtaaccggctttacgatttcgtagctatagctgtagctggtgctcgggcagctgcggtttagcactgccactgatgctgctgcctctatgttctttttatttcaggtgaaattttagagcgcggtggagctgctccggttgaagccatcccccgaggcccgaaccagtaaattacgccgaatccggcagtcgtatggccctgcacaccagtgctttgtgaaaagcttgcagattcatcaattgacgtgcacttgccttttatatggacgctgacgtatggaggtgcacactctccacctccgtatatctcgccacctactctgtttatattagaaggttgattgctgacacacaacacctgctcgtacttttttgtcgaaatcatgacggacaacaacgctaaacatatagtacaatcttcttgtcttgctgatctgctatgcccctttgtgaaatctgccggtgacatcagcgatggcgtcttgctgatctcgtggtatacctgatgtttcctcggtctcagcttttatcacgc

SEQ ID NO: 41906 - DNA, 3649 bp, Zea Mays
attacagatccatgatcaatcgggcaggtagaggtagagaagaaacaaaataaaaacacctttttatctccaccgccaatcgttccatcggacggccgagaaaattcctaaaatgaagactggagacccagcaggtacgcggagcgtagcaaattcttcacgacaccccgatcgagactctggagcgcagagacggcagagagcacagtagccaagcgactggagactcatcactggagactggagagcatccggagccagtgctcgcaccaccgctcccgattcccaatcgccttcccgccgccgaaggggcgccgcactgtcccccggcctcgatctctctcgggccagccgtcggccgtggccctgcgcctcctgcgttatctggctggagatccggccggagtgccattcctactctcggtcaataagtattctggaatgtttttccgagctgaaatagatagcttctggagctggatctcagtattctgttagggacatgctccaaccgagggaagctgatttgcctgcactctttcttgtcttcattgtacttcctgtggtagcttattttcttctcgggagatggcatgatgctgcaagtaagaaggcaagggtaagtgtgcttgctcagcgagctgcagaagaagcctatagagaggaaacaatggcgtgcccagacattattctgccagggtcttccttgagaactatgccctatttcagacctatgcctgcattaagacaggaataccatgaatgtgcaacttgccatgcccctgcaaagactcgttgctccagatgcaaggctgttagatattgctctgggaagtgtcaaatagtacactggaggcaaggacataaggaaacatgccaaaagtggcttggtagtggttctagcagctttggtggatctagcactgaggctactgaacagatgccgttcttgactaacttaaattcacctcttccgggtggtgacattcacttgcgtgacttgaacttcgatactttatcagaaccatcctttcccacaactgatggttataatctagatactgatccatttttggcagacagaagcaacatgaataaatcaaatcaaggtattcatatgagcgaaaatggtgctgttggtgtatcttttgaaaagaataattataatgctgatgatgaaatccactcaccggaaaatttatctagaaacaaggtgtcaaacaactattttggttcagatgcaataagtggtaatggggatgcaatttatcctgccaaaagtaatgcacagcagcctagcagctgtgctcctgacatgagaaaacagccaaaagcaagcatcacagtttatcagcctgacataggtgtctatttaacttctgacatggtcagttcttgtgaggggtcatatgcttctgccagtgagccactgcaaaggagcttgtcatctggaagaactattgggaaagcaaacgcggtgaataagaggcctccatacccatcaagtaaggtggtttcagcacaaaagccacaggatagggtgtctacatcatatcaaaatgatggccatgagaagaatccttgcaacaaaaatgaccaaagatctacccccaaatgtgaatcaagtcaatcaacaagcagcaatctacaaaagtttggagcatccaaggttgaagttttaaagaagccttcaaaatttctcaaaaccagccttgtgggattgatcaatgataataagaggaacaaggtattgttcccatatgaagatcttgtcaagttttttcagtatgaagcccggggtatttcccctagaggtcttttcaattgtggaaacagctgctatgctaatgctgttcttcaatgtctcatgtgcacaaagccactgatgatctaccttcttctgagattgcattctaaagattgttcttcaaaaaaatggtgccttatgtgtgaacttgagcaatatgcttcaactttacgtgaaagtggtgggcccttatctccaagtagaattctttctaatctgaggaatattggatgtcgcttgggtggtggaactcaggaagatgctcatgagtttttaaggcatcttgtgatgtctatgcaagcagcttgcttggatgggctgggtggtgagaagcatgttgagccaagtttgcaggaaacaacactgatacaacagatgtttggtggccgtcttaaatccaaggttaagtgcctcagatgttatcacgagtctgaacgatatgagaatataatggatcttactttggagattcacggctgggtagagtccttgcaggatgctttgacacagttcactgcccctgaagatttagatggtgataatatgtataaatgtggaagttgtgctgcctatgttaaagccaggaagcaactgagcgtgcatgaggtgccaaacatattaacagttgttcttaaaagatttcagtcaggaaaatatggcaagatcaacaaatgtgttactttccctgatatgttggacatggttccttttgtgactgggtctggtgacaatccccctctttatttcttgtatgccgtggttgtacatgtggatacagaaaatgcatcattctctgggcactatatatcatatgtcaaagatatgcagggtacatggttgagaattgatgattcagaggtccaggttgtatcagtgaatcaagttatgtcagaaggtgcatatatgcttttctacatgaggtctttcccccgaccaccaagaatatacatcgagaaggggccgactgttccatccgcgaagcgccacacatcaaagtattccaagggctctaaacacgagcgcgagcagacagagttactcctctcggcgaacgatccagcatacggtgtttatgactttagacctgatggcgagggctacacgcaagatcagcaagcagagttgagatccagggatttccatcgcgccgacgatgccttcgcagactcggtcagcgcggacttctcggaggccacgtcaagcgaatggtcgctgtttaccagctccgacgagtcctcattcaccaccgagagcacaagggactcgttcagcgttgtggactacggcgacaacgctggcctggacccaatctcctcgatatttgggccaagctatgctccggagcatcatcccggtccacctggcagtttcgccgcgtgcacgaggctctcgccttccaacccacagacaaggtgaaattttagagcgcggtggagctgctccggttgaagccatcccccgaggcccgaaccagtaaattacgccgaatccggcagtcgtatggccctgcacaccagtgctttgtgaaaagcttgcagattcatcaattgacgtgcacttgccttttatatggacgctgacgtatggaggtgcacactctccacctccgtatatctcgccacctactctgtttatattagaaggttgattgctgacacacaacacctgctcgtacttttttgtcgaaatcatgacggacaacaacgctaaacatatagtacaatcttcttgtcttgctgatctgctatgcccctttgtgaaatctgccggtgacatcagcgatggcgtcttgctgatctcgtggtatacctgatgtttcctcggtctcagcttttatcacgc

SEQ ID NO: 41907 - DNA, 4376 bp, Zea Mays
attacagatccatgatcaatcgggcaggtagaggtagagaagaaacaaaataaaaacacctttttatctccaccgccaatcgttccatcggacggccgagaaaattcctaaaatgaagactggagacccagcaggtacgcggagcgtagcaaattcttcacgacaccccgatcgagactctggagcgcagagacggcagagagcacagtagccaagcgactggagactcatcactggagactggagagcatccggagccagtgctcgcaccaccgctcccgattcccaatcgccttcccgccgccgaaggggcgccgcactgtcccccggcctcgatctctctcgggccagccgtcggccgtggccctgcgcctcctgcgttatctggctggagatccggccggagtgccattcctactctcggtcaataagtattctggaatgtttttccgagctgaaatagatagcttctggagctggatctcagtattctgttagggacatgctccaaccgagggaagctgatttgcctgcactctttcttgtcttcattgtacttcctgtggtagcttattttcttctcgggagatggcatgatgctgcaagtaagaaggcaagggtaagtgtgcttgctcagcgagctgcagaagaagcctatagagaggaaacaatggcgtgcccagacattattctgccagggtcttccttgagaactatgccctatttcagacctatgcctgcattaagacaggaataccatgaatgtgcaacttgccatgcccctgcaaagactcgttgctccagatgcaaggctgttagatattgctctgggaagtgtcaaatagtacactggaggcaaggacataaggaaacatgccaaaagtggcttggtagtggttctagcagctttggtggatctagcactgaggctactgaacagatgccgttcttgactaacttaaattcacctcttccgggtggtgacattcacttgcgtgacttgaacttcgatactttatcagaaccatcctttcccacaactgatggttataatctagatactgatccatttttggcagacagaagcaacatgaataaatcaaatcaaggtattcatatgagcgaaaatggtgctgttggtgtatcttttgaaaagaataattataatgctgatgatgaaatccactcaccggaaaatttatctagaaacaaggtgtcaaacaactattttggttcagatgcaataagtggtaatggggatgcaatttatcctgccaaaagtaatgcacagcagcctagcagctgtgctcctgacatgagaaaacagccaaaagcaagcatcacagtttatcagcctgacataggtgtctatttaacttctgacatggtcagttcttgtgaggggtcatatgcttctgccagtgagccactgcaaaggagcttgtcatctggaagaactattgggaaagcaaacgcggtgaataagaggcctccatacccatcaagtaaggtggtttcagcacaaaagccacaggatagggtgtctacatcatatcaaaatgatggccatgagaagaatccttgcaacaaaaatgaccaaagatctacccccaaatgtgaatcaagtcaatcaacaagcagcaatctacaaaagtttggagcatccaaggttgaagttttaaagaagccttcaaaatttctcaaaaccagccttgtgggattgatcaatgataataagaggaacaaggtattgttcccatatgaagatcttgtcaagttttttcagtatgaagcccggggtatttcccctagaggtcttttcaattgtggaaacagctgctatgctaatgctgttcttcaatgtctcatgtgcacaaagccactgatgatctaccttcttctgagattgcattctaaagattgttcttcaaaaaaatggtgccttatgtgtgaacttgagcaatatgcttcaactttacgtgaaagtggtgggcccttatctccaagtagaattctttctaatctgaggaatattggatgtcgcttgggtggtggaactcaggaagatgctcatgagtttttaaggcatcttgtgatgtctatgcaagcagcttgcttggatgggctgggtggtgagaagcatgttgagccaagtttgcaggaaacaacactgatacaacagatgtttggtggccgtcttaaatccaaggttaagtgcctcagatgttatcacgagtctgaacgatatgagaatataatggatcttactttggagattcacggctgggtagagtccttgcaggatgctttgacacagttcactgcccctgaagatttagatggtgataatatgtataaatgtggaagttgtgctgcctatgttaaagccaggaagcaactgagcgtgcatgaggtgccaaacatattaacagttgttcttaaaagatttcagtcaggaaaatatggcaagatcaacaaatgtgttactttccctgatatgttggacatggttccttttgtgactgggtctggtgacaatccccctctttatttcttgtatgccgtggttgtacatgtggatacagaaaatgcatcattctctgggcactatatatcatatgtcaaagatatgcagggtacatggttgagaattgatgattcagaggtacgttttacaacaaggcctactccagttaagtaggctaagaatgtcttaccttatcacctaatgtatgaattgcgagaaattactatggtttcgtgacattgtgtttctagatttaaactctagtgtaaggatagtgaacgttcccatgggcagttttgatcgtcaatgctgtcttccttgatgcagttttgttgtcaaacttctttggtgcacatatgtatgtgcttttccttgtaggtttataggctcattgaaatgaaataggaaaggaaaaaaaaactcgagagtttatgatatcttgtggtgatttatgttgttccatatgtaggtccaggttgtatcagtgaatcaagttatgtcagaaggtgcatatatgcttttctacatgaggtctttcccccgaccaccaagaatatacatcgagaaggggccgactgttccatccgcgaagcgccacacatcaaagtattccaagggctctaaacacgagcgcgagcagacagagttactcctctcggcgaacgatccagcatacggtgtttatgactttagacctgatggcgagggctacacgcaagatcagcaagcagagttgagatccagggatttccatcgcgccgacgatgccttcgcagactcggtcagcgcggacttctcggaggccacgtcaagcgaatggtcgctgtttaccagctccgacgagtcctcattcaccaccgagagcacaagggactcgttcagcgttgtggactacggcgacaacgctggcctggacccaatctcctcgatatttgggccaagctatgctccggagcatcatcccggtccacctggcagtttcgccgcgtgcacgaggctctcgccttccaacccacagacaaggtacttctcggagagcacagggttcgtctcggactactcttccagcggcattgtacatagaggaagggatccaggtagggcatacacctgttcagcggaaccgctcgcttcggctgcggcggcgcaccagcaccagcggtacgcccttagcggccgagacggtttggtccagacatctgggttctgccaaatgtaaccggctttacgatttcgtagctatagctgtagctggtgctcgggcagctgcggtttagcactgccactgatgctgctgcctctatgttctttttatttcaggtgaggcgtattaaattttggctgcatgtcattcctaggctagctcgattcaatgtagcgagagagagaggaacaaatttagattgtgtctatatgcaggtgaaattttagagcgcggtggagctgctccggttgaagccatcccccgaggcccgaaccagtaaattacgccgaatccggcagtcgtatggccctgcacaccagtgctttgtgaaaagcttgcagattcatcaattgacgtgcacttgccttttatatggacgctgacgtatggaggtgcacactctccacctccgtatatctcgccacctactctgtttatattagaaggttgattgctgacacacaacacctgctcgtacttttttgtcgaaatcatgacggacaacaacgctaaacatatagtacaatcttcttgtcttgctgatctgctatgcccctttgtgaaatctgccggtgacatcagcgatggcgtcttgctgatctcgtggtatacctgatgtttcctcggtctcagcttttatcacgc

SEQ ID NO: 41908 - DNA, 3822 bp, Zea Mays
attacagatccatgatcaatcgggcaggtagaggtagagaagaaacaaaataaaaacacctttttatctccaccgccaatcgttccatcggacggccgagaaaattcctaaaatgaagactggagacccagcaggtacgcggagcgtagcaaattcttcacgacaccccgatcgagactctggagcgcagagacggcagagagcacagtagccaagcgactggagactcatcactggagactggagagcatccggagccagtgctcgcaccaccgctcccgattcccaatcgccttcccgccgccgaaggggcgccgcactgtcccccggcctcgatctctctcgggccagccgtcggccgtggccctgcgcctcctgcgttatctggctggagatccggccggagtgccattcctactctcggtcaataagtattctggaatgtttttccgagctgaaatagatagcttctggagctggatctcagtattctgttagggacatgctccaaccgagggaagctgatttgcctgcactctttcttgtcttcattgtacttcctgtggtagcttattttcttctcgggagatggcatgatgctgcaagtaagaaggcaagggtaagtgtgcttgctcagcgagctgcagaagaagcctatagagaggaaacaatggcgtgcccagacattattctgccagggtcttccttgagaactatgccctatttcagacctatgcctgcattaagacaggaataccatgaatgtgcaacttgccatgcccctgcaaagactcgttgctccagatgcaaggctgttagatattgctctgggaagtgtcaaatagtacactggaggcaaggacataaggaaacatgccaaaagtggcttggtagtggttctagcagctttggtggatctagcactgaggctactgaacagatgccgttcttgactaacttaaattcacctcttccgggtggtgacattcacttgcgtgacttgaacttcgatactttatcagaaccatcctttcccacaactgatggttataatctagatactgatccatttttggcagacagaagcaacatgaataaatcaaatcaaggtattcatatgagcgaaaatggtgctgttggtgtatcttttgaaaagaataattataatgctgatgatgaaatccactcaccggaaaatttatctagaaacaaggtgtcaaacaactattttggttcagatgcaataagtggtaatggggatgcaatttatcctgccaaaagtaatgcacagcagcctagcagctgtgctcctgacatgagaaaacagccaaaagcaagcatcacagtttatcagcctgacataggtgtctatttaacttctgacatggtcagttcttgtgaggggtcatatgcttctgccagtgagccactgcaaaggagcttgtcatctggaagaactattgggaaagcaaacgcggtgaataagaggcctccatacccatcaagtaaggtggtttcagcacaaaagccacaggatagggtgtctacatcatatcaaaatgatggccatgagaagaatccttgcaacaaaaatgaccaaagatctacccccaaatgtgaatcaagtcaatcaacaagcagcaatctacaaaagtttggagcatccaaggttgaagttttaaagaagccttcaaaatttctcaaaaccagccttgtgggattgatcaatgataataagaggaacaaggtattgttcccatatgaagatcttgtcaagttttttcagtatgaagcccggggtatttcccctagaggtcttttcaattgtggaaacagctgctatgctaatgctgttcttcaatgtctcatgtgcacaaagccactgatgatctaccttcttctgagattgcattctaaagattgttcttcaaaaaaatggtgccttatgtgtgaacttgagcaatatgcttcaactttacgtgaaagtggtgggcccttatctccaagtagaattctttctaatctgaggaatattggatgtcgcttgggtggtggaactcaggaagatgctcatgagtttttaaggcatcttgtgatgtctatgcaagcagcttgcttggatgggctgggtggtgagaagcatgttgagccaagtttgcaggaaacaacactgatacaacagatgtttggtggccgtcttaaatccaaggttaagtgcctcagatgttatcacgagtctgaacgatatgagaatataatggatcttactttggagattcacggctgggtagagtccttgcaggatgctttgacacagttcactgcccctgaagatttagatggtgataatatgtataaatgtggaagttgtgctgcctatgttaaagccaggaagcaactgagcgtgcatgaggtgccaaacatattaacagttgttcttaaaagatttcagtcaggaaaatatggcaagatcaacaaatgtgttactttccctgatatgttggacatggttccttttgtgactgggtctggtgacaatccccctctttatttcttgtatgccgtggttgtacatgtggatacagaaaatgcatcattctctgggcactatatatcatatgtcaaagatatgcagggtacatggttgagaattgatgattcagaggtccaggttgtatcagtgaatcaagttatgtcagaaggtgcatatatgcttttctacatgaggtctttcccccgaccaccaagaatatacatcgagaaggggccgactgttccatccgcgaagcgccacacatcaaagtattccaagggctctaaacacgagcgcgagcagacagagttactcctctcggcgaacgatccagcatacggtgtttatgactttagacctgatggcgagggctacacgcaagatcagcaagcagagttgagatccagggatttccatcgcgccgacgatgccttcgcagactcggtcagcgcggacttctcggaggccacgtcaagcgaatggtcgctgtttaccagctccgacgagtcctcattcaccaccgagagcacaagggactcgttcagcgttgtggactacggcgacaacgctggcctggacccaatctcctcgatatttgggccaagctatgctccggagcatcatcccggtccacctggcagtttcgccgcgtgcacgaggctctcgccttccaacccacagacaaggtacttctcggagagcacagggttcgtctcggactactcttccagcggcattgtacatagaggaagggatccaggtgaggcgtattaaattttggctgcatgtcattcctaggctagctcgattcaatgtagcgagagagagaggaacaaatttagattgtgtctatatgcaggtgaaattttagagcgcggtggagctgctccggttgaagccatcccccgaggcccgaaccagtaaattacgccgaatccggcagtcgtatggccctgcacaccagtgctttgtgaaaagcttgcagattcatcaattgacgtgcacttgccttttatatggacgctgacgtatggaggtgcacactctccacctccgtatatctcgccacctactctgtttatattagaaggttgattgctgacacacaacacctgctcgtacttttttgtcgaaatcatgacggacaacaacgctaaacatatagtacaatcttcttgtcttgctgatctgctatgcccctttgtgaaatctgccggtgacatcagcgatggcgtcttgctgatctcgtggtatacctgatgtttcctcggtctcagcttttatcacgc

SEQ ID NO: 41909 - DNA, 3723 bp, Zea Mays
attacagatccatgatcaatcgggcaggtagaggtagagaagaaacaaaataaaaacacctttttatctccaccgccaatcgttccatcggacggccgagaaaattcctaaaatgaagactggagacccagcaggtacgcggagcgtagcaaattcttcacgacaccccgatcgagactctggagcgcagagacggcagagagcacagtagccaagcgactggagactcatcactggagactggagagcatccggagccagtgctcgcaccaccgctcccgattcccaatcgccttcccgccgccgaaggggcgccgcactgtcccccggcctcgatctctctcgggccagccgtcggccgtggccctgcgcctcctgcgttatctggctggagatccggccggagtgccattcctactctcggtcaataagtattctggaatgtttttccgagctgaaatagatagcttctggagctggatctcagtattctgttagggacatgctccaaccgagggaagctgatttgcctgcactctttcttgtcttcattgtacttcctgtggtagcttattttcttctcgggagatggcatgatgctgcaagtaagaaggcaagggtaagtgtgcttgctcagcgagctgcagaagaagcctatagagaggaaacaatggcgtgcccagacattattctgccagggtcttccttgagaactatgccctatttcagacctatgcctgcattaagacaggaataccatgaatgtgcaacttgccatgcccctgcaaagactcgttgctccagatgcaaggctgttagatattgctctgggaagtgtcaaatagtacactggaggcaaggacataaggaaacatgccaaaagtggcttggtagtggttctagcagctttggtggatctagcactgaggctactgaacagatgccgttcttgactaacttaaattcacctcttccgggtggtgacattcacttgcgtgacttgaacttcgatactttatcagaaccatcctttcccacaactgatggttataatctagatactgatccatttttggcagacagaagcaacatgaataaatcaaatcaaggtattcatatgagcgaaaatggtgctgttggtgtatcttttgaaaagaataattataatgctgatgatgaaatccactcaccggaaaatttatctagaaacaaggtgtcaaacaactattttggttcagatgcaataagtggtaatggggatgcaatttatcctgccaaaagtaatgcacagcagcctagcagctgtgctcctgacatgagaaaacagccaaaagcaagcatcacagtttatcagcctgacataggtgtctatttaacttctgacatggtcagttcttgtgaggggtcatatgcttctgccagtgagccactgcaaaggagcttgtcatctggaagaactattgggaaagcaaacgcggtgaataagaggcctccatacccatcaagtaaggtggtttcagcacaaaagccacaggatagggtgtctacatcatatcaaaatgatggccatgagaagaatccttgcaacaaaaatgaccaaagatctacccccaaatgtgaatcaagtcaatcaacaagcagcaatctacaaaagtttggagcatccaaggttgaagttttaaagaagccttcaaaatttctcaaaaccagccttgtgggattgatcaatgataataagaggaacaaggtattgttcccatatgaagatcttgtcaagttttttcagtatgaagcccggggtatttcccctagaggtcttttcaattgtggaaacagctgctatgctaatgctgttcttcaatgtctcatgtgcacaaagccactgatgatctaccttcttctgagattgcattctaaagattgttcttcaaaaaaatggtgccttatgtgtgaacttgagcaatatgcttcaactttacgtgaaagtggtgggcccttatctccaagtagaattctttctaatctgaggaatattggatgtcgcttgggtggtggaactcaggaagatgctcatgagtttttaaggcatcttgtgatgtctatgcaagcagcttgcttggatgggctgggtggtgagaagcatgttgagccaagtttgcaggaaacaacactgatacaacagatgtttggtggccgtcttaaatccaaggttaagtgcctcagatgttatcacgagtctgaacgatatgagaatataatggatcttactttggagattcacggctgggtagagtccttgcaggatgctttgacacagttcactgcccctgaagatttagatggtgataatatgtataaatgtggaagttgtgctgcctatgttaaagccaggaagcaactgagcgtgcatgaggtgccaaacatattaacagttgttcttaaaagatttcagtcaggaaaatatggcaagatcaacaaatgtgttactttccctgatatgttggacatggttccttttgtgactgggtctggtgacaatccccctctttatttcttgtatgccgtggttgtacatgtggatacagaaaatgcatcattctctgggcactatatatcatatgtcaaagatatgcagggtacatggttgagaattgatgattcagaggtccaggttgtatcagtgaatcaagttatgtcagaaggtgcatatatgcttttctacatgaggtctttcccccgaccaccaagaatatacatcgagaaggggccgactgttccatccgcgaagcgccacacatcaaagtattccaagggctctaaacacgagcgcgagcagacagagttactcctctcggcgaacgatccagcatacggtgtttatgactttagacctgatggcgagggctacacgcaagatcagcaagcagagttgagatccagggatttccatcgcgccgacgatgccttcgcagactcggtcagcgcggacttctcggaggccacgtcaagcgaatggtcgctgtttaccagctccgacgagtcctcattcaccaccgagagcacaagggactcgttcagcgttgtggactacggcgacaacgctggcctggacccaatctcctcgatatttgggccaagctatgctccggagcatcatcccggtccacctggcagtttcgccgcgtgcacgaggctctcgccttccaacccacagacaaggtacttctcggagagcacagggttcgtctcggactactcttccagcggcattgtacatagaggaagggatccaggtgaaattttagagcgcggtggagctgctccggttgaagccatcccccgaggcccgaaccagtaaattacgccgaatccggcagtcgtatggccctgcacaccagtgctttgtgaaaagcttgcagattcatcaattgacgtgcacttgccttttatatggacgctgacgtatggaggtgcacactctccacctccgtatatctcgccacctactctgtttatattagaaggttgattgctgacacacaacacctgctcgtacttttttgtcgaaatcatgacggacaacaacgctaaacatatagtacaatcttcttgtcttgctgatctgctatgcccctttgtgaaatctgccggtgacatcagcgatggcgtcttgctgatctcgtggtatacctgatgtttcctcggtctcagcttttatcacgc

SEQ ID NO: 41910 - DNA, 2867 bp, Zea Mays
atgatcaatcgggcaggtagaggtagagaagaaacaaaataaaaacacctttttatctccaccgccaatcgttccatcggacggccgagaaaattcctaaaatgaagactggagacccagcaggtacgcggagcgtagcaaattcttcacgacaccccgatcgagactctggagcgcagagacggcagagagcacagtagccaagcgactggagactcatcactggagactggagagcatccggagccagtgctcgcaccaccgctcccgattcccaatcgccttcccgccgccgaaggggcgccgcactgtcccccggcctcgatctctctcgggccagccgtcggccgtggccctgcgcctcctgcgttatctggctggagatccggccggagtgccattcctactctcggtcaataagtattctggaatgtttttccgagctgaaatagatagcttctggagctggatctcagtattctgttagggacatgctccaaccgagggaagctgatttgcctgcactctttcttgtcttcattgtacttcctgtggtagcttattttcttctcgggagatggcatgatgctgcaagtaagaaggcaagggtaagtgtgcttgctcagcgagctgcagaagaagcctatagagaggaaacaatggcgtgcccagacattattctgccagggtcttccttgagaactatgccctatttcagacctatgcctgcattaagacaggaataccatgaatgtgcaacttgccatgcccctgcaaagactcgttgctccagatgcaaggctgttagatattgctctgggaagtgtcaaatagtacactggaggcaaggacataaggaaacatgccaaaagtggcttggtagtggttctagcagctttggtggatctagcactgaggctactgaacagatgccgttcttgactaacttaaattcacctcttccgggtggtgacattcacttgcgtgacttgaacttcgatactttatcagaaccatcctttcccacaactgatggttataatctagatactgatccatttttggcagacagaagcaacatgaataaatcaaatcaaggtattcatatgagcgaaaatggtgctgttggtgtatcttttgaaaagaataattataatgctgatgatgaaatccactcaccggaaaatttatctagaaacaaggtgtcaaacaactattttggttcagatgcaataagtggtaatggggatgcaatttatcctgccaaaagtaatgcacagcagcctagcagctgtgctcctgacatgagaaaacagccaaaagcaagcatcacagtttatcagcctgacataggtgtctatttaacttctgacatggtcagttcttgtgaggggtcatatgcttctgccagtgagccactgcaaaggagcttgtcatctggaagaactattgggaaagcaaacgcggtgaataagaggcctccatacccatcaagtaaggtggtttcagcacaaaagccacaggatagggtgtctacatcatatcaaaatgatggccatgagaagaatccttgcaacaaaaatgaccaaagatctacccccaaatgtgaatcaagtcaatcaacaagcagcaatctacaaaagtttggagcatccaaggttgaagttttaaagaagccttcaaaatttctcaaaaccagccttgtgggattgatcaatgataataagaggaacaaggtattgttcccatatgaagatcttgtcaagttttttcagtatgaagcccggggtatttcccctagaggtcttttcaattgtggaaacagctgctatgctaatgctgttcttcaatgtctcatgtgcacaaagccactgatgatctaccttcttctgagattgcattctaaagattgttcttcaaaaaaatggtgccttatgtgtgaacttgagcaatatgcttcaactttacgtgaaagtggtgggcccttatctccaagtagaattctttctaatctgaggaatattggatgtcgcttgggtggtggaactcaggaagatgctcatgagtttttaagcttgcttggatgggctgggtggtgagaagcatgttgagccaagtttgcaggaaacaacactgatacaacagatgtttggtggccgtcttaaatccaaggttaagtgcctcagatgttatcacgagtctgaacgatatgagaatataatggatcttactttggagattcacggctgggtagagtccttgcaggatgctttgacacagttcactgcccctgaagatttagatggtgataatatgtataaatgtggaagttgtgctgcctatgttaaagccaggaagcaactgagcgtgcatgaggtgccaaacatattaacagttgttcttaaaagatttcagtcaggaaaatatggcaagatcaacaaatgtgttactttccctgatatgttggacatggttccttttgtgactgggtctggtgacaatccccctctttatttcttgtatgccgtggttgtacatgtggatacagaaaatgcatcattctctgggcactatatatcatatgtcaaagatatgcagggtacatggttgagaattgatgattcagaggtacgttttacaacaaggcctactccagttaagtaggctaagaatgtcttaccttatcacctaatgtatgaattgcgagaaattactatggtttcgtgacattgtgtttctagatttaaactctagtgtaaggatagtgaacgttcccatgggcagttttgatcgtcaatgctgtcttccttgatgcagttttgttgtcaaacttctttggtgcacatatgtatgtgcttttccttgta

SEQ ID NO: 41911 - DNA, 3914 bp, Zea Mays
gaaaattcctaaaatgaagactggagacccagcaggtacgcggagcgtagcaaattcttcacgacaccccgatcgagactctggagcgcagagacggcagagagcacagtagccaagcgactggagactcatcactggagactggagagcatccggagccagtgctcgcaccaccgctcccgattcccaatcgccttcccgccgccgaaggggcgccgcactgtcccccggcctcgatctctctcgggccagccgtcggccgtggccctgcgcctcctgcgttatctggctggagatccggccggagtgccattcctactctcggtcaataagtattctggaatgtttttccgagctgaaatagatagcttctggagctggatctcagtattctgttagggacatgctccaaccgagggaagctgatttgcctgcactctttcttgtcttcattgtacttcctgtggtagcttattttcttctcgggagatggcatgatgctgcaagtaagaaggcaagggtaagtgtgcttgctcagcgagctgcagaagaagcctatagagaggaaacaatggcgtgcccagacattattctgccagggtcttccttgagaactatgccctatttcagacctatgcctgcattaagacaggaataccatgaatgtgcaacttgccatgcccctgcaaagactcgttgctccagatgcaaggctgttagatattgctctgggaagtgtcaaatagtacactggaggcaaggacataaggaaacatgccaaaagtggcttggtagtggttctagcagctttggtggatctagcactgaggctactgaacagatgccgttcttgactaacttaaattcacctcttccgggtggtgacattcacttgcgtgacttgaacttcgatactttatcagaaccatcctttcccacaactgatggttataatctagatactgatccatttttggcagacagaagcaacatgaataaatcaaatcaaggtattcatatgagcgaaaatggtgctgttggtgtatcttttgaaaagaataattataatgctgatgatgaaatccactcaccggaaaatttatctagaaacaaggtgtcaaacaactattttggttcagatgcaataagtggtaatggggatgcaatttatcctgccaaaagtaatgcacagcagcctagcagctgtgctcctgacatgagaaaacagccaaaagcaagcatcacagtttatcagcctgacataggtgtctatttaacttctgacatggtcagttcttgtgaggggtcatatgcttctgccagtgagccactgcaaaggagcttgtcatctggaagaactattgggaaagcaaacgcggtgaataagaggcctccatacccatcaagtaaggtggtttcagcacaaaagccacaggatagggtgtctacatcatatcaaaatgatggccatgagaagaatccttgcaacaaaaatgaccaaagatctacccccaaatgtgaatcaagtcaatcaacaagcagcaatctacaaaagtttggagcatccaaggttgaagttttaaagaagccttcaaaatttctcaaaaccagccttgtgggattgatcaatgataataagaggaacaaggtattgttcccatatgaagatcttgtcaagttttttcagtatgaagcccggggtatttcccctagaggtcttttcaattgtggaaacagctgctatgctaatgctgttcttcaatgtctcatgtgcacaaagccactgatgatctaccttcttctgagattgcattctaaagattgttcttcaaaaaaatggtgccttatgtgtgaacttgagcaatatgcttcaactttacgtgaaagtggtgggcccttatctccaagtagaattctttctaatctgaggaatattggatgtcgcttgggtggtggaactcaggaagatgctcatgagtttttaagcttgcttggatgggctgggtggtgagaagcatgttgagccaagtttgcaggaaacaacactgatacaacagatgtttggtggccgtcttaaatccaagtgcctcagatgttatcacgagtctgaacgatatgagaatataatggatcttactttggagattcacggctgggtagagtccttgcaggatgctttgacacagttcactgcccctgaagatttagatggtgataatatgtataaatgtggaagttgtgctgcctatgttaaagccaggaagcaactgagcgtgcatgaggtgccaaacatattaacagttgttcttaaaagatttcagtcaggaaaatatggcaagatcaacaaatgtgttactttccctgatatgttggacatggttccttttgtgactgggtctggtgacaatccccctctttatttcttgtatgccgtggttgtacatgtggatacagaaaatgcatcattctctgggcactatatatcatatgtcaaagatatgcagggtacatggttgagaattgatgattcagaggtccaggttgtatcagtgaatcaagttatgtcagaaggtgcatatatgcttttctacatgaggtctttcccccgaccaccaagaatatacatcgagaaggggccgactgttccatccgcgaagcgccacacatcaaagtattccaagggctctaaacacgagcgcgagcagacagagttactcctctcggcgaacgatccagcatacggtgtttatgactttagacctgatggcgagggctacacgcaagatcagcaagcagagttgagatccagggatttccatcgcgccgacgatgccttcgcagactcggtcagcgcggacttctcggaggccacgtcaagcgaatggtcgctgtttaccagctccgacgagtcctcattcaccaccgagagcacaagggactcgttcagcgttgtggactacggcgacaacgctggcctggacccaatctcctcgatatttgggccaagctatgctccggagcatcatcccggtccacctggcagtttcgccgcgtgcacgaggctctcgccttccaacccacagacaaggtacttctcggagagcacagggttcgtctcggactactcttccagcggcattgtacatagaggaagggatccaggtagggcatacacctgttcagcggaaccgctcgcttcggctgcggcggcgcaccagcaccagcggtacgcccttagcggccgagacggtttggtccagacatctgggttctgccaaatgtaaccggctttacgatttcgtagctatagctgtagctggtgctcgggcagctgcggtttagcactgccactgatgctgctgcctctatgttctttttatttcaggtgaggcgtattaaattttggctgcatgtcattcctaggctagctcgattcaatgtagcgagagagagaggaacaaatttagattgtgtctatatgcaggtgaaattttagagcgcggtggagctgctccggttgaagccatcccccgaggcccgaaccagtaaattacgccgaatccggcagtcgtatggccctgcacaccagtgctttgtgaaaagcttgcagattcatcaattgacgtgcacttgccttttatatggacgctgacgtatggaggtgcacactctccacctccgtatatctcgccacctactctgtttatattagaaggttgattgctgacacacaacacctgctcgtacttttttgtcgaaatcatgacggacaacaacgctaaacatatagtacaatcttcttgtcttgctgatctgctatgcccctttgtgaaatctgccggtgacatcagcgatggcgtcttgctgatctcgtggtatacctgatgtttcctcggtctcagcttttatcacgc

SEQ ID NO: 41912 - DNA, 3860 bp, Zea Mays
gaaaattcctaaaatgaagactggagacccagcaggtacgcggagcgtagcaaattcttcacgacaccccgatcgagactctggagcgcagagacggcagagagcacagtagccaagcgactggagactcatcactggagactggagagcatccggagccagtgctcgcaccaccgctcccgattcccaatcgccttcccgccgccgaaggggcgccgcactgtcccccggcctcgatctctctcgggccagccgtcggccgtggccctgcgcctcctgcgttatctggctggagatccggccggagtgccattcctactctcggtcaataagtattctggaatgtttttccgagctgaaatagatagcttctggagctggatctcagtattctgttagggacatgctccaaccgagggaagctgatttgcctgcactctttcttgtcttcattgtacttcctgtggtagcttattttcttctcgggagatggcatgatgctgcaagtaagaaggcaagggtaagtgtgcttgctcagcgagctgcagaagaagcctatagagaggaaacaatggcgtgcccagacattattctgccagggtcttccttgagaactatgccctatttcagacctatgcctgcattaagacaggaataccatgaatgtgcaacttgccatgcccctgcaaagactcgttgctccagatgcaaggctgttagatattgctctgggaagtgtcaaatagtacactggaggcaaggacataaggaaacatgccaaaagtggcttggtagtggttctagcagctttggtggatctagcactgaggctactgaacagatgccgttcttgactaacttaaattcacctcttccgggtggtgacattcacttgcgtgacttgaacttcgatactttatcagaaccatcctttcccacaactgatggttataatctagatactgatccatttttggcagacagaagcaacatgaataaatcaaatcaaggtattcatatgagcgaaaatggtgctgttggtgtatcttttgaaaagaataattataatgctgatgatgaaatccactcaccggaaaatttatctagaaacaaggtgtcaaacaactattttggttcagatgcaataagtggtaatggggatgcaatttatcctgccaaaagtaatgcacagcagcctagcagctgtgctcctgacatgagaaaacagccaaaagcaagcatcacagtttatcagcctgacataggtgtctatttaacttctgacatggtcagttcttgtgaggggtcatatgcttctgccagtgagccactgcaaaggagcttgtcatctggaagaactattgggaaagcaaacgcggtgaataagaggcctccatacccatcaagtaaggtggtttcagcacaaaagccacaggatagggtgtctacatcatatcaaaatgatggccatgagaagaatccttgcaacaaaaatgaccaaagatctacccccaaatgtgaatcaagtcaatcaacaagcagcaatctacaaaagtttggagcatccaaggttgaagttttaaagaagccttcaaaatttctcaaaaccagccttgtgggattgatcaatgataataagaggaacaaggtattgttcccatatgaagatcttgtcaagttttttcagtatgaagcccggggtatttcccctagaggtcttttcaattgtggaaacaggttcttcaaaaaaatggtgccttatgtgtgaacttgagcaatatgcttcaactttacgtgaaagtggtgggcccttatctccaagtagaattctttctaatctgaggaatattggatgtcgcttgggtggtggaactcaggaagatgctcatgagtttttaaggcatcttgtgatgtctatgcaagcagcttgcttggatgggctgggtggtgagaagcatgttgagccaagtttgcaggaaacaacactgatacaacagatgtttggtggccgtcttaaatccaaggttaagtgcctcagatgttatcacgagtctgaacgatatgagaatataatggatcttactttggagattcacggctgggtagagtccttgcaggatgctttgacacagttcactgcccctgaagatttagatggtgataatatgtataaatgtggaagttgtgctgcctatgttaaagccaggaagcaactgagcgtgcatgaggtgccaaacatattaacagttgttcttaaaagatttcagtcaggaaaatatggcaagatcaacaaatgtgttactttccctgatatgttggacatggttccttttgtgactgggtctggtgacaatccccctctttatttcttgtatgccgtggttgtacatgtggatacagaaaatgcatcattctctgggcactatatatcatatgtcaaagatatgcagggtacatggttgagaattgatgattcagaggtccaggttgtatcagtgaatcaagttatgtcagaaggtgcatatatgcttttctacatgaggtctttcccccgaccaccaagaatatacatcgagaaggggccgactgttccatccgcgaagcgccacacatcaaagtattccaagggctctaaacacgagcgcgagcagacagagttactcctctcggcgaacgatccagcatacggtgtttatgactttagacctgatggcgagggctacacgcaagatcagcaagcagagttgagatccagggatttccatcgcgccgacgatgccttcgcagactcggtcagcgcggacttctcggaggccacgtcaagcgaatggtcgctgtttaccagctccgacgagtcctcattcaccaccgagagcacaagggactcgttcagcgttgtggactacggcgacaacgctggcctggacccaatctcctcgatatttgggccaagctatgctccggagcatcatcccggtccacctggcagtttcgccgcgtgcacgaggctctcgccttccaacccacagacaaggtacttctcggagagcacagggttcgtctcggactactcttccagcggcattgtacatagaggaagggatccaggtagggcatacacctgttcagcggaaccgctcgcttcggctgcggcggcgcaccagcaccagcggtacgcccttagcggccgagacggtttggtccagacatctgggttctgccaaatgtaaccggctttacgatttcgtagctatagctgtagctggtgctcgggcagctgcggtttagcactgccactgatgctgctgcctctatgttctttttatttcaggtgaggcgtattaaattttggctgcatgtcattcctaggctagctcgattcaatgtagcgagagagagaggaacaaatttagattgtgtctatatgcaggtgaaattttagagcgcggtggagctgctccggttgaagccatcccccgaggcccgaaccagtaaattacgccgaatccggcagtcgtatggccctgcacaccagtgctttgtgaaaagcttgcagattcatcaattgacgtgcacttgccttttatatggacgctgacgtatggaggtgcacactctccacctccgtatatctcgccacctactctgtttatattagaaggttgattgctgacacacaacacctgctcgtacttttttgtcgaaatcatgacggacaacaacgctaaacatatagtacaatcttcttgtcttgctgatctgctatgcccctttgtgaaatctgccggtgacatcagcgatggcgtcttgctgatctcgtggtatacctgatgtttcctcggtctcagcttttatcacgc

SEQ ID NO: 41913 - DNA, 3493 bp, Zea Mays
aaattcttcacgacaccccgatcgagactctggagcgcagagacggcagagagcacagtagccaagcgactggagactcatcactggagactggagagcatccggagccagtgctcgcaccaccgctcccgattcccaatcgccttcccgccgccgaaggggcgccgcactgtcccccggcctcgatctctctcgggccagccgtcggccgtggccctgcgcctcctgcgttatctggctggagatccggccggagtgccattcctactctcgctctgggaagtgtcaaatagtacactggaggcaaggacataaggaaacatgccaaaagtggcttggtagtggttctagcagctttggtggatctagcactgaggctactgaacagatgccgttcttgactaacttaaattcacctcttccgggtggtgacattcacttgcgtgacttgaacttcgatactttatcagaaccatcctttcccacaactgatggttataatctagatactgatccatttttggcagacagaagcaacatgaataaatcaaatcaaggtattcatatgagcgaaaatggtgctgttggtgtatcttttgaaaagaataattataatgctgatgatgaaatccactcaccggaaaatttatctagaaacaaggtgtcaaacaactattttggttcagatgcaataagtggtaatggggatgcaatttatcctgccaaaagtaatgcacagcagcctagcagctgtgctcctgacatgagaaaacagccaaaagcaagcatcacagtttatcagcctgacataggtgtctatttaacttctgacatggtcagttcttgtgaggggtcatatgcttctgccagtgagccactgcaaaggagcttgtcatctggaagaactattgggaaagcaaacgcggtgaataagaggcctccatacccatcaagtaaggtggtttcagcacaaaagccacaggatagggtgtctacatcatatcaaaatgatggccatgagaagaatccttgcaacaaaaatgaccaaagatctacccccaaatgtgaatcaagtcaatcaacaagcagcaatctacaaaagtttggagcatccaaggttgaagttttaaagaagccttcaaaatttctcaaaaccagccttgtgggattgatcaatgataataagaggaacaaggtattgttcccatatgaagatcttgtcaagttttttcagtatgaagcccggggtatttcccctagaggtcttttcaattgtggaaacagctgctatgctaatgctgttcttcaatgtctcatgtgcacaaagccactgatgatctaccttcttctgagattgcattctaaagattgttcttcaaaaaaatggtgccttatgtgtgaacttgagcaatatgcttcaactttacgtgaaagtggtgggcccttatctccaagtagaattctttctaatctgaggaatattggatgtcgcttgggtggtggaactcaggaagatgctcatgagtttttaaggcatcttgtgatgtctatgcaagcagcttgcttggatgggctgggtggtgagaagcatgttgagccaagtttgcaggaaacaacactgatacaacagatgtttggtggccgtcttaaatccaaggttaagtgcctcagatgttatcacgagtctgaacgatatgagaatataatggatcttactttggagattcacggctgggtagagtccttgcaggatgctttgacacagttcactgcccctgaagatttagatggtgataatatgtataaatgtggaagttgtgctgcctatgttaaagccaggaagcaactgagcgtgcatgaggtgccaaacatattaacagttgttcttaaaagatttcagtcaggaaaatatggcaagatcaacaaatgtgttactttccctgatatgttggacatggttccttttgtgactgggtctggtgacaatccccctctttatttcttgtatgccgtggttgtacatgtggatacagaaaatgcatcattctctgggcactatatatcatatgtcaaagatatgcagggtacatggttgagaattgatgattcagaggtccaggttgtatcagtgaatcaagttatgtcagaaggtgcatatatgcttttctacatgaggtctttcccccgaccaccaagaatatacatcgagaaggggccgactgttccatccgcgaagcgccacacatcaaagtattccaagggctctaaacacgagcgcgagcagacagagttactcctctcggcgaacgatccagcatacggtgtttatgactttagacctgatggcgagggctacacgcaagatcagcaagcagagttgagatccagggatttccatcgcgccgacgatgccttcgcagactcggtcagcgcggacttctcggaggccacgtcaagcgaatggtcgctgtttaccagctccgacgagtcctcattcaccaccgagagcacaagggactcgttcagcgttgtggactacggcgacaacgctggcctggacccaatctcctcgatatttgggccaagctatgctccggagcatcatcccggtccacctggcagtttcgccgcgtgcacgaggctctcgccttccaacccacagacaaggtacttctcggagagcacagggttcgtctcggactactcttccagcggcattgtacatagaggaagggatccaggtagggcatacacctgttcagcggaaccgctcgcttcggctgcggcggcgcaccagcaccagcggtacgcccttagcggccgagacggtttggtccagacatctgggttctgccaaatgtaaccggctttacgatttcgtagctatagctgtagctggtgctcgggcagctgcggtttagcactgccactgatgctgctgcctctatgttctttttatttcaggtgaggcgtattaaattttggctgcatgtcattcctaggctagctcgattcaatgtagcgagagagagaggaacaaatttagattgtgtctatatgcaggtgaaattttagagcgcggtggagctgctccggttgaagccatcccccgaggcccgaaccagtaaattacgccgaatccggcagtcgtatggccctgcacaccagtgctttgtgaaaagcttgcagattcatcaattgacgtgcacttgccttttatatggacgctgacgtatggaggtgcacactctccacctccgtatatctcgccacctactctgtttatattagaaggttgattgctgacacacaacacctgctcgtacttttttgtcgaaatcatgacggacaacaacgctaaacatatagtacaatcttcttgtcttgctgatctgctatgcccctttgtgaaatctgccggtgacatcagcgatggcgtcttgctgatctcgtggtatacctgatgtttcctcggtctcagcttttatcacgc

SEQ ID NO: 41914 - DNA, 3680 bp, Zea Mays
ctgagctgctgtgctcctgtgggcttgtgagccaaagccatggaaatcatcatacaaggtcaataagtattctggaatgtttttccgagctgaaatagatagcttctggagctggatctcagtattctgttagggacatgctccaaccgagggaagctgatttgcctgcactctttcttgtcttcattgtacttcctgtggtagcttattttcttctcgggagatggcatgatgctgcaagtaagaaggcaagggtaagtgtgcttgctcagcgagctgcagaagaagcctatagagaggaaacaatggcgtgcccagacattattctgccagggtcttccttgagaactatgccctatttcagacctatgcctgcattaagacaggaataccatgaatgtgcaacttgccatgcccctgcaaagactcgttgctccagatgcaaggctgttagatattgctctgggaagtgtcaaatagtacactggaggcaaggacataaggaaacatgccaaaagtggcttggtagtggttctagcagctttggtggatctagcactgaggctactgaacagatgccgttcttgactaacttaaattcacctcttccgggtggtgacattcacttgcgtgacttgaacttcgatactttatcagaaccatcctttcccacaactgatggttataatctagatactgatccatttttggcagacagaagcaacatgaataaatcaaatcaaggtattcatatgagcgaaaatggtgctgttggtgtatcttttgaaaagaataattataatgctgatgatgaaatccactcaccggaaaatttatctagaaacaaggtgtcaaacaactattttggttcagatgcaataagtggtaatggggatgcaatttatcctgccaaaagtaatgcacagcagcctagcagctgtgctcctgacatgagaaaacagccaaaagcaagcatcacagtttatcagcctgacataggtgtctatttaacttctgacatggtcagttcttgtgaggggtcatatgcttctgccagtgagccactgcaaaggagcttgtcatctggaagaactattgggaaagcaaacgcggtgaataagaggcctccatacccatcaagtaaggtggtttcagcacaaaagccacaggatagggtgtctacatcatatcaaaatgatggccatgagaagaatccttgcaacaaaaatgaccaaagatctacccccaaatgtgaatcaagtcaatcaacaagcagcaatctacaaaagtttggagcatccaaggttgaagttttaaagaagccttcaaaatttctcaaaaccagccttgtgggattgatcaatgataataagaggaacaaggtattgttcccatatgaagatcttgtcaagttttttcagtatgaagcccggggtatttcccctagaggtcttttcaattgtggaaacagctgctatgctaatgctgttcttcaatgtctcatgtgcacaaagccactgatgatctaccttcttctgagattgcattctaaagattgttcttcaaaaaaatggtgccttatgtgtgaacttgagcaatatgcttcaactttacgtgaaagtggtgggcccttatctccaagtagaattctttctaatctgaggaatattggatgtcgcttgggtggtggaactcaggaagatgctcatgagtttttaaggcatcttgtgatgtctatgcaagcagcttgcttggatgggctgggtggtgagaagcatgttgagccaagtttgcaggaaacaacactgatacaacagatgtttggtggccgtcttaaatccaaggttaagtgcctcagatgttatcacgagtctgaacgatatgagaatataatggatcttactttggagattcacggctgggtagagtccttgcaggatgctttgacacagttcactgcccctgaagatttagatggtgataatatgtataaatgtggaagttgtgctgcctatgttaaagccaggaagcaactgagcgtgcatgaggtgccaaacatattaacagttgttcttaaaagatttcagtcaggaaaatatggcaagatcaacaaatgtgttactttccctgatatgttggacatggttccttttgtgactgggtctggtgacaatccccctctttatttcttgtatgccgtggttgtacatgtggatacagaaaatgcatcattctctgggcactatatatcatatgtcaaagatatgcagggtacatggttgagaattgatgattcagaggtccaggttgtatcagtgaatcaagttatgtcagaaggtgcatatatgcttttctacatgaggtctttcccccgaccaccaagaatatacatcgagaaggggccgactgttccatccgcgaagcgccacacatcaaagtattccaagggctctaaacacgagcgcgagcagacagagttactcctctcggcgaacgatccagcatacggtgtttatgactttagacctgatggcgagggctacacgcaagatcagcaagcagagttgagatccagggatttccatcgcgccgacgatgccttcgcagactcggtcagcgcggacttctcggaggccacgtcaagcgaatggtcgctgtttaccagctccgacgagtcctcattcaccaccgagagcacaagggactcgttcagcgttgtggactacggcgacaacgctggcctggacccaatctcctcgatatttgggccaagctatgctccggagcatcatcccggtccacctggcagtttcgccgcgtgcacgaggctctcgccttccaacccacagacaaggtacttctcggagagcacagggttcgtctcggactactcttccagcggcattgtacatagaggaagggatccaggtagggcatacacctgttcagcggaaccgctcgcttcggctgcggcggcgcaccagcaccagcggtacgcccttagcggccgagacggtttggtccagacatctgggttctgccaaatgtaaccggctttacgatttcgtagctatagctgtagctggtgctcgggcagctgcggtttagcactgccactgatgctgctgcctctatgttctttttatttcaggtgaggcgtattaaattttggctgcatgtcattcctaggctagctcgattcaatgtagcgagagagagaggaacaaatttagattgtgtctatatgcaggtgaaattttagagcgcggtggagctgctccggttgaagccatcccccgaggcccgaaccagtaaattacgccgaatccggcagtcgtatggccctgcacaccagtgctttgtgaaaagcttgcagattcatcaattgacgtgcacttgccttttatatggacgctgacgtatggaggtgcacactctccacctccgtatatctcgccacctactctgtttatattagaaggttgattgctgacacacaacacctgctcgtacttttttgtcgaaatcatgacggacaacaacgctaaacatatagtacaatcttcttgtcttgctgatctgctatgcccctttgtgaaatctgccggtgacatcagcgatggcgtcttgctgatctcgtggtatacctgatgtttcctcggtctcagcttttatcacgc

SEQ ID NO: 41915 - DNA, 3387 bp, Zea Mays
agccatggaaatcatcatacaaggtcaataagtattctggaatgtttttccgagctgaaatagatagcttctggagctggatctcagtattctgttagggacatgctccaaccgagggaagctgatttgcctgcactctttcttgtcttcattgtacttcctgtggtagcttattttcttctcgggagatggcatgatgctgcaagtaagaaggcaagggtaagtgtgcttgctcagcgagctgcagaagaagcctatagagaggaaacaatggcgtgcccagacattattctgccagggtcttccttgagaactatgccctatttcagacctatgcctgcattaagacaggaataccatgaatgtgcaacttgccatgcccctgcaaagactcgttgctccagatgcaaggctgttagatattgctctgggaagtgtcaaatagtacactggaggcaaggacataaggaaacatgccaaaagtggcttggtagtggttctagcagctttggtggatctagcactgaggctactgaacagatgccgttcttgactaacttaaattcacctcttccgggtggtgacattcacttgcgtgacttgaacttcgatactttatcagaaccatcctttcccacaactgatggttataatctagatactgatccatttttggcagacagaagcaacatgaataaatcaaatcaaggtattcatatgagcgaaaatggtgctgttggtgtatcttttgaaaagaataattataatgctgatgatgaaatccactcaccggaaaatttatctagaaacaaggtgtcaaacaactattttggttcagatgcaataagtggtaatggggatgcaatttatcctgccaaaagtaatgcacagcagcctagcagctgtgctcctgacatgagaaaacagccaaaagcaagcatcacagtttatcagcctgacataggtgtctatttaacttctgacatggtcagttcttgtgaggggtcatatgcttctgccagtgagccactgcaaaggagcttgtcatctggaagaactattgggaaagcaaacgcggtgaataagaggcctccatacccatcaagtaaggtggtttcagcacaaaagccacaggatagggtgtctacatcatatcaaaatgatggccatgagaagaatccttgcaacaaaaatgaccaaagatctacccccaaatgtgaatcaagtcaatcaacaagcagcaatctacaaaagtttggagcatccaaggttgaagttttaaagaagccttcaaaatttctcaaaaccagccttgtgggattgatcaatgataataagaggaacaaggtattgttcccatatgaagatcttgtcaagttttttcagtatgaagcccggggtatttcccctagaggtcttttcaattgtggaaacagctgctatgctaatgctgttcttcaatgtctcatgtgcacaaagccactgatgatctaccttcttctgagattgcattctaaagattgttcttcaaaaaaatggtgccttatgtgtgaacttgagcaatatgcttcaactttacgtgaaagtggtgggcccttatctccaagtagaattctttctaatctgaggaatattggatgtcgcttgggtggtggaactcaggaagatgctcatgagtttttaaggcatcttgtgatgtctatgcaagcagcttgcttggatgggctgggtggtgagaagcatgttgagccaagtttgcaggaaacaacactgatacaacagatgtttggtggccgtcttaaatccaaggttaagtgcctcagatgttatcacgagtctgaacgatatgagaatataatggatcttactttggagattcacggctgggtagagtccttgcaggatgctttgacacagttcactgcccctgaagatttagatggtgataatatgtataaatgtggaagttgtgctgcctatgttaaagccaggaagcaactgagcgtgcatgaggtgccaaacatattaacagttgttcttaaaagatttcagtcaggaaaatatggcaagatcaacaaatgtgttactttccctgatatgttggacatggttccttttgtgactgggtctggtgacaatccccctctttatttcttgtatgccgtggttgtacatgtggatacagaaaatgcatcattctctgggcactatatatcatatgtcaaagatatgcagggtacatggttgagaattgatgattcagaggtccaggttgtatcagtgaatcaagttatgtcagaaggtgcatatatgcttttctacatgaggtctttcccccgaccaccaagaatatacatcgagaaggggccgactgttccatccgcgaagcgccacacatcaaagtattccaagggctctaaacacgagcgcgagcagacagagttactcctctcggcgaacgatccagcatacggtgtttatgactttagacctgatggcgagggctacacgcaagatcagcaagcagagttgagatccagggatttccatcgcgccgacgatgccttcgcagactcggtcagcgcggacttctcggaggccacgtcaagcgaatggtcgctgtttaccagctccgacgagtcctcattcaccaccgagagcacaagggactcgttcagcgttgtggactacggcgacaacgctggcctggacccaatctcctcgatatttgggccaagctatgctccggagcatcatcccggtccacctggcagtttcgccgcgtgcacgaggctctcgccttccaacccacagacaaggtacttctcggagagcacagggttcgtctcggactactcttccagcggcattgtacatagaggaagggatccaggtagggcatacacctgttcagcggaaccgctcgcttcggctgcggcggcgcaccagcaccagcggtgaaattttagagcgcggtggagctgctccggttgaagccatcccccgaggcccgaaccagtaaattacgccgaatccggcagtcgtatggccctgcacaccagtgctttgtgaaaagcttgcagattcatcaattgacgtgcacttgccttttatatggacgctgacgtatggaggtgcacactctccacctccgtatatctcgccacctactctgtttatattagaaggttgattgctgacacacaacacctgctcgtacttttttgtcgaaatcatgacggacaacaacgctaaacatatagtacaatcttcttgtcttgctgatctgctatgcccctttgtgaaatctgccggtgacatcagcgatggcgtcttgctgatctcgtggtatacctgatgtttcctcggtctcagcttttatcacgc

SEQ ID NO: 41916 - DNA, 2753 bp, Zea Mays
agatgccgttcttgactaacttaaattcacctcttccgggtggtgacattcacttgcgtgacttgaacttcgatactttatcagaaccatcctttcccacaactgatggttataatctagatactgatccatttttggcagacagaagcaacatgaataaatcaaatcaaggtattcatatgagcgaaaatggtgctgttggtgtatcttttgaaaagaataattataatgctgatgatgaaatccactcaccggaaaatttatctagaaacaaggtgtcaaacaactattttggttcagatgcaataagtggtaatggggatgcaatttatcctgccaaaagtaatgcacagcagcctagcagctgtgctcctgacatgagaaaacagccaaaagcaagcatcacagtttatcagcctgacataggtgtctatttaacttctgacatggtcagttcttgtgaggggtcatatgcttctgccagtgagccactgcaaaggagcttgtcatctggaagaactattgggaaagcaaacgcggtgaataagaggcctccatacccatcaagatctacccccaaatgtgaatcaagtcaatcaacaagcagcaatctacaaaagtttggagcatccaaggttgaagttttaaagaagccttcaaaatttctcaaaaccagccttgtgggattgatcaatgataataagaggaacaaggtattgttcccatatgaagatcttgtcaagttttttcagtatgaagcccggggtatttcccctagaggtcttttcaattgtggaaacagctgctatgctaatgctgttcttcaatgtctcatgtgcacaaagccactgatgatctaccttcttctgagattgcattctaaagattgttcttcaaaaaaatggtgccttatgtgtgaacttgagcaatatgcttcaactttacgtgaaagtggtgggcccttatctccaagtagaattctttctaatctgaggaatattggatgtcgcttgggtggtggaactcaggaagatgctcatgagtttttaaggcatcttgtgatgtctatgcaagcagcttgcttggatgggctgggtggtgagaagcatgttgagccaagtttgcaggaaacaacactgatacaacagatgtttggtggccgtcttaaatccaaggttaagtgcctcagatgttatcacgagtctgaacgatatgagaatataatggatcttactttggagattcacggctgggtagagtccttgcaggatgctttgacacagttcactgcccctgaagatttagatggtgataatatgtataaatgtggaagttgtgctgcctatgttaaagccaggaagcaactgagcgtgcatgaggtgccaaacatattaacagttgttcttaaaagatttcagtcaggaaaatatggcaagatcaacaaatgtgttactttccctgatatgttggacatggttccttttgtgactgggtctggtgacaatccccctctttatttcttgtatgccgtggttgtacatgtggatacagaaaatgcatcattctctgggcactatatatcatatgtcaaagatatgcagggtacatggttgagaattgatgattcagaggtccaggttgtatcagtgaatcaagttatgtcagaaggtgcatatatgcttttctacatgaggtctttcccccgaccaccaagaatatacatcgagaaggggccgactgttccatccgcgaagcgccacacatcaaagtattccaagggctctaaacacgagcgcgagcagacagagttactcctctcggcgaacgatccagcatacggtgtttatgactttagacctgatggcgagggctacacgcaagatcagcaagcagagttgagatccagggatttccatcgcgccgacgatgccttcgcagactcggtcagcgcggacttctcggaggccacgtcaagcgaatggtcgctgtttaccagctccgacgagtcctcattcaccaccgagagcacaagggactcgttcagcgttgtggactacggcgacaacgctggcctggacccaatctcctcgatatttgggccaagctatgctccggagcatcatcccggtccacctggcagtttcgccgcgtgcacgaggctctcgccttccaacccacagacaaggtacttctcggagagcacagggttcgtctcggactactcttccagcggcattgtacatagaggaagggatccaggtagggcatacacctgttcagcggaaccgctcgcttcggctgcggcggcgcaccagcaccagcggtgaaattttagagcgcggtggagctgctccggttgaagccatcccccgaggcccgaaccagtaaattacgccgaatccggcagtcgtatggccctgcacaccagtgctttgtgaaaagcttgcagattcatcaattgacgtgcacttgccttttatatggacgctgacgtatggaggtgcacactctccacctccgtatatctcgccacctactctgtttatattagaaggttgattgctgacacacaacacctgctcgtacttttttgtcgaaatcatgacggacaacaacgctaaacatatagtacaatcttcttgtcttgctgatctgctatgcccctttgtgaaatctgccggtgacatcagcgatggcgtcttgctgatctcgtggtatacctgatgtttcctcggtctcagcttttatcacgc

SEQ ID NO: 41917 - DNA, 1508 bp, Zea Mays
atgcccttgctatgggcagttccgaggaggaagaacatccgcatcatagagttcaaagtctctactactacacattcaaggcggcatgaaatggaagcgattccggaatatatgctctgcacagatgattggctgcaggttaacggaatcatgcaacttccacagaacattaagatcatagccactcacactgacagtccaaatgtacttatttgggatgttgaagcacaaccaaatagacatgctgtcctaggagcaagcgagtctcgccctgatatgatatggttcattgttttgttcagtgtgccagatatactcttctttggcacatggcttactagcatatactatttgtttagatattaacaggacataaggaaaatgcggaatttgcgcttaccatgtgtccagcagaaccatgtcctatcaggagggaaacaatggatggatagatcatcaaggttcaggtcttcagctctgaagcttggtatgaaacgtccaggaaagtgacagcaaaaatataatgatgtagcatatcttggtgaatccccgagtgaagcaagtgaattcattgagctagcgcaactaccaggtggtgaaaacacatgcccttagatttttttagatgagcaggaaaaaaggcctaggaagcatttcaggtgcgaaggctgaagatgctagatgtagaaagagggaagacatggagactgctactaaaaagagtgaagaatcagatactgaatctgaagaggaagaacaaacacaaactgaatcaagcacaatcaaaaagcaaggttaacagaatcagggaacttccacataacagtaagatcatagccactcacactgacagtccagatgtacttatttgggatgttgaagcacaaccaaatagacatgttgtcctaggagcaagcgagtctcgccctgatctgatattaacaggacataaggaaaatgcagaatttgcgcttgccatgtgtccagcagaaccatatgtcctatcaagaggaaaggacaaatctgttgtcttgtggagcatccaagaccatatatctgcccttggagattcctcgtcttctcctggagcatctggcagcaagcagtctgttaaaactgcaaatgaaaaggagagccctaaagttgatcctagaggtatatttcatggacatgacaacacagttgaagatgttcagttctgcccttcaagtgcacatgagttttgtagtgtgggtgatgatgcttgtcttattctgtgggatgctcgaactggcactgccccagctgttaaggttgagaaagctcacagtggagatgttcattgtcttgattggaatccccttgatgttaactatatcctaactgggtatgatggcattaaggttcaattcagcataatcgttgaaacaaattcgatctctatcagttcgttatacgttcaagtaatgaatctttcaattgattaaaataacaaaatttatgtatggctaagatcacaaatagattac

SEQ ID NO: 41918 - DNA, 811 bp, Zea Mays
attgctcgaaatttcgttattttgtgttcaatccaggctgaaagtgcaattatggcattaaactttagtggtatggtccttggctcacttcctatcagggtgagcccttccaaaactccagtccgtccacgttctcctcgtgtgatgtccaattgatcaggctgctaccaatagcaaatcatcctaggcagagcttattgtagctatgatcgccctagaacccacttcacggatcaatgacgtcgttgtcctgagagtgtccaagtcagtcataggaaaccaacttgttgccaaatgctaatgtttttctgtttgccagatccatgcaccatttcccttctttttttcattcccccttatgttaattatgaacataattgtttataatcgcctttctcaggcatcagaataagaatgaataactctggtatttttttgttgtacgggagatcgtatatttttattgtatttttgtttttttacctcattttgactgataggcatgtgcagtttatttgtgttggtctgcactctgcgtggatacataggacatgtgtttctgccgttgttttggctcaaaaaagtggcgagttttggcaatctgttcccaagtgcaagtgttgttgcctacgatttctgcatcgttgtccttccctgctggaggagtgtttctgttgttaatcatgcactggagtttgactgcacgacaacgtctgcacgattggttggtggaggcgacggatccagcaatgccggtggccacccactgaatcgtggggcggtatttgtttcctcttctgttcatctctga

SEQ ID NO: 41919 - DNA, 765 bp, Zea Mays
cttcatcttcctctgcacgtaatcccaacgatactcagattcttcccacagccagattctcagaaaagctggttagagaaaagttgaaccaaataggctccatgtttcgatcattccctccccggccgagtttttctttctttcttttttttttttgattgtacagatttattaaaaacagaacagttatttcacaaaggaatataggaacagaaccagaaacatgctctgcaaaggatcagacttcacgcgtgcatatgttgattgtgcacagatttattaacatggattaaggcatacagcatgcatgctagataccagcaattctggattttcatcactttcaattctcattcaaatcaagcctaaaattgaataaaatgaaattgttagtcacttcagaatttgacacattggtcagttaaatttaatcttgtatctacagccatttcccaccataaaaagacaacgaaaatgtgcgatatctaaatctcaacgtctccagtatcccttccaccagggattgtaaagccaatccctatcaaattccatacaacaatcactatcaggctccacacaagagagagaaagggacaggtgatgttacagccaaggcaaccaggtgtgaatgtgtgatcacactaaaccaacagcctcatgtttgactaacatgtacacccatctaggaaatggaaaactagttccggactactgggccacagaaatccatgactaacactgagccaattataactaatcttttcc

SEQ ID NO: 41920 - DNA, 2890 bp, Zea Mays
cgggacacaaactactacagtcaatcagcgcatctcccgcgccttccgaattctgacagtttgttgccttgcgctggttgcggaatgcggattgtctcttcttatcccccttcgactattccaccccaccacatccacatccattcaatcaagaccagcacactgccgcgctccgcaggtcttctctcctacaaaacaaaaaaaccagagagaaagacaacacggccatcacgcgcaaagcgagactacctggagctatgccactccgcttggcggcctgccgcgtcttcctgctcctcgccgcggccgcggccgccgccacctctccgtctccggtggcaacggccacgtccaacggctccgcgaactgcaccctccgcgacggagaaatcgtccgcgcggcgttcaggcaggtcgccaacttccccttgccgctgcccggccgccgccgcgcgtgccgccacgtcaggcggctccgcttcccgtcgcgcaacctcacgggcgccgtggactgggacgagctaggcaacctgagcggcctcctcaccgtcgacctctccggcaactcgctccacggccgcgtcggcagctcgttctggcgcgcgccgtcgctccgggccgtggacgtctcctgcaaccgcctcgaaggcgccctccggttcggcggccacccaggcacgcgcctagccacgctcaacgtgtccggcaaccggttcacctccgtcgagaacgtggccgggctctccggcttggtcggcctcgacgtgtccaggaacgccatcggagcggtgccggaggggctgcggggcctgacgctggtgcgccagctcaacctgtcgtggaacaacatggccgggacgttccccaccgacttgccgcctctcgccggcctccaggtcctggacatctcgcacaacgacttctccggcgcggttgacgccgacaccatccgtaagttcggcagttcctccttcgtccaagccggcgacgcgttgcgggtggtcgaggacctcgcgccggcgccggcgccggcgtctagtggcggcagacacaaacgcagacgtgcggtcaccatggcgctggtctcagtcggcgcagcggtgacgctggtgttcttggccgcgtgcgtggcgtgcgccatgacgcgtcggtggaataagaagaagaaggacaaggacaaggaccggaagacagcggcgtgggaggacgacgaggtggccgtgggggcgttgaagctggccgccgccgcgccggtggtggtgctcgagcggccgctgatggagctgactctggcggacctggccgcggccacgtccgggttcgggcgcgagtcgcagctcgcggacacgggcggccgcagcggggccgcgtaccgcgccgtgctccccggggaccttcacgtcgtcgtgcgcgtcgtggagggcgccgtggccggagttggggaggacgccgacgccgccgccaccgaggctgccttccgggagcttgcccggctcagacatccaaacattctcccgctccttggttactgcatcgcaggggaccaaaagcttgtgctctacgagtacatggagaagggcgacctgcaccggtggctgcacgagctgccagtgggcagcatggacacggaggacatatgcatcgacgcaatggaagccatgacggaagacagcagaaagcccgcgggcgactggcccacgcgctaccgcatcatcctaggcgtcgcgcgagggctggcgttcctgcaccagggatgggccggggccgggggcgggcggcggccgatcgtgcacgggcgcctggtcccgaccaacgtcctgctcggcgacgacatggagccgcggatctcggacttcctcccgcaccccggcggcggcggcggcgccgagacggcggagggcgacgtgtaccgcttcggcgcgctggtgttcgaggtggtgacggggcaggcgcggtggggcgacgcggcgaccacaagctgggcgcgcggcgtggtccgcaaccgcaagggcctcaacctcgtggacgagcggctgcgtgacgagacggcggggacgggcgcggagagggagctgctcgagtgcctgcaggtggggttcctctgcacggccgccgcgccggagaagcggcccaccatgcagcaggtggtcgggctgctcaaggacgtccgaccggccgccaccgctggaggtggcgtgccgccgccgccgctcaggtcgctggccgaatgatgcggtcgtgagctatagcgcacgcgcgccaggacgtggtggcggtagctggagagagaggacagaggagagtagcgaggcacggtgctcgcatcgcagcacgggcacggcaggctgctgcttttcgcacggtagctcccaaatccaagaagattcgtagtgatttctggcctggggcagcccgaaatacgcctccgtgctctgcttttttggtggtcccgcttttggtttggtgtgcagtggtgttccttcctgtctagttttcgtagaaggtaggatggcatttttattggttggtacgctacgtactactccatcagctttgcacatttgtcattggacacgaggtgcctggagtgagagttcgttttgattgcaccaacgttctatacttttgccttgaccgggatggagagcgcccagtgtcacctacgttagggcattattgttccaaggtgcgtacgcaacatataacatggatctttcaccccaattcggattgccctcatgtcagtgactggtacagtggcactgtacgcagtactgcactgaattcaatctattttcatccacagcagattccctcttttttttgtattattattagtggcatgttataaacatgtaattatatgagatatatgtagtatgtggttgtt

SEQ ID NO: 41921 - DNA, 1377 bp, Zea Mays
ggaaacaagaatgtctgaacaaaaaagggaccaaaagcttgtgctctacgagtacatggagaagggcgacctgcaccggtggctgcacgagctgccagtgggcagcatggacacggaggacatatgcatcgacgcaatggaagccatgacggaagacagcagaaagcccgcgggcgactggcccacgcgctaccgcatcatcctaggcgtcgcgcgagggctggcgttcctgcaccagggatgggccggggccgggggcgggcggcggccgatcgtgcacgggcgcctggtcccgaccaacgtcctgctcggcgacgacatggagccgcggatctcggacttcctcccgcaccccggcggcggcggcggcgccgagacggcggagggcgacgtgtaccgcttcggcgcgctggtgttcgaggtggtgacggggcaggcgcggtggggcgacgcggcgaccacaagctgggcgcgcggcgtggtccgcaaccgcaagggcctcaacctcgtggacgagcggctgcgtgacgagacggcggggacgggcgcggagagggagctgctcgagtgcctgcaggtggggttcctctgcacggccgccgcgccggagaagcggcccaccatgcagcaggtggtcgggctgctcaaggacgtccgaccggccgccaccgctggaggtggcgtgccgccgccgccgctcaggtcgctggccgaatgatgcggtcgtgagctatagcgcacgcgcgccaggacgtggtggcggtagctggagagagaggacagaggagagtagcgaggcacggtgctcgcatcgcagcacgggcacggcaggctgctgcttttcgcacggtagctcccaaatccaagaagattcgtagtgatttctggcctggggcagcccgaaatacgcctccgtgctctgcttttttggtggtcccgcttttggtttggtgtgcagtggtgttccttcctgtctagttttcgtagaaggtaggatggcatttttattggttggtacgctacgtactactccatcagctttgcacatttgtcattggacacgaggtgcctggagtgagagttcgttttgattgcaccaacgttctatacttttgccttgaccgggatggagagcgcccagtgtcacctacgttagggcattattgttccaaggtgcgtacgcaacatataacatggatctttcaccccaattcggattgccctcatgtcagtgactggtacagtggcactgtacgcagtactgcactgaattcaatctattttcatccacagcagattccctcttttttttgtattattattagtggcatgttataaacatgtaattatatgagatatatgtagtatgtggttgtt

SEQ ID NO: 41922 - DNA, 1686 bp, Zea Mays
  misc_feature (1685)..(1686): n is a, c, g, or t
aagcctagaatcccagatttgcacacttttattgctttctaaaagaaaaatagtacaggtacaacaataatgggtgtaatcagcacatttttcatgcttcccaaaatttgcactaacaaagtaacaagtagtgaatagagatacaaacataccagaaactatgagtggaagttgtaaactataagctgtgggcagaagtcttacacaaggtcttgctctaacttttctgctattgtagatcatggtcaaaagtggatcttcaaacaatcagaagattactcggttcactgtggtatgcaagctagttgggcatcagtcctaatgattcatatgggactcaaaccattggaagacttcagtattcttcaggctggtgaactcatgtactttttttggaagatggatccagaagactctagtgactttgaagaggaggacgacgaagaagaagatgatgacttaatgatattcatattgccagcgctatatctagcatctactggaattggaactctggatcaaacatctatggttagtgatggtactgcgattgaaactccaagtcaagtatcaaagtttaacgatgcagaaaggatttgtaaagtgcttgaagatgacagaggccaaggctatgataaacttcgtgtggagccccatgttctcctcgaactttcacgctatctgaggtcaaatgatcttttgaaaaataccagaggtgtttctgtagaagagaaaattggcatgtttatttacatgctatcccgaaatgctagttttcagaaactaagtgacagattcaagtacagtacagaaactattcacaggcatatcaaagcatgctttgatgcagtcacaccaatgactggtgaattcgtcaggccaccttcaattcaagcccaccggaaaatatcatctgatacacgttatgggccttactttgagaactgtattggagcaattgatggaatccatgtccctatgacaatatcggacagtgaagcagctccataccgaaatagacaagaatccctttcccaaaacgtgatgcttgcttgtgattttgatttgaattttgtccatgtttcttgtagccgagaagggtctgcatctgacgcagcagtcttatactctgctatagaatatggatttgaagtcccaagaggaaagttctacctggttgatgggggttatgcgaacacgccatcttttcttgctccttttagtgaagtttcttaccatgctgaagagcaagatgagagcaatttccaaccaatagactatagggagcttttcaatcttcgccatgcacagctgtacagacatatcaagcgtgctgtaggcctactgaagatgcggtttccaattctaaatgtcgcaacatcataccgaaaagacactcaactgaaaattccttcagcggcagttgttatgcataacataattcagagacaaggaggtagtgaagagttgttatgtgagcaaacaattccatttgcgtcccgtaaaacagtgaatcttcctagtggtgatgacacgtatggttatgatgtttcagctttcaacagtgaatgcgacatgggtaatgctttgagagatggtattgcactgaggatgtgggcagattatgaaagtagtatgtatgtctgatttcagaatagaacaggctggccttaaagaatattgann

SEQ ID NO: 41923 - DNA, 1466 bp, Zea Mays
  misc_feature (1465)..(1466): n is a, c, g, or t
attgggctttctgtcgcttcatcacccggcttggcaagaggatcagtgctggctgctgctgcttcattcatcctcgtcttgtgtttgttgcaagtcgcaaaggtttgcgccgcctgccgggcgtcgtcggctcatcgccgtcggcggtaggcttctgcctcccccgtctcgatacctctccttcggcgaagactcgcagggaggtccccacttcatcacctccgtttcctaccggaaaaggcaacttctgtcggccatctcagtactttttttggaagatggatccagaagactctagtgactttgaagaggaggacgacgaagaagaagatgatgacttaatgatattcatattgccagcgctatatctagcatctactggaattggaactctggatcaaacatctatggttagtgatggtactgcgattgaaactccaagtcaagtatcaaagtttaacgatgcagaaaggatttgtaaagtgcttgaagatgacagaggccaaggctatgataaacttcgtgtggagccccatgttctcctcgaactttcacgctatctgaggtcaaatgatcttttgaaaaataccagaggtgtttctgtagaagagaaaattggcatgtttatttacatgctatcccgaaatgctagttttcagaaactaagtgacagattcaagtacagtacagaaactattcacaggcatatcaaagcatgctttgatgcagtcacaccaatgactggtgaattcgtcaggccaccttcaattcaagcccaccggaaaatatcatctgatacacgttatgggccttactttgagaactgtattggagcaattgatggaatccatgtccctatgacaatatcggacagtgaagcagctccataccgaaatagacaagaatccctttcccaaaacgtgatgcttgcttgtgattttgatttgaattttgtccatgtttcttgtagccgagaagggtctgcatctgacgcagcagtcttatactctgctatagaatatggatttgaagtcccaagaggaaagttctacctggttgatgggggttatgcgaacacgccatcttttcttgctccttttagtgaagtttcttaccatgctgaagagcaagatgagagcaatttccaaccaatagactatagggagcttttcaatcttcgccatgcacagctgtacagacatatcaagcgtgctgtaggcctactgaagatgcggtttccaattctaaatgtcgcaacatcataccgaaaagacactcaactgaaaattccttcagcggcagttgttatgcataacataattcagagacaaggagctttcaacagtgaatgcgacatgggtaatgctttgagagatggtattgcactgaggatgtgggcagattatgaaagtagtatgtatgtctgatttcagaatagaacaggctggccttaaagaatattgann

SEQ ID NO: 41924 - DNA, 1778 bp, Zea Mays
cacataaacacaaaagcaccacaattatatattcacaaaagcatcacaattataatatcattcacaactagatcatttacagatagctagctagatcattcacaaaagctccagagatgatcagtcacaaaagcaccacagcgacatcactccagcttgaagcggttcaaaagcccacaactacatcactaatgtttcatatcactccagctattgttcaaaagcccacaactacatcactctagctgctccagagttgatcagtcacaaaagcaccaaagctacactaatgcttcaagcagttcaaaagccttcagacaaccactccagcttcttgtatcctactgttttaaggtacaagctttctttgtccagaacaccctccactagacggtgttgcagccttatgcaccaacttcagccttatgccttgtccaagtgatcaactagggtacctagatgatatacagtaatgcatatgagtaaggacatgaatagcaaatgataaataacctatactaaagaggggaaaacacttcaagcaagacatcacaaacattcacaaccaggcattagatagagatacacaaccaagcgcaatgatcacgttctctaaaccaccttgtccaagtaacttgaatcatatactaaagaggataaatacttaaaacaagtcatcacaacttctatgagcacattagatgtgaaaatactactaagtactacaagcgcatcttttatacttaaatagatctaactcaagcatcgaacaatcctaagattacacacaagtcttaagctcatggactagagcaccatgtcaacggactaacactattattagcactatattagccaatacaattagctcaacccactacagccatagaaggtgcagatctgaaaattagccaaacaaaagtaacttcagaaatcaacaatttaacacttgcagaatttctggacagcagcacagtattcaattgttttgctcataattcacaaaatatccatccaaaaatagtaaactaggactttctggaaagcttatgaagtcctctataacttttgtattatcaccaccatgagattagacacttagaaaggtcaatcagtattaaacgataatgatgtccagatttggacagaattcgactacgtacttcaaaaatccataactggagttttaggcaaccaattcaggtgatcctagactttttagaaaggtaatagaattatctacaattcatttataatcttctcaaggtgattcaatgtgtatcgaagtcagttaatacaaacaaacattgctgtccagatttttgacagattcagacatcacatttccaacagctgtaacttgatctctagatcaccaaaaaggatgctctaaaatttgttggaaagcttaagaaaagtaatacaattcttctataattactaagggctgattctcagtttaacttgggcaaacaaggtcattttcgaaatctgtacagaatctggacagattcagatactgaacttcagataagcataacttctaaactgctaagcttatggtcatgaaatttttacacaagtgagataaagaagttatctacaagtttcctttatagcatttctacagaaaacatggcttactttgttaaattagctgcgcaattaaaactgtacttgtagctctaaacaacaatacattcaatttagctcctatttggcttctacaactatcatgtgcttagtacttcaaatattactaacaccttatcttaaag

SEQ ID NO: 41925 - DNA, 998 bp, Zea Mays
gctaatattgtatatttagcgaccaaccgtgggttgttgtactatagatttagcaaccaatcgtgagtcgttatactatacatttagcaaccaacagaaagttgcccctagttatagtcgttaataatgataatataccattaattaacattcaacaactgctacatatacaaaagcatcataaatcaccaatttttatacacataatcacatagatatacaaatttaattagtattgcacaatgatagatccacatcacataaaccatcaacaagcaccacaacaaaatcattcacaaaacctacacatgttattatgttttgcacatatttgcaaacactttacaaaatcattcacaaaagtactaacgcttcaagtgattcgcaaaagccttcataaaagcactccaacttcttgtatcctcttgttttaaggcacaagcttgtaggggttgtgatgtcgccacttacttgatgctaacaagacatttctttcaccaaagccatcttcaacacttcgcctataaaaagatctatctctttttcaattgcatgtcgggacgaggaggcctagtaggggagatgcgatgcgaggagctggtgtcagagcgggctactggtcaccgccggcgcgttgtgcgttgccctggtccccgcctccccggaccggaccccggccgccccctcccgcggtcccgctcggcctccgctccgaactctcctgcagatgggactgtgagatgacccgtcgcgcgccgcgtaaaaaccactgggcatcgagccacttccgggcgtggcaatggcacaggctcacatagtggcactagggtcggtgcaggtgcgtcgggggagagcggctcggccagggctcagccgttgctgcttggtcaggacagagaggagcgaggtgagggaagggagaggcggcggcggcggctgggagagaagcccgggagcgcgcgactgctagggttaggtagatgggccctagtaggcct

SEQ ID NO: 41926 - DNA, 2214 bp, Zea Mays
cattaattaacattcaacaactgctacatatacaaaagcatcataaatcaccaatttttatacacataatcacatagatatacaaatttaattagtattgcacaatgatagatccacatcacataaaccatcaacaagcaccacaacaaaatcattcacaaaacctacacatgttattatgttttgcacatatttgcaaacactttacaaaatcattcacaaaagtactaacgcttcaagtgattcgcaaaagccttcataaaagcactccaacttcttgtatcctcttgttttaaggcacaagcttgtaggggttgtgatgtcgccacttacttgatgctaacaagacatttctttcaccaaagccatcttcaacacttcgcctataaaaagatctatctctttttcaattgcatgtctgcaagacaagtgataattgcaataagtaacatgatatgttaaccagaaggtatgctagcaccagaaacgaccaaagaagatggtatgctaggaaagatattttgggaatagcttccatttatcctagggaatccctttggcaaatttaaggtcaatcggagatggtttgagtctttttttacttttgaaagcattttttgcggggttctgaatctacatgtacaactgggcaacaagtggaactagtagaaataaaaatagtgtataaataaatggactaatttagagagctggttggcaatgctccgtataaacatagtcttggggtgttgatgcgtttctgtttttacacgcaaaagttctttcgcagtttatttttactagcaagtgccgtgtgtagagtagctcaagtttggcaatgcaaatttgctcaaacgaaccatgcaacccctaggccagggtactgctagatctgtcacaggaactacttgagcatgttgtgtatatatgtacgtctgtctagctatacacataaatattcatagaaaatacagatagttaagcggatgaaaaaaaagaacccaacgatatatcatgcatacaaagctatttttatatggaaggaacgacataccgaaagatagaaatagagttactaaagaaattcaggtgcccacttttttgttttcctgttaggcatatgttccagaatcgccgtgaaaaaattggctttcagtttatttttttagactacctggctggccagacctcaactaattaacacattatgtgacattgacataaatatatttagatgacaaaaccaaaattcagctaatataagtatagctgccgactacgagaagcattcaaacaaaagtttcagaaggattggaggggcagcccaaagtccatggaagggtggcatcaaacaagcagcttgggtgtggacaactcaggatcttgttggagctgatcacacagtccagcatgaagggccattgcataacactccgcttgatgccgagcgctccctcctagactgatctgcgtcgatcagcgtggtggtgtgttgccgcctgtctgtctggctggctctctcaaaggcataacactatgcctgcctgtcctcgatcgccttgcgtgcgtgtccttgtccgttccggcgtcgtcttccggccagcgcccgtgtgcgccatcgctgtcctgtccccgcggtaaaaccgaacgcgcaagcacactcccggtcctggcagcaccaataaactcaacctcgccggcggggtggggcgaggcgaagcaaagcagcagacgagagtttggaaagcgggaggtgaggaggcacgacgtaccgggacgaggaggcctagtaggggagatgcgatgcgaggagctggtgtcagagcgggctactggtcaccgccggcgcgttgtgcgttgccctggtccccgcctccccggaccggaccccggccgccccctcccgcggtcccgctcggcctccgctccgaactctcctgcagatgggactgtgagatgacccgtcgcgcgccgcgtaaaaaccactgggcatcgagccacttccgggcgtggcaatggcacaggctcacatagtggcactagggtcggtgcaggtgcgtcgggggagagcggctcggccagggctcagccgttgctgcttggtcaggacagagaggagcgaggtgagggaagggagaggcggcggcggcggctgggagagaagcccgggagcgcgcgactgctagggttaggtagatgggccctagtaggcct

SEQ ID NO: 41927 - DNA, 2061 bp, Zea Mays
attaagcccggaaaaactctgctcaactcgttctctctccacatccatcccctccaacgccaatcaactccgtcctaaactacacaatccgcggcaacagaaaaaggcgacaccagaaacagaagcaagattccctccgcttgatcgccctgtgaatcgacccgactgagtggctccatcgcccgatggacccgccgcggcccgcggccggccgctccggcggggtcggcactggtgactcgccggtgagttgggacgacgacgacgatgactgcagcggcggcggcggccgcgtcgaaggcttggcgggactccacatatttgaccaagaggcagacgagccaccagccaaaaacagcatggccaacagacttgatactaactgcattccagttgctaacggatgcaacactggaacctccgtagagaaggaacctgtaaacggcattgacccacctcatgagcatactggcatctgggtccctgtttctgtcccgccaatgacagcgcaagaccgcgaggagtggcacagggggtttagttgcaatggcaggaacttcccagaagaagagttcagctgggagctggatgaagagaacaatgagatgacaatgtgggatgtgtttgctgatatggttgttgcggcaaaagataaggtggtatcttctgcaacatatgattttgggagatatgggatgtcggtggtgtccaacttttttctccaagaggcttggaacgatatggcacaaacacttgcggatgcaaacactggtattgtgaacgagcttcttgacacagagccaactaagtggttgcctgacagtgctgctacctcttgcatgctctgcggcgtgcgatttcatccaataatgtgctctcgccatcattgtcgtttctgtggtggagtattctgtaatggttgttcaaagggtagaagcttgatgcctccaaaatttaggactgcagaacctcagagggtttgtgatgtctgcggagtacgtctagagagtatccaacctcaactgatgaatcagatcagtcgggccacacaacttcctactcgagatgtcacagacctgagtaccttgaggtcatggctgaacttcccttgggcacacacaatggaatatgaaatatacaaggccacgaattctttacgtaattactataaggtgggaagactgaaaccagagaaggctatccctgatactattcttagacaagcaaaaggtcttgctattgttactgtggtgaaggttgggatgatggttacatacaaacttggcactgggctagttattgctcgaagggtggatgactcctggtcaccaccttcagcaatctccacctgcggtattggatatggagctcaggctggaggtgagatagctgattttatcattgttctgaggaacacggatgccatcagaacattcagtgggaaggcacatctgtctgttggtgctggtgttagtgcttctgctggccatgttggacgtgcagctgaggctgacttccgtgctggtgacggtggttatgctgcatgttatacatacagctgtagcaaaggaagttgggagacacaaggaaaaacaagaccaagttgacgtgcctgaaaccattggggtgtgacaaatatgcatgattgaccaacctttgataggatatgtagggcgtcaattgttatagcagtgaattgtgccatgtcacagagcaactttgttttatgaaatcaattgttagatctgaactgttgaaattcttaagaaaatagtagtttgttggccccattttaaggttacagtgaagtgatgcattacttcattcattaagagtgtgtttggtttgaggaatgaagtgattcattttcttctcactcctcacttttttatttggtttgtggaatagaatgaattgatccatcaccatctcattcctcataatgtaataattagtatatacatgaggggtgagttcattccaccaaaattgatgaaatgaacttatgatgcatcaccccatgaagcatagagtggctccacaaaccaaacacatcataag

SEQ ID NO: 41928 - DNA, 1149 bp, Zea Mays
tctccacatccatcccctccaacgccaatcaactccgtcctaaactacacaatccgcggcaacagaaaaaggcgacaccagaaacagaagcaagattccctccgcttgatcgccctgtgaatcgacccgactgagtggctccatcgcccgatggacccgccgcggcccgcggccggccgctccggcggggtcggcactggtgactcgccggtgagttgggacgacgacgacgatgactgcagcggcggcggcggccgcgtcgaaggcttggcggtgggaagactgaaaccagagaaggctatccctgatactattcttagacaagcaaaaggtcttgctattgttactgtggtgaaggttgggatgatggttacatacaaacttggcactgggctagttattgctcgaagggtggatgactcctggtcaccaccttcagcaatctccacctgcggtattggatatggagctcaggctggaggtgagatagctgattttatcattgttctgaggaacacggatgccatcagaacattcagtgggaaggcacatctgtctgttggtgctggtgttagtgcttctgctggccatgttggacgtgcagctgaggctgacttccgtgctggtgacggtggttatgctgcatgttatacatacagctgtagcaaaggtgccttcgtgggctgtgcgttgaatggcagcatagtatcaactcgagatactgagaacgctcgattttacggaggtcctgtcaaggcatctgatatccttctaggatcaatggcgaagccgcccgcagcctctcctctgtacaaagctctgtcagaattgttcgacaagattgggaaataatcctctttcttgcataccttgcctcaccttgtaaatacattcgaatttgcgtagtgaattggttggaagcaattgcataactgtacagtaaggccattcttcgacacatgagaaggctccctgccttcaccagtgtttagtggataccagcaacaaaaccactttgtacatactctacattggattgacagtcgtatcaagatgtgaaaaaaggtctgacgaatatgattattgattcgaattacatgggtagtacagtaatttcgtaatgctaccctgttgtaatgctgatacccc

SEQ ID NO: 41929 - DNA, 509 bp, Zea Mays
aaattttcaaagcactatttacagttagaggtgccttcgtgggctgtgcgttgaatggcagcatagtatcaactcgagatactgagaacgctcgattttacggaggtcctgtcaaggcatctgatatccttctaggatcaatggcgaagccgcccgcagcctctcctctgtacaaagctctgtcagaattgttcgacaagattgggaaataatcctctttcttgcataccttgcctcaccttgtaaatacattcgaatttgcgtagtgaattggttggaagcaattgcataactgtacagtaaggccattcttcgacacatgagaaggctccctgccttcaccagtgtttagtggataccagcaacaaaaccactttgtacatactctacattggattgacagtcgtatcaagatgtgaaaaaaggtctgacgaatatgattattgattcgaattacatgggtagtacagtaatttcgtaatgctaccctgttgtaatgctgatacccc

SEQ ID NO: 41930 - DNA, 153 bp, Zea Mays
atgcagacaaagccatatgagtacggagagggaaacgcgaagtggaagacgacgattgaaggagatctgaagcggaggaagccggatctgctgcaatcgcgtacctcgggacgggagaaaaaaggggacaaagcaggcctatttgaactttaa

SEQ ID NO: 41931 - DNA, 2212 bp, Zea Mays
agcagaccgcaggaatttgtgtggtccgcgcctcacttccacgacgctccagcggcatccgccacttcgtcgtcgtcgtcgcacggattggcattggctgccccccggccctgttcctcgtcctcctcatcaattcccgtctctcagtcctcccaataatggtggcgtggtgagaaatccttccgtccggccgtcgtcttagaagatgaactgttcctcttgctgcgccgctgccactccatcttctccggcgcttctcgccaggccgcgggggggtttagctgctagctgctccacgacgacagcaaatcagaaggtgcttttcctgggctcaaaacagtttccacggatcacgtatagccgtgcgtcgtcacggttgtcgcggagagaggtaatagcttttgccgggcaacaaccttgggacatcggcagatttgtcaagacgctgtatttcttcaacgggcctccaaaccttctcaagattgtagaatctatcatcagcagtttcactggacctgcttctagtgaagtgccaaagaaaatggaaacgtcggatgtggtgctggttactggagccaccggtggtgttgggcgacgggtggtggacgtcctgcagaagaagggagtacctgttcgagtattggctagaaatgtagacaaggcaaggagcatgttggggccggatgtacctctgatcataggagatgttacgaaggaagatacacttgatcctaagctattcaaagggataaaaaaagtagtcaatgcagtctctgtcatagtggggccaaaggaaggtgatacgccagacaggcagaagtacaaacaaggcatcaaatttttcgaacctgagatcaagggaccttcacctgaaatggttgagtacatcggaatgcaaaacttgattaatgccataaagagtagtgttggactgagtgaagggaaactgctatttggtttcaaaggcaacttatctggagagattgtgtggggagctcttgatgacgttgtgatgggtggtgttagtgaaagtacattccaaatcttgccaacaggaagtgaaagtagtggaccaactgggttgttcaaagaattttactgtgccagaggacctgtcagcatatgatggtattgagttacgagttaatggtgatgggcgacggtataaactcattatacggactagctatgaatgggatactgttggctatacagcaagttttaacacaactaaggggggatggcaaagtgttaaagtacctttctcttctctgaaacctgtattccgtgctcgtactgtgactgatgctccacccttcgatgcaagcaacattacttcactacaactcatgtttagcaaatttgaatacgatggaatactcaacccaacatttactgaaggtccgtttgagcttcctttttcgagtattagagcatacatcaatgagccgatcactccaaggttcgttcatgtgagttctgcgggagttacaagacctgaaagaccggggttagatttaagcaagcagccacctgctgttcgattgaacaaagagcttggctccattttaacttttaagttgaagggagaggatttaattcgggaaagcggtattccgtacactattgtaaggccatgtgcattaactgaggaaccagctggagccgatctcatgtttgaccagggggacaacatcacaggaaagatatcaagggaagaagttgcccgtatttgtgtagcagctctggcaagcccagatgctgtgggcaaaactttcgaggtcaagagcactgttccattcagcgaaccgtatgtgattgaccctgcaaatcctcctcctgaaaaggactatgaagtatatttcaaagaactcaaagaaggcatcacgggtaaagaggcgttagaggcaacacctgctcaagtttgaagatgtcgttgaattaagaatttcgtctgttttcttaaattctgacacagtaacccccactctgaatgtctaaagtcatctagaaacatagatgacactaatgctaaattttgtagctgaagatcagaccaataaatattcccaagaacacattactgttaggttgggggatcattaaactcgagctaagacacaaatatgtagatgaaattagtgctgctgttcatgccttcgttggagttagccattacaggacacaagaatttagtaagaggtttggtaaa

SEQ ID NO: 41932 - DNA, 2488 bp, Zea Mays
agcagaccgcaggaatttgtgtggtccgcgcctcacttccacgacgctccagcggcatccgccacttcgtcgtcgtcgtcgcacggattggcattggctgccccccggccctgttcctcgtcctcctcatcaattcccgtctctcagtcctcccaataatggtggcgtggtgagaaatccttccgtccggccgtcgtcttagaagatgaactgttcctcttgctgcgccgctgccactccatcttctccggcgcttctcgccaggccgcgggggggtttagctgctagctgctccacgacgacagcaaatcagaaggtgcttttcctgggctcaaaacagtttccacggatcacgtatagccgtgcgtcgtcacggttgtcgcggagagaggtaatagcttttgccgggcaacaaccttgggacatcggcagatttgtcaagacgctgtatttcttcaacgggcctccaaaccttctcaagattgtagaatctatcatcagcagtttcactggacctgcttctagtgaagtgccaaagaaaatggaaacgtcggatgtggtgctggttactggagccaccggtggtgttgggcgacgggtggtggacgtcctgcagaagaagggagtacctgttcgagtattggctagaaatgtagacaaggcaaggagcatgttggggccggatgtacctctgatcataggagatgttacgaaggaagatacacttgatcctaagctattcaaagggataaaaaaagtagtcaatgcagtctctgtcatagtggggccaaaggaaggtgatacgccagacaggcagaagtacaaacaaggcatcaaatttttcgaacctgagatcaagggaccttcacctgaaatggttgagtacatcggaatgcaaaacttgattaatgccataaagagtagtgttggactgagtgaagggaaactgctatttggtttcaaaggcaacttatctggagagattgtgtggggagctcttgatgacgttgtgatgggtggtgttagtgaaagtacattccaaatcttgccaacaggaagtgaaagtagtggaccaactgggttgttcaaagggactgtatctacttcaaataatggtgggtttactagtataaggacaaagaattttactgtgccagaggacctgtcagcatatgatggtattgagttacgagttaatggtgatgggcgacggtataaactcattatacggactagctatgaatgggatactgttggctatacagcaagttttaacacaactaaggggggatggcaaagtgttaaagtacctttctcttctctgaaacctgtattccgtgctcgtactgtgactgatgctccacccttcgatgcaagcaacattacttcactacaactcatgtttagcaaatttgaatacgatggaatactcaacccaacatttactgaaggtccgtttgagcttcctttttcgagtattagagcatacatcaatgagccgatcactccaaggttcgttcatgtgagttctgcgggagttacaagacctgaaagaccggggttagatttaagcaagcagccacctgctgttcgattgaacaaagagcttggctccattttaacttttaagttgaaggcatgctcattctattagacacatctttatattaaaaaaaactatcttaaactcggtcttttaattcttctgacataacaaatcacaattgtacattttttgtactgcaaataaaccatcgatatgcatctaagtactttaagatatagactgaacaatggtgctcctcattttgtcatgttggttatcttggaaccattatataatgtctgaggtggcctttcagggagaggatttaattcgggaaagcggtattccgtacactattgtaaggccatgtgcattaactgaggaaccagctggagccgatctcatgtttgaccagggggacaacatcacaggaaagatatcaagggaagaagttgcccgtatttgtgtagcagctctggcaagcccagatgctgtgggcaaaactttcgaggtcaagagcactgttccattcagcgaaccgtatgtgattgaccctgcaaatcctcctcctgaaaaggactatgaagtatatttcaaagaactcaaagaaggcatcacgggtaaagaggcgttagaggcaacacctgctcaagtttgaagatgtcgttgaattaagaatttcgtctgttttcttaaattctgacacagtaacccccactctgaatgtctaaagtcatctagaaacatagatgacactaatgctaaattttgtagctgaagatcagaccaataaatattcccaagaacacattactgttaggttgggggatcattaaactcgagctaagacacaaatatgtagatgaaattagtgctgctgttcatgccttcgttggagttagccattacaggacacaagaatttagtaagaggtttggtaaa

SEQ ID NO: 41933 - DNA, 2258 bp, Zea Mays
agcagaccgcaggaatttgtgtggtccgcgcctcacttccacgacgctccagcggcatccgccacttcgtcgtcgtcgtcgcacggattggcattggctgccccccggccctgttcctcgtcctcctcatcaattcccgtctctcagtcctcccaataatggtggcgtggtgagaaatccttccgtccggccgtcgtcttagaagatgaactgttcctcttgctgcgccgctgccactccatcttctccggcgcttctcgccaggccgcgggggggtttagctgctagctgctccacgacgacagcaaatcagaaggtgcttttcctgggctcaaaacagtttccacggatcacgtatagccgtgcgtcgtcacggttgtcgcggagagaggtaatagcttttgccgggcaacaaccttgggacatcggcagatttgtcaagacgctgtatttcttcaacgggcctccaaaccttctcaagattgtagaatctatcatcagcagtttcactggacctgcttctagtgaagtgccaaagaaaatggaaacgtcggatgtggtgctggttactggagccaccggtggtgttgggcgacgggtggtggacgtcctgcagaagaagggagtacctgttcgagtattggctagaaatgtagacaaggcaaggagcatgttggggccggatgtacctctgatcataggagatgttacgaaggaagatacacttgatcctaagctattcaaagggataaaaaaagtagtcaatgcagtctctgtcatagtggggccaaaggaaggtgatacgccagacaggcagaagtacaaacaaggcatcaaatttttcgaacctgagatcaagggaccttcacctgaaatggttgagtacatcggaatgcaaaacttgattaatgccataaagagtagtgttggactgagtgaagggaaactgctatttggtttcaaaggcaacttatctggagagattgtgtggggagctcttgatgacgttgtgatgggtggtgttagtgaaagtacattccaaatcttgccaacaggaagtgaaagtagtggaccaactgggttgttcaaagggactgtatctacttcaaataatggtgggtttactagtataaggacaaagaattttactgtgccagaggacctgtcagcatatgatggtattgagttacgagttaatggtgatgggcgacggtataaactcattatacggactagctatgaatgggatactgttggctatacagcaagttttaacacaactaaggggggatggcaaagtgttaaagtacctttctcttctctgaaacctgtattccgtgctcgtactgtgactgatgctccacccttcgatgcaagcaacattacttcactacaagtatcatttcttcctttctttccccttcatcagtaaacgtttgaagaattggtccgtttgagcttcctttttcgagtattagagcatacatcaatgagccgatcactccaaggttcgttcatgtgagttctgcgggagttacaagacctgaaagaccggggttagatttaagcaagcagccacctgctgttcgattgaacaaagagcttggctccattttaacttttaagttgaagggagaggatttaattcgggaaagcggtattccgtacactattgtaaggccatgtgcattaactgaggaaccagctggagccgatctcatgtttgaccagggggacaacatcacaggaaagatatcaagggaagaagttgcccgtatttgtgtagcagctctggcaagcccagatgctgtgggcaaaactttcgaggtcaagagcactgttccattcagcgaaccgtatgtgattgaccctgcaaatcctcctcctgaaaaggactatgaagtatatttcaaagaactcaaagaaggcatcacgggtaaagaggcgttagaggcaacacctgctcaagtttgaagatgtcgttgaattaagaatttcgtctgttttcttaaattctgacacagtaacccccactctgaatgtctaaagtcatctagaaacatagatgacactaatgctaaattttgtagctgaagatcagaccaataaatattcccaagaacacattactgttaggttgggggatcattaaactcgagctaagacacaaatatgtagatgaaattagtgctgctgttcatgccttcgttggagttagccattacaggacacaagaatttagtaagaggtttggtaaa

SEQ ID NO: 41934 - DNA, 1419 bp, Zea Mays
ccggctgactgaccggcccttgctttaccgccgcggcgaaagggcggcgcatgtcctgccggatatgccgtttccggcatggtataagtaggcgacgcccaccgttcctcctatcaccaccatcccccgatccgacccaaaacggcaggcatgcatacgtgcactaaagcaagtagtaacgatgtatctattccatccttgatcatgcatgtgtttgtggagtgtggaggtccattgcagggcaaccccccgttggcaggtgcgacggcgacgtacccctaccctgccaaaggggatttgcccggcgatgcgcctgcacacacagtggttctttctactctacctctccggctcaaggtaggagaagacgatgctccatccggctggccggttacatccggcctttcttcagcccatcggataggagcccaatatctgatcgactgatccgtcttggattggacaaaagccctaaagcccaccacaggatcctcaacagcctaaataggcccatgaaaagcctctcacagctccgagctagacccccacctccccgcctagacctagggttgcttccttccttttaacctcgcgccgccatccgacgcccatctgctccaccctccacccagccgccgccgccgccgcctaaggagaagagggtccggccgtctccttgccccgatggcgtccgagaagaagcagtccaacccgatgcgggagatcaaggtgcagaagctggtcctcaacatatccgtaggggagagcggcgaccgcctcacccgcgccgccaaggtgctggagcagctcagcggccagacccccgtcttctccaaggcgaggtacacggtgcgctcgttcggcatccggcgtaacgagaagatcgcctgctacgtcacggtcaggggcgacaaggccatgcagctgcttgagagcggcctcaaggtcaaggagtacgagctgctcaggaggaacttcagcgacaccggctgcttcgggttcggcatccaggagcacatcgaccttggtatcaagtatgatccatcaacaggcatctatgggatggacttctacgtcgtgcttgagcgtgctggctatcgcgtcgcgcgccgcaggaggtgcaagtcccgtgttgggattcagcatagggtgaccaaggaggactccatgaagtggttccaggtcaagtatgaaggtgtcatcctcaacaaggctcaggccagcacgatttaaacctcacctgtggggcaaaacagctctcgcttcatctccatgtgaacgcaagatcaccttccaaggtttttgtttgagttgtatcctctggcctgactttttagtctactagcagagctataatcactatatgaattattttttagattgcttccaacaaggtagggattagttatgtggttggaa

SEQ ID NO: 41935 - DNA, 1251 bp, Zea Mays
gccaaaggggatttgcccggcgatgcgcctgcacacacagtggttctttctactctacctctccggctcaaggtaggagaagacgatgctccatccggctggccggttacatccggcctttcttcagcccatcggataggagcccaatatctgatcgactgatccgtcttggattggacaaaagccctaaagcccaccacaggatcctcaacagcctaaataggcccatgaaaagcctctcacagctccgagctagacccccacctccccgcctagacctagggttgcttccttccttttaacctcgcgccgccatccgacgcccatctgctccaccctccacccagccgccgccgccgccgcctaaggagaagagggtccggccgtctccttgccccgatggcgtccgagaagaagcagtccaacccgatgcgggagatcaaggtgcagaagctggtcctcaacatatccgtaggggagagcggcgaccgcctcacccgcgccgccaaggtgctggagcagctcagcggccagacccccgtcttctccaaggcgaggtacacggtgcgctcgttcggcatccggcgtaacgagaagatcgcctgctacgtcacggtcaggggcgacaaggccatgcagctgcttgagagcggcctcaaggtcaaggagtacgagctgctcaggaggaacttcagcgacaccggctgcttcgggttcggcatccaggagcacatcgaccttggtatcaagtacggctccgtcttatatactttacgtgaataatagatatgagtatgatccatcaacaggcatctatgggatggacttctacgtcgtgcttgagcgtgctggctatcgcgtcgcgcgccgcaggaggtgcaagtcccgtgttgggattcagcatagggtgaccaaggaggactccatgaagtggttccaggtcaagtatgaaggtgtcatcctcaacaaggctcaggccagcacgatttaaacctcacctgtggggcaaaacagctctcgcttcatctccatgtgaacgcaagatcaccttccaaggtttttgtttgagttgtatcctctggcctgactttttagtctactagcagagctataatcactatatgaattattttttgtgcccttaccatactctgctgttgcttgagaatatgttattagtctgtcctagctcttctttggttacatgctttgtttaccgcatctgcgtttaagtttttgttgactagttac

SEQ ID NO: 41936 - DNA, 1283 bp, Zea Mays
cccggcgatgcgcctgcacacacagtggttctttctactctacctctccggctcaaggtaggagaagacgatgctccatccggctggccggttacatccggcctttcttcagcccatcggataggagcccaatatctgatcgactgatccgtcttggattggacaaaagccctaaagcccaccacaggatcctcaacagcctaaataggcccatgaaaagcctctcacagctccgagctagacccccacctccccgcctagacctagggttgcttccttccttttaacctcgcgccgccatccgacgcccatctgctccaccctccacccagccgccgccgccgccgcctaaggagaagagggtccggccgtctccttgccccgatggtacactcccgcttccgtccccgtgttcccattcccatcttctcgtcctcctcttcctctccatcctccttcctgtgacatgtggcgcgtcccgcaggcgtccgagaagaagcagtccaacccgatgcgggagatcaaggtgcagaagctggtcctcaacatatccgtaggggagagcggcgaccgcctcacccgcgccgccaaggtgctggagcagctcagcggccagacccccgtcttctccaaggcgaggtacacggtgcgctcgttcggcatccggcgtaacgagaagatcgcctgctacgtcacggtcaggggcgacaaggccatgcagctgcttgagagcggcctcaaggtcaaggagtacgagctgctcaggaggaacttcagcgacaccggctgcttcgggttcggcatccaggagcacatcgaccttggtatgatccatcaacaggcatctatgggatggacttctacgtcgtgcttgagcgtgctggctatcgcgtcgcgcgccgcaggaggtgcaagtcccgtgttgggattcagcatagggtgaccaaggaggactccatgaagtggttccaggtcaagtatgaaggtgtcatcctcaacaaggctcaggccagcacgatttaaacctcacctgtggggcaaaacagctctcgcttcatctccatgtgaacgcaagatcaccttccaaggtttttgtttgagttgtatcctctggcctgactttttagtctactagcagagctataatcactatatgaattattttttgtgcccttaccatactctgctgttgcttgagaatatgttattagtctgtcctagctcttctttggttacatgctttgtttaccgcatctgcgtttaagtttttgttgactagttac

SEQ ID NO: 41937 - DNA, 3095 bp, Zea Mays
cttgggattagtgagctaaagaacctatgttgggctctgagagctcgttggccatggctgcagaaaacagaccccagtaggccttggacggacttccccactcgtgtatgtaaggtggttaaaaatctgatcgctgcagccattattactaagctcggtgatggagccaataccctcttctggaaggatagatggttggatgggaaatgtattaaggacatagctcctgcagtgtttgatttggtgcccccgcgtcttgccaacagacggttggtcaaagatgcgctccctaattttcagtggatctccgatgtgaatggggcaatttcagttagagtcattgctgaattcttggaactttgtgaagtgcttgatgcagttgtgctccaacctggaataagggatcgccacttatggaaattcagcgcttcaggggagtatacaactagttctgcttataaagctctcttccttggttcggttcagttcgaaccagcagaacgtgtgtggaaatcttgggctcctggaaagtgcaagttctttatatggcttgtggaacataataggtgctggactgctgacaggcttataaaaagaggactagaccgacctgagcagtgccccctgtgcgaccaagaggctgaaaccataaatcatttgctggtcaaatgtgtttttgccatacagttctggtttcatttccttagttcagtggggctgcaggaactgtatccagctcatgaggattcctttgagtcgtggtggaagtctagcagctctcaggcatctgattttttgagaaaaagttttaattctttagtgatcctaggtgcttggaccatttggaagcataggaatagatgcgtctttgatggttgtaatcccagcctggtcacagcccttagagtggctagggaagaggcggtgctatggtccttgactggagccaaggccctgtccttcctccaagttgatgagttgctagcttagatcagcgttgtgggtcgtgtttcctccatgatagtcggtgatccttagtctctaagtggtgtgtgtgttctgtaccggggttctctccccctttcctattcttctattaatgcaatgatgcgcagctctcctgcgtattccagaaaaaaaaaattgtattcgtatgactgtatactcaaagagctctgtcattcccatccactgctctgaggaagacattagccgcactagagacatcctctcttgctcggtaggcagcttcccatgctcctaccttggcataccccttactcttgctaaaccaactaaagctgatttgctacctttgattgataaggttgcaatcaaattgctggggtggaaggtccatctcttgaataaagcaggccggctagagttagttaaatcagctcttttagcaacacctattcatttgatgcttgcgcttgatttgcccaaatgggttattaaagcaattgacaaaagaaggcggggttttctctggaaagggcaagagcaagcaaatggaggcaattgtatggtgtcctggcgaaaagtgcagcggccgtaccagtacggtggtcttggtatccatgatctggaaaggatggggtggactctacgcttacgatggctctggttcatgaaaacggacacctcgaaaccttggtttccctgcacaagcagcagccttgttcaaaatggcagttgaagttaccattggcaatggtgaggatactcttttttggacagaaaaatggttgcagggcagatgtgtggctgatttagcccccgagctctaccatgcaattcccaagagagtagctaaaaggcgtacagtgaatcaggctctttccaacagatgttggatctcaggtatcaagggagccttaacagttcaggtgttggctggttacctccatatttgggatctggtggagggtgctgtccttcaacttgacacaccagataagcatgtttggaggctttcttctactgggtgctagagcagcaaatctgcctataacgcaatgttcgttggcaccatcaaattctccccttggaagcggatttggaaaacttgggcaccatgaaattcttctactgggtggagggttctctcttaatgaaatggcgcgcagttcgataaaaaattgtatatttaagatgttgatatccattcaaatcttatttgacgcaactcgataacatccgtatccaatccgaatccgaagagaaaatataaaaacaaatatgaaacgagtaatatccggatatgtgattagccgattacacccctagccttaagtgctcagtgctcttggggatcttcctaccatccctgtgcacccctagccttaaagcaacgatggatcaggactgaatttggagaggctgaatggcctgaatctgggggaggggaggaggtcgagttggatttctcaggaaaattggaggagctcgtcaaggatgtaagttggctggatgtgttaggtttatactacaaaacccttttgccatgttggcgtattgcatgggcggctgctaaagaaattaccttcaaggtgaaaggggataatctgcttccaaggagaggggctcaggggcgcctgttgtcctcggggagtatgatgggtctccaacaaactggataggattctggtttgggcttgtaccctaggaatccccaaaaggaactcgttgaaaaggttgctaaaaaggttggtgacccactgatcactgttgttgtgtgtcatggaccttcggtccatggggatagatgtcttctccggcgaggttatacccctctgccgcaggcttggttctagggtagcagccctaggcgcttgagagggtcattgcaagagagagagattggtttgataatgatcttgcttgatttattccctgctgccatgcggcttataaatagctctatggctaaccaacttctcctacaaactctcaactaactcctactttcttggacttatctgatgctaaccaactctccacaattctctcatttcaatcttattctctaaccttatcccagctcatctcaatcttattctctagccttatcccagcctggctgttgcctc

SEQ ID NO: 41938 - DNA, 1348 bp, Zea Mays
atcaccttcaacccggcaatagcctcccaggacgtgagcggcgcgacggcgtcatcgtcgaggaggttctggcggaatgagagcttgcggagatgggggagttggccgatgcgaggatcaacagaagagaggcggttggcggtgaggtcgacctcctccagcgtgggtgggatctccacctcgcttagatcgtgcagctggtagctcgtcaggtcgaggtacagcaccggctcctccgtctccatcttggcctccgcctccaccttggcctccccctctatcttggccactgcctcgccgccagccgcctcgtacagctgatcaactacaccttcgccggaggccatggggaccgctgggtgagggtggattcaggtctcgacaggattctggaagaacggggaagcgaaggaaggaccgcaggagaagaaaatgcgcaatttgtttcacctggggaaagaagaaaggcaattttagtaggctggacatgaatagtatgtgggccaattaaatgggctggcaatactaccattaaggcccatctatgtcttttttcccaaatggcaaggttcaaaaccctaaaaacccgcacggcctcaccgcccctccggcctccgccgcgtgctcgtcccaaccctgtcgccggcaagccatggcgtcgcgcttccgctccttcactcgcccggccgccgccgccttcctccggtccactgccagccgaagcccctccgcttcccttccccgcaccctcgctcctgtccctagggcttcggccatggggcggcgcatggctctggcgcggtctctgcaaccgctgcacagcgccgtctcggcggcccggctgacgtcgcggctgggggcggaggtggaccgggccgtgtcgcagggtacgctctgcagttcctacccgggagtctgagtctgatacagtagacaggtctcagtgtccctcgataatgaaaggaactgctccagatggcagcaacatcagcagcagatagttgtaagacttggtcatcataataatcattcttgttcaatggttacgttgtttatttagtggcactttttgctatgcgcttaccataatacattcctggtaacggcttttcttttgaattctatgtgtggtcaaggttttaaagagcatagtcatgttcatgtacgcctgtctccatttatatatgtggagatatgggcatcagttcaaagctgggatcaaatttctgggtagcatcccggcaaaatgtgacattttgttgcaaatgttgtttcattacgtttaaagtgtttttttctcttgaaatatagcgaagattgaattgaagttgatgttgggacattcaaa

SEQ ID NO: 41939 - DNA, 801 bp, Zea Mays
atcaccttcaacccggcaatagcctcccaggacgtgagcggcgcgacggcgtcatcgtcgaggaggttctggcggaatgagagcttgcggagatgggggagttggccgatgcgaggatcaacagaagagaggcggttggcggtgaggtcgacctcctccagcgtgggtgggatctccacctcgcttagatcgtgcagctggtagctcgtcaggtcgagggcttcggccatggggcggcgcatggctctggcgcggtctctgcaaccgctgcacagcgccgtctcggcggcccggctgacgtcgcggctgggggcggaggtggaccgggccgtgtcgcagggtacgctctgcagttcctacccgggagtctgagtctgatacagtagacaggtctcagtgtccctcgataatgaaaggaactgctccagatggcagcaacatcagcagcagatagttgtaagacttggtcatcataataatcattcttgttcaatggttacgttgtttatttagtggcactttttgctatgcgcttaccataatacattcctggtaacggcttttcttttgaattctatgtgtggtcaaggttttaaagagcatagtcatgttcatgtacgcctgtctccatttatatatgtggagatatgggcatcagttcaaagctgggatcaaatttctgggtagcatcccggcaaaatgtgacattttgttgcaaatgttgtttcattacgtttaaagtgtttttttctcttgaaatatagcgaagattgaattgaagttgatgttgggacattcaaa

SEQ ID NO: 41940 - DNA, 824 bp, Zea Mays
atcaccttcaacccggcaatagcctcccaggacgtgagcggcgcgacggcgtcatcgtcgaggaggttctggcggaatgagagcttgcggagatgggggagttggccgatgcgaggatcaacagaagagaggcggttggcggtgaggtcgacctcctccagcgtgggtgggatctccacctcgcttagatcgtgcagctggtagctcgtcaggtcgagggcttcggccatggggcggcgcatggctctggcgcggtctctgcaaccgctgcacagcgccgtctcggcggcccggctgacgtcgcggctgggggcggaggtggaccgggccgtgtcgcagggtacgctctgcagttcctacccgggagtctgagtctgatacagtgtactaatctttgcaacgctacaagacaggtctcagtgtccctcgataatgaaaggaactgctccagatggcagcaacatcagcagcagatagttgtaagacttggtcatcataataatcattcttgttcaatggttacgttgtttatttagtggcactttttgctatgcgcttaccataatacattcctggtaacggcttttcttttgaattctatgtgtggtcaaggttttaaagagcatagtcatgttcatgtacgcctgtctccatttatatatgtggagatatgggcatcagttcaaagctgggatcaaatttctgggtagcatcccggcaaaatgtgacattttgttgcaaatgttgtttcattacgtttaaagtgtttttttctcttgaaatatagcgaagattgaattgaagttgatgttgggacattcaaa

SEQ ID NO: 41941 - DNA, 1305 bp, Zea Mays
atcaccttcaacccggcaatagcctcccaggacgtgagcggcgcgacggcgtcatcgtcgaggaggttctggcggaatgagagcttgcggagatgggggagttggccgatgcgaggatcaacagaagagaggcggttggcggtgaggtcgaggtacagcaccggctcctccgtctccatcttggcctccgcctccaccttggcctccccctctatcttggccactgcctcgccgccagccgcctcgtacagctgatcaactacaccttcgccggaggccatggggaccgctgggtgagggtggattcaggtctcgacaggattctggaagaacggggaagcgaaggaaggaccgcaggagaagaaaatgcgcaatttgtttcacctggggaaagaagaaaggcaattttagtaggctggacatgaatagtatgtgggccaattaaatgggctggcaatactaccattaaggcccatctatgtcttttttcccaaatggcaaggttcaaaaccctaaaaacccgcacggcctcaccgcccctccggcctccgccgcgtgctcgtcccaaccctgtcgccggcaagccatggcgtcgcgcttccgctccttcactcgcccggccgccgccgccttcctccggtccactgccagccgaagcccctccgcttcccttccccgcaccctcgctcctgtccctagggcttcggccatggggcggcgcatggctctggcgcggtctctgcaaccgctgcacagcgccgtctcggcggcccggctgacgtcgcggctgggggcggaggtggaccgggccgtgtcgcagggtacgctctgcagttcctacccgggagtctgagtctgatacagtgtactaatctttgcaacgctacaagacaggtctcagtgtccctcgataatgaaaggaactgctccagatggcagcaacatcagcagcagatagttgtaagacttggtcatcataataatcattcttgttcaatggttacgttgtttatttagtggcactttttgctatgcgcttaccataatacattcctggtaacggcttttcttttgaattctatgtgtggtcaaggttttaaagagcatagtcatgttcatgtacgcctgtctccatttatatatgtggagatatgggcatcagttcaaagctgggatcaaatttctgggtagcatcccggcaaaatgtgacattttgttgcaaatgttgtttcattacgtttaaagtgtttttttctcttgaaatatagcgaagattgaattgaagttgatgttgggacattcaaa

SEQ ID NO: 41942 - DNA, 772 bp, Zea Mays
gtcgaactgaaggaagaccatagattaagtcgcacggaggccatggaggtgatcgcttgagtctagggaccttgtccatagcatcaccaagtggggtgggcagctgtcttgcgacgaattgctcgttggagcaattgagacgtcgtggctccacctgggatcgtagacagcgtcgccgccaccttcttcgctgaagcgaggtgatgaggaatttgaagcccaactttggggaagcacctaagcagttggatttgcaaataaaaggcaagttgtgtacttgatcacattatttgacctaataatattaaattttatgttctcaacctactgacacttttaggttaaattgatggggcctgataggttacttagttttgtttaccctacaccatgcatacaaatgaactattaggtagtcttgctatttctctatatggttttgggattaatgctacatatggattatgatcatattttattgtcaatggattatttatctttaatgataagatcattttttaattagaacatggagaaccacccaggaaaatagtgctaccacaagggtaaaatgtgacgcccttggccaattaattaggaaagccagtgtgagattatcttacttgaaaggggcaagcggggagtgaatcgctgcaaagtatagagaggttctcaggtcgatctatctgtcattgctttttggatgagagattcctatacttacatttgcttgaaaccgtagcaggttttctcaagctagtggatttttgaa

SEQ ID NO: 41943 - DNA, 3171 bp, Zea Mays
gaattttcgcgcacagcagccgggcgccggcggatcttcccagtttcacaccacacgctccacggctggggatcacgctgtcacgctcacgcgcccctccccccgccgccaacgcccacgctgcgagcgcgaatccatcttctctacctcctcgtccattcctagggttcctcctctgccgaatcgcggggaactctgcgggcccaatttggtagggtaatctcctaccaggaggtcaaattccagtcaacgccgcttggttttgtagccgaccggtcgatttgaatccaggggcaccgattggctgggtgagagggcaggctcgatttgaacccgcctctgcccttttcgtggaagttttgggtcttattaggcgcggattactggggtctagggatgtggtagttactagctgcttgggttaggcggcgcgccgaggtgcttccgtgcttggctgactagtgtcaatggcgggatctgtcggcaaggccagggcggcgctgcggtcgtccccgaagcggtacagcggcacggacccaccgttgtctctggcggggccgacgttggcggatctgcagaggacggccgagctggagaagttcttggttgaagcgggcctctatgagggtaaagaggagtccgcgaagcgggaagatgtgctatccgagattggtctgatagtcaaggaatgggtgaagcagttgactcgtaagaaaggatatgctgagcaattggttgaacaagcaaatgcaatcctttttacttttgggtcttacagattgggggttcatggacctggagctgatattgataccctttgtgttggaccttcatatgtgaaccgagaggaggatttctttgtcacactgcatggcatattagctgagaaggaagaagttgctgagttgcaacctgtacctgatgctcatgtacctgtattgaaatttaagttccgtgggatatcaattgaccttctctatgctagcatctctctttcagtgataccagcggatttcgatatttctcaaggatctgtactttgtgatgttgacgaagcaactgtgcgaagtcttaatggttgcagagtggcggatcagattcttcggcttgttccaaatgttgagaatttccggacaacactcagatgcttgaagtactgggcaaagagaaggggtgtttattctaacattactggtttccttgggggtgtgaactgggctctgctggttgctcgtgtatgccaactctatcctaatgctgtgccaagtatgctggtttctaggttcttcagagtttttactcagtggcaatggccaaatccagtgatgctatgtgcgattgagaataatgatcttggtttttctatatgggatccacgcaaaaatccacgtgacagaaaccatctcatgcccatcatcactccagcctacccatgcatgaactctagttacaatgtttcaaccagcacactgagggttataatggagcaatttcaatttggcaacaaagtttgtcaggaaattgaacttaataaggccaattggaatgccttatttgagcctttccatttttttgaggcatacagaaagtttctagtggttgacatagttgcagaggatgacgatgatcttcgtctttggaagggatggatcgagtctcgtttgagacaacttactttaaagattgagcgggatactaaaggaattttgcagtgccatccgtacccatgcgagtattcagatcccacaatagagtgtgcacattgtgccttctacatgggcttatcaaggaaagaggggttgaaaaaacgtggtcaacagtttgatatccgtgggacagtagatgaatttatgcgtgaaattggcatgtattcattgtggaagcctgggatggatctggctgtcacccatgttcatagggagcaggtcccatcttatgtatttgagcaaggatacaagaaaccctgccctacaatgcatgcaaaccaacaagagcagtctgatggagatggaacatttagcccatatctggagagtcagcttaagagaaagtacatttccgatggagatggtcatgtggatctttgcaaatctgtaaaaagggcttcagtaagcccacctggtgtgggaaccccacctcatcttggaaatagtgtcagtaacgttgtttgtgacagtccagtcaaattcgtttcaagtgtcgtttgcagcggagcgcatgcttcctcatcacatgatgatataaatatagaacaagcacaattaactacttcaccatatggatctgaggatacctcagcatcaggtacaagctgtgcagcagtgggagcagttattttggctgatgaatccagcaagctcggtaacttgacatcagatcttgaagttgatacaattcagacaatgccactgcacacatctttagaatgcgtcgctcaaaagggtgaaacaaagcttgaggaaatcagaaggttggcgagcaacaattgtgctgagtttctagagagctaagttcttgctgacaaggtacacttagacttaggtgggcatgaagtgaattgaaacatcattccagacaaggtgatgcaggggtgaagtttgcatagcatcgataggccggaaatcggatttgaggacccaatgatatgccgctgcatggaaagtttcatcatttcatgcctgtggtcggtttgctcgtgaagattgcttttgttcgctgtggaagcgggtgcaagtattacacagcagcaatatcgggactgttgtgaaggatgaagttgagagtcaacatctgagaaccatggagctcaccatacgccacaaaggaactaagctgctggtttaggcatggttaagagagtcagtgctggtcctttaggttaaataaaaactttgcggggctgcacggtgtgcagaaaaggttgagtctagggcactaggctgatggtctatgtatgtgatgtacgcagataggcagatacctatgcgttcaaagtagcgcatcaaattttggccccattattttcactgcagtatcatgatgtgatgttgatagtagagatagagcaagtatgatactccctccgtccaaaagtttgtcgttcttgctttttaaggagtcaaacatcttgaactttgaccatatttatataaaaatattattatttatagt

SEQ ID NO: 41944 - DNA, 3488 bp, Zea Mays
gaattttcgcgcacagcagccgggcgccggcggatcttcccagtttcacaccacacgctccacggctggggatcacgctgtcacgctcacgcgcccctccccccgccgccaacgcccacgctgcgagcgcgaatccatcttctctacctcctcgtccattcctagggttcctcctctgccgaatcgcggggaactctgcgggcccaatttggtagggtaatctcctaccaggaggtcaaattccagtcaacgccgcttggttttgtagccgaccggtcgatttgaatccaggggcaccgattggctgggtgagagggcaggctcgatttgaacccgcctctgcccttttcgtggaagttttgggtcttattaggcgcggattactggggtctagggatgtggtagttactagctgcttgggttaggcggcgcgccgaggtgcttccgtgcttggctgactagtgtcaatggcgggatctgtcggcaaggccagggcggcgctgcggtcgtccccgaagcggtacagcggcacggacccaccgttgtctctggcggggccgacgttggcggatctgcagaggacggccgagctggagaagttcttggttgaagcgggcctctatgagggtaaagaggagtccgcgaagcgggaagatgtgctatccgagattggtctgatagtcaaggaatgggtgaagcagttgactcgtaagaaaggatatgctgagcaattggttgaacaagcaaatgcaatcctttttacttttgggtcttacagattgggggtatcggcttctttggttcttttatcatataacaacttttcttgacattcagatattgaaatagcacaactcattgtatctatagtcttattaacagcattcaagttccacttgctgaatataacctagatttgttagttttcttcagggttcagaacctcgacttagttttatgttctgcataagcagaagggcttgcaacttaagaactagttcatggacctggagctgatattgataccctttgtgttggaccttcatatgtgaaccgagaggaggatttctttgtcacactgcatggcatattagctgagaaggaagaagttgctgagttgcaacctgtacctgatgctcatgtacctgtattgaaatttaagttccgtgggatatcaattgaccttctctatgctagcatctctctttcagtgataccagcggatttcgatatttctcaaggatctgtactttgtgatgttgacgaagcaactgtgcgaagtcttaatggttgcagagtggcggatcagattcttcggcttgttccaaatgttgagaatttccggacaacactcagatgcttgaagtactgggcaaagagaaggggtgtttattctaacattactggtttccttgggggtgtgaactgggctctgctggttgctcgtgtatgccaactctatcctaatgctgtgccaagtatgctggtttctaggttcttcagagtttttactcagtggcaatggccaaatccagtgatgctatgtgcgattgagaataatgatcttggtttttctatatgggatccacgcaaaaatccacgtgacagaaaccatctcatgcccatcatcactccagcctacccatgcatgaactctagttacaatgtttcaaccagcacactgagggttataatggagcaatttcaatttggcaacaaagtttgtcaggtacttcctgaaaatttacagctgatagctaatgttcttggtatggtctcactgcgtatcttttatgcaggaaattgaacttaataaggccaattggaatgccttatttgagcctttccatttttttgaggcatacagaaagtttctagtggttgacatagttgcagaggatgacgatgatcttcgtctttggaagggatggatcgagtctcgtttgagacaacttactttaaagattgagcgggatactaaaggaattttgcagtgccatccgtacccatgcgagtattcagatcccacaatagagtgtgcacattgtgccttctacatgggcttatcaaggaaagaggggttgaaaaaacgtggtcaacagtttgatatccgtgggacagtagatgaatttatgcgtgaaattggcatgtattcattgtggaagcctgggatggatctggctgtcacccatgttcatagggagcaggtcccatcttatgtatttgagcaaggatacaagaaaccctgccctacaatgcatgcaaaccaacaagagcagtctgatggagatggaacatttagcccatatctggagagtcagcttaagagaaagtacatttccgatggagatggtcatgtggatctttgcaaatctgtaaaaagggcttcagtaagcccacctggtgtgggaaccccacctcatcttggaaatagtgtcagtaacgttgtttgtgacagtccagtcaaattcgtttcaagtgtcgtttgcagcggagcgcatgcttcctcatcacatgatgatataaatatagaacaagcacaattaactacttcaccatatggatctgaggatacctcagcatcaggtacaagctgtgcagcagtgggagcagttattttggctgatgaatccagcaagctcggtaacttgacatcagatcttgaagttgatacaattcagacaatgccactgcacacatctttagaatgcgtcgctcaaaagggtgaaacaaagcttgaggaaatcagaaggttggcgagcaacaattgtgctgagtttctagagagctaagttcttgctgacaaggtacacttagacttaggtgggcatgaagtgaattgaaacatcattccagacaagtcaatgaaacatgtggttcgaagcggtttcgaaaggtgatgcaggggtgaagtttgcatagcatcgataggccggaaatcggatttgaggacccaatgatatgccgctgcatggaaagtttcatcatttcatgcctgtggtcggtttgctcgtgaagattgcttttgttcgctgtggaagcgggtgcaagtattacacagcagcaatatcgggactgttgtgaaggatgaagttgagagtcaacatctgagaaccatggagctcaccatacgccacaaaggaactaagctgctggtttaggcatggttaagagagtcagtgctggtcctttaggttaaataaaaactttgcggggctgcacggtgtgcagaaaaggttgagtctagggcactaggctgatggtctatgtatgtgatgtacgcagataggcagatacctatgcgttcaaagtagcgcatcaaattttggccccattattttcactgcagtatcatgatgtgatgttgatagtagagatagagcaagtatgatactccctccgtccaaaagtttgtcgttcttgctttttaaggagtcaaacatcttgaactttgaccatatttatataaaaatattattatttatagt

SEQ ID NO: 41945 - DNA, 3206 bp, Zea Mays
gaattttcgcgcacagcagccgggcgccggcggatcttcccagtttcacaccacacgctccacggctggggatcacgctgtcacgctcacgcgcccctccccccgccgccaacgcccacgctgcgagcgcgaatccatcttctctacctcctcgtccattcctagggttcctcctctgccgaatcgcggggaactctgcgggcccaatttggtagggtaatctcctaccaggaggtcaaattccagtcaacgccgcttggttttgtagccgaccggtcgatttgaatccaggggcaccgattggctgggtgagagggcaggctcgatttgaacccgcctctgcccttttcgtggaagttttgggtcttattaggcgcggattactggggtctagggatgtggtagttactagctgcttgggttaggcggcgcgccgaggtgcttccgtgcttggctgactagtgtcaatggcgggatctgtcggcaaggccagggcggcgctgcggtcgtccccgaagcggtacagcggcacggacccaccgttgtctctggcggggccgacgttggcggatctgcagaggacggccgagctggagaagttcttggttgaagcgggcctctatgagggtaaagaggagtccgcgaagcgggaagatgtgctatccgagattggtctgatagtcaaggaatgggtgaagcagttgactcgtaagaaaggatatgctgagcaattggttgaacaagcaaatgcaatcctttttacttttgggtcttacagattgggggttcatggacctggagctgatattgataccctttgtgttggaccttcatatgtgaaccgagaggaggatttctttgtcacactgcatggcatattagctgagaaggaagaagttgctgagttgcaacctgtacctgatgctcatgtacctgtattgaaatttaagttccgtgggatatcaattgaccttctctatgctagcatctctctttcagtgataccagcggatttcgatatttctcaaggatctgtactttgtgatgttgacgaagcaactgtgcgaagtcttaatggttgcagagtggcggatcagattcttcggcttgttccaaatgttgagaatttccggacaacactcagatgcttgaagtactgggcaaagagaaggggtgtttattctaacattactggtttccttgggggtgtgaactgggctctgctggttgctcgtgtatgccaactctatcctaatgctgtgccaagtatgctggtttctaggttcttcagagtttttactcagtggcaatggccaaatccagtgatgctatgtgcgattgagaataatgatcttggtttttctatatgggatccacgcaaaaatccacgtgacagaaaccatctcatgcccatcatcactccagcctacccatgcatgaactctagttacaatgtttcaaccagcacactgagggttataatggagcaatttcaatttggcaacaaagtttgtcaggaaattgaacttaataaggccaattggaatgccttatttgagcctttccatttttttgaggcatacagaaagtttctagtggttgacatagttgcagaggatgacgatgatcttcgtctttggaagggatggatcgagtctcgtttgagacaacttactttaaagattgagcgggatactaaaggaattttgcagtgccatccgtacccatgcgagtattcagatcccacaatagagtgtgcacattgtgccttctacatgggcttatcaaggaaagaggggttgaaaaaacgtggtcaacagtttgatatccgtgggacagtagatgaatttatgcgtgaaattggcatgtattcattgtggaagcctgggatggatctggctgtcacccatgttcatagggagcaggtcccatcttatgtatttgagcaaggatacaagaaaccctgccctacaatgcatgcaaaccaacaagagcagtctgatggagatggaacatttagcccatatctggagagtcagcttaagagaaagtacatttccgatggagatggtcatgtggatctttgcaaatctgtaaaaagggcttcagtaagcccacctggtgtgggaaccccacctcatcttggaaatagtgtcagtaacgttgtttgtgacagtccagtcaaattcgtttcaagtgtcgtttgcagcggagcgcatgcttcctcatcacatgatgatataaatatagaacaagcacaattaactacttcaccatatggatctgaggatacctcagcatcaggtacaagctgtgcagcagtgggagcagttattttggctgatgaatccagcaagctcggtaacttgacatcagatcttgaagttgatacaattcagacaatgccactgcacacatctttagaatgcgtcgctcaaaagggtgaaacaaagcttgaggaaatcagaaggttggcgagcaacaattgtgctgagtttctagagagctaagttcttgctgacaaggtacacttagacttaggtgggcatgaagtgaattgaaacatcattccagacaagtcaatgaaacatgtggttcgaagcggtttcgaaaggtgatgcaggggtgaagtttgcatagcatcgataggccggaaatcggatttgaggacccaatgatatgccgctgcatggaaagtttcatcatttcatgcctgtggtcggtttgctcgtgaagattgcttttgttcgctgtggaagcgggtgcaagtattacacagcagcaatatcgggactgttgtgaaggatgaagttgagagtcaacatctgagaaccatggagctcaccatacgccacaaaggaactaagctgctggtttaggcatggttaagagagtcagtgctggtcctttaggttaaataaaaactttgcggggctgcacggtgtgcagaaaaggttgagtctagggcactaggctgatggtctatgtatgtgatgtacgcagataggcagatacctatgcgttcaaagtagcgcatcaaattttggccccattattttcactgcagtatcatgatgtgatgttgatagtagagatagagcaagtatgatactccctccgtccaaaagtttgtcgttcttgctttttaaggagtcaaacatcttgaactttgaccatatttatataaaaatattattatttatagt

SEQ ID NO: 41946 - DNA, 3162 bp, Zea Mays
gaattttcgcgcacagcagccgggcgccggcggatcttcccagtttcacaccacacgctccacggctggggatcacgctgtcacgctcacgcgcccctccccccgccgccaacgcccacgctgcgagcgcgaatccatcttctctacctcctcgtccattcctagggttcctcctctgccgaatcgcggggaactctgcgggcccaatttggtagggtaatctcctaccaggaggtcaaattccagtcaacgccgcttggttttgtagccgaccggtcgatttgaatccaggggcaccgattggctgggtgagagggcaggctcgatttgaacccgcctctgcccttttcgtggaagttttgggtcttattaggcgcggattactggggtctagggatgtggtagttactagctgcttgggttaggcggcgcgccgaggtgcttccgtgcttggctgactagtgtcaatggcgggatctgtcggcaaggccagggcggcgctgcggtcgtccccgaagcggtacagcggcacggacccaccgttgtctctggcggggccgacgttggcggatctgcagaggacggccgagctggagaagttcttggttgaagcgggcctctatgagggtaaagaggagtccgcgaagcgggaagatgtgctatccgagattggtctgatagtcaaggaatgggtgaagcagttgactcgtaagaaaggatatgctgagcaattggttgaacaagcaaatgcaatcctttttacttttgggtcttacagattgggggttcatggacctggagctgatattgataccctttgtgttggaccttcatatgtgaaccgagaggaggatttctttgtcacactgcatggcatattagctgagaaggaagaagttgctgagttgcaacctgtacctgatgctcatgtacctgtattgaaatttaagttccgtgggatatcaattgaccttctctatgctagcatctctctttcagtgataccagcggatttcgatatttctcaaggatctgtactttgtgatgttgacgaagcaactgtgcgaagtcttaatggttgcagagtggcggatcagattcttcggcttgttccaaatgttgagaatttccggacaacactcagatgcttgaagtactgggcaaagagaaggggtgtttattctaacattactggtttccttgggggtgtgaactgggctctgctggttgctcgtgtatgccaactctatcctaatgctgtgccaagtatgctggtttctaggttcttcagagtttttactcagtggcaatggccaaatccagtgatgctatgtgcgattgagaataatgatcttggtttttctatatgggatccacgcaaaaatccacgtgacagaaaccatctcatgcccatcatcactccagcctacccatgcatgaactctagttacaatgtttcaaccagcacactgagggttataatggagcaatttcaatttggcaacaaagtttgtcaggaaattgaacttaataaggccaattggaatgccttatttgagcctttccatttttttgaggcatacagaaagtttctagtggttgacatagttgcagaggatgacgatgatcttcgtctttggaagggatggatcgagtctcgtttgagacaacttactttaaagattgagcgggatactaaaggaattttgcagtgccatccgtacccatgcgagtattcagatcccacaatagagtgtgcacattgtgccttctacatgggcttatcaaggaaagaggggttgaaaaaacgtggtcaacagtttgatatccgtgggacagtagatgaatttatgcgtgaaattggcatgtattcattgtggaagcctgggatggatctggctgtcacccatgttcatagggagcaggtcccatcttatgtatttgagcaaggatacaagaaaccctgccctacaatgcatgcaaaccaacaagagcagtctgatggagatggaacatttagcccatatctggagagtcagcttaagagaaagtacatttccgatggagatggtcatgtggatctttgcaaatctgtaaaaagggcttcagtaagcccacctggtgtgggaaccccacctcatcttggaaatagtgtcagtaacgttgtttgtgacagtccagtcaaattcgtttcaagtgtcgtttgcagcggagcgcatgcttcctcatcacatgatgatataaatatagaacaagcacaattaactacttcaccatatggatctgaggatacctcagcatcaggtacaagctgtgcagcagtgggagcagttattttggctgatgaatccagcaagctcggtaacttgacatcagatcttgaagttgatacaattcagacaatgccactgcacacatctttagaatgcgtcgctcaaaagggtgaaacaaagcttgaggaaatcagaaggttggcgagcaacaattgtgctgagtttctagagagctaagttcttgctgacaaggtacacttagacttaggtgggcatgaagtgaattgaaacatcattccagacaaggggtgaagtttgcatagcatcgataggccggaaatcggatttgaggacccaatgatatgccgctgcatggaaagtttcatcatttcatgcctgtggtcggtttgctcgtgaagattgcttttgttcgctgtggaagcgggtgcaagtattacacagcagcaatatcgggactgttgtgaaggatgaagttgagagtcaacatctgagaaccatggagctcaccatacgccacaaaggaactaagctgctggtttaggcatggttaagagagtcagtgctggtcctttaggttaaataaaaactttgcggggctgcacggtgtgcagaaaaggttgagtctagggcactaggctgatggtctatgtatgtgatgtacgcagataggcagatacctatgcgttcaaagtagcgcatcaaattttggccccattattttcactgcagtatcatgatgtgatgttgatagtagagatagagcaagtatgatactccctccgtccaaaagtttgtcgttcttgctttttaaggagtcaaacatcttgaactttgaccatatttatataaaaatattattatttatagt

SEQ ID NO: 41947 - DNA, 3216 bp, Zea Mays
gaattttcgcgcacagcagccgggcgccggcggatcttcccagtttcacaccacacgctccacggctggggatcacgctgtcacgctcacgcgcccctccccccgccgccaacgcccacgctgcgagcgcgaatccatcttctctacctcctcgtccattcctagggttcctcctctgccgaatcgcggggaactctgcgggcccaatttggtagggtaatctcctaccaggaggtcaaattccagtcaacgccgcttggttttgtagccgaccggtcgatttgaatccaggggcaccgattggctgggtgagagggcaggctcgatttgaacccgcctctgcccttttcgtggaagttttgggtcttattaggcgcggattactggggtctagggatgtggtagttactagctgcttgggttaggcggcgcgccgaggtgcttccgtgcttggctgactagtgtcaatggcgggatctgtcggcaaggccagggcggcgctgcggtcgtccccgaagcggtacagcggcacggacccaccgttgtctctggcggggccgacgttggcggatctgcagaggacggccgagctggagaagttcttggttgaagcgggcctctatgagggtaaagaggagtccgcgaagcgggaagatgtgctatccgagattggtctgatagtcaaggaatgggtgaagcagttgactcgtaagaaaggatatgctgagcaattggttgaacaagcaaatgcaatcctttttacttttgggtcttacagattggggggttcagaacctcgacttagttttatgttctgcataagcagaagggcttgcaacttaagaactagttcatggacctggagctgatattgataccctttgtgttggaccttcatatgtgaaccgagaggaggatttctttgtcacactgcatggcatattagctgagaaggaagaagttgctgagttgcaacctgtacctgatgctcatgtacctgtattgaaatttaagttccgtgggatatcaattgaccttctctatgctagcatctctctttcagtgataccagcggatttcgatatttctcaaggatctgtactttgtgatgttgacgaagcaactgtgcgaagtcttaatggttgcagagtggcggatcagattcttcggcttgttccaaatgttgagaatttccggacaacactcagatgcttgaagtactgggcaaagagaaggggtgtttattctaacattactggtttccttgggggtgtgaactgggctctgctggttgctcgtgtatgccaactctatcctaatgctgtgccaagtatgctggtttctaggttcttcagagtttttactcagtggcaatggccaaatccagtgatgctatgtgcgattgagaataatgatcttggtttttctatatgggatccacgcaaaaatccacgtgacagaaaccatctcatgcccatcatcactccagcctacccatgcatgaactctagttacaatgtttcaaccagcacactgagggttataatggagcaatttcaatttggcaacaaagtttgtcaggaaattgaacttaataaggccaattggaatgccttatttgagcctttccatttttttgaggcatacagaaagtttctagtggttgacatagttgcagaggatgacgatgatcttcgtctttggaagggatggatcgagtctcgtttgagacaacttactttaaagattgagcgggatactaaaggaattttgcagtgccatccgtacccatgcgagtattcagatcccacaatagagtgtgcacattgtgccttctacatgggcttatcaaggaaagaggggttgaaaaaacgtggtcaacagtttgatatccgtgggacagtagatgaatttatgcgtgaaattggcatgtattcattgtggaagcctgggatggatctggctgtcacccatgttcatagggagcaggtcccatcttatgtatttgagcaaggatacaagaaaccctgccctacaatgcatgcaaaccaacaagagcagtctgatggagatggaacatttagcccatatctggagagtcagcttaagagaaagtacatttccgatggagatggtcatgtggatctttgcaaatctgtaaaaagggcttcagtaagcccacctggtgtgggaaccccacctcatcttggaaatagtgtcagtaacgttgtttgtgacagtccagtcaaattcgtttcaagtgtcgtttgcagcggagcgcatgcttcctcatcacatgatgatataaatatagaacaagcacaattaactacttcaccatatggatctgaggatacctcagcatcaggtacaagctgtgcagcagtgggagcagttattttggctgatgaatccagcaagctcggtaacttgacatcagatcttgaagttgatacaattcagacaatgccactgcacacatctttagaatgcgtcgctcaaaagggtgaaacaaagcttgaggaaatcagaaggttggcgagcaacaattgtgctgagtttctagagagctaagttcttgctgacaagtcaatgaaacatgtggttcgaagcggtttcgaaaggtgatgcaggggtgaagtttgcatagcatcgataggccggaaatcggatttgaggacccaatgatatgccgctgcatggaaagtttcatcatttcatgcctgtggtcggtttgctcgtgaagattgcttttgttcgctgtggaagcgggtgcaagtattacacagcagcaatatcgggactgttgtgaaggatgaagttgagagtcaacatctgagaaccatggagctcaccatacgccacaaaggaactaagctgctggtttaggcatggttaagagagtcagtgctggtcctttaggttaaataaaaactttgcggggctgcacggtgtgcagaaaaggttgagtctagggcactaggctgatggtctatgtatgtgatgtacgcagataggcagatacctatgcgttcaaagtagcgcatcaaattttggccccattattttcactgcagtatcatgatgtgatgttgatagtagagatagagcaagtatgatactccctccgtccaaaagtttgtcgttcttgctttttaaggagtcaaacatcttgaactttgaccatatttatataaaaatattattatttatagt

SEQ ID NO: 41948 - DNA, 3117 bp, Zea Mays
gaattttcgcgcacagcagccgggcgccggcggatcttcccagtttcacaccacacgctccacggctggggatcacgctgtcacgctcacgcgcccctccccccgccgccaacgcccacgctgcgagcgcgaatccatcttctctacctcctcgtccattcctagggttcctcctctgccgaatcgcggggaactctgcgggcccaatttggtagggtaatctcctaccaggaggtcaaattccagtcaacgccgcttggttttgtagccgaccggtcgatttgaatccaggggcaccgattggctgggtgagagggcaggctcgatttgaacccgcctctgcccttttcgtggaagttttgggtcttattaggcgcggattactggggtctagggatgtggtagttactagctgcttgggttaggcggcgcgccgaggtgcttccgtgcttggctgactagtgtcaatggcgggatctgtcggcaaggccagggcggcgctgcggtcgtccccgaagcggtacagcggcacggacccaccgttgtctctggcggggccgacgttggcggatctgcagaggacggccgagctggagaagttcttggttgaagcgggcctctatgagggtaaagaggagtccgcgaagcgggaagatgtgctatccgagattggtctgatagtcaaggaatgggtgaagcagttgactcgtaagaaaggatatgctgagcaattggttgaacaagcaaatgcaatcctttttacttttgggtcttacagattgggggttcatggacctggagctgatattgataccctttgtgttggaccttcatatgtgaaccgagaggaggatttctttgtcacactgcatggcatattagctgagaaggaagaagttgctgagttgcaacctgtacctgatgctcatgtacctgtattgaaatttaagttccgtgggatatcaattgaccttctctatgctagcatctctctttcagtgataccagcggatttcgatatttctcaaggatctgtactttgtgatgttgacgaagcaactgtgcgaagtcttaatggttgcagagtggcggatcagattcttcggcttgttccaaatgttgagaatttccggacaacactcagatgcttgaagtactgggcaaagagaaggggtgtttattctaacattactggtttccttgggggtgtgaactgggctctgctggttgctcgtgtatgccaactctatcctaatgctgtgccaagtatgctggtttctaggttcttcagagtttttactcagtggcaatggccaaatccagtgatgctatgtgcgattgagaataatgatcttggtttttctatatgggatccacgcaaaaatccacgtgacagaaaccatctcatgcccatcatcactccagcctacccatgcatgaactctagttacaatgtttcaaccagcacactgagggttataatggagcaatttcaatttggcaacaaagtttgtcaggaaattgaacttaataaggccaattggaatgccttatttgagcctttccatttttttgaggcatacagaaagtttctagtggttgacatagttgcagaggatgacgatgatcttcgtctttggaagggatggatcgagtctcgtttgagacaacttactttaaagattgagcgggatactaaaggaattttgcagtgccatccgtacccatgcgagtattcagatcccacaatagagtgtgcacattgtgccttctacatgggcttatcaaggaaagaggggttgaaaaaacgtggtcaacagtttgatatccgtgggacagtagatgaatttatgcgtgaaattggcatgtattcattgtggaagcctgggatggatctggctgtcacccatgttcatagggagcaggtcccatcttatgtatttgagcaaggatacaagaaaccctgccctacaatgcatgcaaaccaacaagagcagtctgatggagatggaacatttagcccatatctggagagtcagcttaagagaaagtacatttccgatggagatggtcatgtggatctttgcaaatctgtaaaaagggcttcagtaagcccacctggtgtgggaaccccacctcatcttggaaatagtgtcagtaacgttgtttgtgacagtccagtcaaattcgtttcaagtgtcgtttgcagcggagcgcatgcttcctcatcacatgatgatataaatatagaacaagcacaattaactacttcaccatatggatctgaggatacctcagcatcaggtacaagctgtgcagcagtgggagcagttattttggctgatgaatccagcaagctcggtaacttgacatcagatcttgaagttgatacaattcagacaatgccactgcacacatctttagaatgcgtcgctcaaaagggtgaaacaaagcttgaggaaatcagaaggttggcgagcaacaattgtgctgagtttctagagagctaagttcttgctgacaaggtgatgcaggggtgaagtttgcatagcatcgataggccggaaatcggatttgaggacccaatgatatgccgctgcatggaaagtttcatcatttcatgcctgtggtcggtttgctcgtgaagattgcttttgttcgctgtggaagcgggtgcaagtattacacagcagcaatatcgggactgttgtgaaggatgaagttgagagtcaacatctgagaaccatggagctcaccatacgccacaaaggaactaagctgctggtttaggcatggttaagagagtcagtgctggtcctttaggttaaataaaaactttgcggggctgcacggtgtgcagaaaaggttgagtctagggcactaggctgatggtctatgtatgtgatgtacgcagataggcagatacctatgcgttcaaagtagcgcatcaaattttggccccattattttcactgcagtatcatgatgtgatgttgatagtagagatagagcaagtatgatactccctccgtccaaaagtttgtcgttcttgctttttaaggagtcaaacatcttgaactttgaccatatttatataaaaatattattatttatagt

SEQ ID NO: 41949 - DNA, 2668 bp, Zea Mays
ccaaggtgtccagtcagccgagactggatgccatggctgttcgcctcgcccagaggaagttaggcaggtgcctgggtgggtccggattcaccgtgctgcctaggcgtccgctcagggacgccgtgacttcgccgcgccgccccagcccatttggcccacctcttatctctaattctccttcccctcaaacagcgcctccagcccttcactcaccctccagctgcctcccctcctctcctacccgccagcatccgccagcccctcctctccaactgccagccgccaccagcagatttcgatatttctcaaggatctgtactttgtgatgttgacgaagcaactgtgcgaagtcttaatggttgcagagtggcggatcagattcttcggcttgttccaaatgttgagaatttccggacaacactcagatgcttgaagtactgggcaaagagaaggggtgtttattctaacattactggtttccttgggggtgtgaactgggctctgctggttgctcgtgtatgccaactctatcctaatgctgtgccaagtatgctggtttctaggttcttcagagtttttactcagtggcaatggccaaatccagtgatgctatgtgcgattgagaataatgatcttggtttttctatatgggatccacgcaaaaatccacgtgacagaaaccatctcatgcccatcatcactccagcctacccatgcatgaactctagttacaatgtttcaaccagcacactgagggttataatggagcaatttcaatttggcaacaaagtttgtcaggtacttcctgaaaatttacagctgatagctaatgttcttggtatggtctcactgcgtatcttttatgcaggaaattgaacttaataaggccaattggaatgccttatttgagcctttccatttttttgaggcatacagaaagtttctagtggttgacatagttgcagaggatgacgatgatcttcgtctttggaagggatggatcgagtctcgtttgagacaacttactttaaagattgagcgggatactaaaggaattttgcagtgccatccgtacccatgcgagtattcagatcccacaatagagtgtgcacattgtgccttctacatgggcttatcaaggaaagaggggttgaaaaaacgtggtcaacagtttgatatccgtgggacagtagatgaatttatgcgtgaaattggcatgtattcattgtggaagcctgggatggatctggctgtcacccatgttcatagggagcaggtcccatcttatgtatttgagcaaggatacaagaaaccctgccctacaatgcatgcaaaccaacaagagcagtctgatggagatggaacatttagcccatatctggagagtcagcttaagagaaagtacatttccgatggagatggtcatgtggatctttgcaaatctgtaaaaagggcttcagtaagcccacctggtgtgggaaccccacctcatcttggaaatagtgtcagtaacgttgtttgtgacagtccagtcaaattcgtttcaagtgtcgtttgcagcggagcgcatgcttcctcatcacatgatgatataaatatagaacaagcacaattaactacttcaccatatggatctgaggatacctcagcatcaggtacaagctgtgcagcagtgggagcagttattttggctgatgaatccagcaagctcggtaacttgacatcagatcttgaagttgatacaattcagacaatgccactgcacacatctttagaatgcgtcgctcaaaagggtgaaacaaagcttgaggaaatcagaaggttggcgagcaacaattgtgctgagtttctagagagctaagttcttgctgacaaggtacacttagacttaggtgggcatgaagtgaattgaaacatcattccagacaaggtttttcttcctatacttcttgtcaaattaagattgtagtttgatatgatctgaactctatgcctgcctttctattcttttcattgattaactgtttggatccattaaaagtcaatgaaacatgtggttcgaagcggtttcgaaaggtgatgcaggggtgaagtttgcatagcatcgataggccggaaatcggatttgaggacccaatgatatgccgctgcatggaaagtttcatcatttcatgcctgtggtcggtttgctcgtgaagattgcttttgttcgctgtggaagcgggtgcaagtattacacagcagcaatatcgggactgttgtgaaggatgaagttgagagtcaacatctgagaaccatggagctcaccatacgccacaaaggaactaagctgctggtttaggcatggttaagagagtcagtgctggtcctttaggttaaataaaaactttgcggggctgcacggtgtgcagaaaaggttgagtctagggcactaggctgatggtctatgtatgtgatgtacgcagataggcagatacctatgcgttcaaagtagcgcatcaaattttggccccattattttcactgcagtatcatgatgtgatgttgatagtagagatagagcaagtatgatactccctccgtccaaaagtttgtcgttcttgctttttaaggagtcaaacatcttgaactttgaccatatttatataaaaatattattatttatagt

SEQ ID NO: 41950 - DNA, 2305 bp, Zea Mays
tatctctaattctccttcccctcaaacagcgcctccagcccttcactcaccctccagctgcctcccctcctctcctacccgccagcatccgccagcccctcctctccaactgccagccgccaccagcagatttcgatatttctcaaggatctgtactttgtgatgttgacgaagcaactgtgcgaagtcttaatggttgcagagtggcggatcagattcttcggcttgttccaaatgttgagaatttccggacaacactcagatgcttgaagtactgggcaaagagaaggggtgtttattctaacattactggtttccttgggggtgtgaactgggctctgctggttgctcgtgtatgccaactctatcctaatgctgtgccaagtatgctggtttctaggttcttcagagtttttactcagtggcaatggccaaatccagtgatgctatgtgcgattgagaataatgatcttggtttttctatatgggatccacgcaaaaatccacgtgacagaaaccatctcatgcccatcatcactccagcctacccatgcatgaactctagttacaatgtttcaaccagcacactgagggttataatggagcaatttcaatttggcaacaaagtttgtcaggtacttcctgaaaatttacagctgatagctaatgttcttggtatggtctcactgcgtatcttttatgcaggaaattgaacttaataaggccaattggaatgccttatttgagcctttccatttttttgaggcatacagaaagtttctagtggttgacatagttgcagaggatgacgatgatcttcgtctttggaagggatggatcgagtctcgtttgagacaacttactttaaagattgagcgggatactaaaggaattttgcagtgccatccgtacccatgcgagtattcagatcccacaatagagtgtgcacattgtgccttctacatgggcttatcaaggaaagaggggttgaaaaaacgtggtcaacagtttgatatccgtgggacagtagatgaatttatgcgtgaaattggcatgtattcattgtggaagcctgggatggatctggctgtcacccatgttcatagggagcaggtcccatcttatgtatttgagcaaggatacaagaaaccctgccctacaatgcatgcaaaccaacaagagcagtctgatggagatggaacatttagcccatatctggagagtcagcttaagagaaagtacatttccgatggagatggtcatgtggatctttgcaaatctgtaaaaagggcttcagtaagcccacctggtgtgggaaccccacctcatcttggaaatagtgtcagtaacgttgtttgtgacagtccagtcaaattcgtttcaagtgtcgtttgcagcggagcgcatgcttcctcatcacatgatgatataaatatagaacaagcacaattaactacttcaccatatggatctgaggatacctcagcatcaggtacaagctgtgcagcagtgggagcagttattttggctgatgaatccagcaagctcggtaacttgacatcagatcttgaagttgatacaattcagacaatgccactgcacacatctttagaatgcgtcgctcaaaagggtgaaacaaagcttgaggaaatcagaaggttggcgagcaacaattgtgctgagtttctagagagctaagttcttgctgacaaggtacacttagacttaggtgggcatgaagtgaattgaaacatcattccagacaaggacccaatgatatgccgctgcatggaaagtttcatcatttcatgcctgtggtcggtttgctcgtgaagattgcttttgttcgctgtggaagcgggtgcaagtattacacagcagcaatatcgggactgttgtgaaggatgaagttgagagtcaacatctgagaaccatggagctcaccatacgccacaaaggaactaagctgctggtttaggcatggttaagagagtcagtgctggtcctttaggttaaataaaaactttgcggggctgcacggtgtgcagaaaaggttgagtctagggcactaggctgatggtctatgtatgtgatgtacgcagataggcagatacctatgcgttcaaagtagcgcatcaaattttggccccattattttcactgcagtatcatgatgtgatgttgatagtagagatagagcaagtatgatactccctccgtccaaaagtttgtcgttcttgctttttaaggagtcaaacatcttgaactttgaccatatttatataaaaatattattatttatagt

SEQ ID NO: 41951 - DNA, 681 bp, Zea Mays
gtagaatgcgtcaactctttccctcgtcgactctcgtttccccccttgcgccgtcagctatcccggtccattatcgaagctgtactgctgggagcaaagaacgccgcaatagctggtactgtggttgcagttcccacgttggttggctgccgtgtccttccttgggctaaggcgaatctcaactacactgcacaagcactcattatatctgcagcctgtattgctggcttcttcatcactgctgacaaaaccattctacggaacgcacgacaaaacaccatcgggaagcttgacaagtcaacctgatgcagagatgtagctgaagctgaaaaggttctctggttgccgcggcggttgatagggtgtcttttgccccatatgcagtggcaccatttctcttcgtggacaagtaatttttgggtgtttggctattcaaaccagaggttgttctgtaatgacttgtctaactgatggacccaactattgtatccagtttactccgaatttgaatcagaataaaaggtggttctatatgttcgtagacatggcttagacccttgttctgaacattcacttgacctggaatttgtgatgctaaagaacggggattagcgatgtgatttctttctaattaccgaatagagactagacagagcaggttaatgttggataaggtatgag

SEQ ID NO: 41952 - DNA, 680 bp, Zea Mays
tctgactctggggatgtcgcggacccaaagacggatttttgttctggtttcgatccccattgccccccccgcgagaagctgtactgctgggagcaaagaacgccgcaatagctggtactgtggttgcagttcccacgttggttggctgccgtgtccttccttgggctaaggcgaatctcaactacactgcacaagcactcattatatctgcagcctgtattgctggcttcttcatcactgctgacaaaaccattctacggaacgcacgacaaaacaccatcgggaagcttgacaagtcaacctgatgcagagatgtagctgaagctgaaaaggttctctggttgccgcggcggttgatagggtgtcttttgccccatatgcagtggcaccatttctcttcgtggacaagtaatttttgggtgtttggctattcaaaccagaggttgttctgtaatgacttgtctaactgatggacccaactattgtatccagtttactccgaatttgaatcagaataaaaggtggttctatatgttcgtagacatggcttagacccttgttctgaacattcacttgacctggaatttgtgatgctaaagaacggggattagcgatgtgatttctttctaattaccgaatagagactagacagagcaggttaatgttggataaggtatgag

SEQ ID NO: 41953 - DNA, 2421 bp, Zea Mays
tcgcccctaaaccccaatccacgccggcccaaaatgccccgccgcctagctacgacctacgccggccgcatcgccgccgcgacgccgtccccctcgggcccttccatcaccgtcaccgtctcgccgacaccggcccccacccctcttgacacgcgcggatattccctaccgcgccgccacctcatctgcgccgttgcccgaatcctccgctccccggtgtcacacaccccgctgcttgacctcgatgactacctccgctctctccgcctcactctcaccaccgcggaggcttctgaggtcatgaaggcgctcgcccccgacacctctctcgcgctcagcttcttccgcttcgccgccacctccctccccggcttccggcacgatgccttctcctataaccgcatcctggtcctcctcttcagcaaccgcgccgatcccgccgaggccatgcggctcatcgcggagatggagcgcgacggcgtgcccggcaacatctccaccgtgaatttgctggtcgggatgggcgtggaggtggggaggtgcctggacctggcaagtaagtgggggctcaggctgaacgggtacacctacaagtgccttgtgcaggcgcatctgaggagtcgggaggtgtggaaggggttcgaggtatatgagaagatgcggaggaagggctacaagctggacatatttgcatataacatgctgcttaatgcgcttgccaaggctggaatggttgaccaagcttaccaagtctttgaagatatgaaacaaaactactgtgatccagatgcatacacatacactatactaattagaatgtctggaaaggctgggaagaccactaaatttgtctcattgttggaggaaatggtgtccgaaggatgtgttcttaatctgattgcttataatactgttattgaggctcttggtaagaacaagatggttgacgaggcgatttttatgctttctaaaatgattgagagtgactgtcggcccaatcaattcacatatagcattatgctggatgttttatcaacagggggacaactccacaggttgaatgagattctagatatttgtagtggatgtctgaataggccagtttattcttatttgatcaaggcactctgcaaatctggtcatgcaagtgaggctcatagtgtattctgccgtatgtggaattcccatgaaaaaggagaccggtatgcttttgtatcaatgcttgaggcactatgcaatgcagaaaagacaacagaggctattgatctactgcatatgatgcctgaaaaggggattactacagatgttggaatgtataatatgatattttctgctcttgggaagctgaagcaggtgtctttcatgagcagcctctatgatacgatgagagccaatggtgttgttcctgatgttttcacgtacaatattatgatttcaagttttggtagggttggcttagttgataaggcatctgaactttttgaggaaatggaggatggcagttgcaagcctgatgtcgtcacctataattctatgataaattgtcttgggaaaaatggagatctcgatgaagcccacatgcttttcaaagatatgcaagagaaaggatatgatcctgatgtcttcacttacagcatattgattgagtgctttgggaaatccaataaggttgatatggcatgcagcttgtttgatgagatggttgcacaggggtgcattcctaatattgtaacctataacattttactagactgtttagagagacgagggaagacaacagaagctcataaattttatgaaactctgaagcaacagggattgactccagactcgataacttactcaatacttgagagattggaaagtagatctcaacgaacagtaagaatacgtaaaccaagccggaatacaggctgggttataagtccagtgtgataacctaccctggatctttcagttgcatacctccggtgtagtggggctgaggacaaatagtctgtatgcattatgcaaacttgcaagtatattgctggtcaataatgtcagcaagtgactactcaattaccgtgaaaacaatatagtagtcctgactcatcagaattatatgtatataatagtattgcatggctgctgatatttgatatcttggttctgaacaattcgtggaagatggacatcttgagaacaggtctgtaccccttcagtctactctaaaatctgacgtggtgtcgacctagatagtccactacggcaagagttggtcatgttaggttggaatatgcatataactcatgttgagtttgcatgcaatgggcaaaacaaggaattaccccacagtgaaacaagaccacacttaggggtggtaatgaatcaccatccaaattgaatgtttcttcacaattcatttgataccttaattaa

SEQ ID NO: 41954 - DNA, 2237 bp, Zea Mays
ccccaatccacgccggcccaaaatgccccgccgcctagctacgacctacgccggccgcatcgccgccgcgacgccgtccccctcgggcccttccatcaccgtcaccgtctcgccgacaccggcccccacccctcttgacacgcgcggatattccctaccgcgccgccacctcatctgcgccgttgcccgaatcctccgctccccggtgtcacacaccccgctgcttgacctcgatgactacctccgctctctccgcctcactctcaccaccgcggaggcttctgaggtcatgaaggcgctcgcccccgacacctctctcgcgctcagcttcttccgcttcgccgccacctccctccccggcttccggcacgatgccttctcctataaccgcatcctggtcctcctcttcagcaaccgcgccgatcccgccgaggccatgcggctcatcgcggagatggagcgcgacggcgtgcccggcaacatctccaccgtgaatttgctggtcgggatgggcgtggaggtggggaggtgcctggacctggcaagtaagtgggggctcaggctgaacgggtacacctacaagtgccttgtgcaggcgcatctgaggagtcgggaggtgtggaaggggttcgaggtatatgagaagatgcggaggaagggctacaagctggacatatttgcatataacatgctgcttaatgcgcttgccaaggctggaatggttgaccaagcttaccaagtctttgaagatatgaaacaaaactactgtgatccagatgcatacacatacactatactaattagaatgtctggaaaggctgggaagaccactaaatttgtctcattgttggaggaaatggtgtccgaaggatgtgttcttaatctgattgcttataatactgttattgaggctcttggtaagaacaagatggttgacgaggcgatttttatgctttctaaaatgattgagagtgactgtcggcccaatcaattcacatatagcattatgctggatgttttatcaacagggggacaactccacaggttgaatgagattctagatatttgtagtggatgtctgaataggccagtttattcttatttgatcaaggcactctgcaaatctggtcatgcaagtgaggctcatagtgtattctgccgtatgtggaattcccatgaaaaaggagaccggtatgcttttgtatcaatgcttgaggcactatgcaatgcagaaaagacaacagaggctattgatctactgcatatgatgcctgaaaaggggattactacagatgttggaatgtataatatgatattttctgctcttgggaagctgaagcaggtgtctttcatgagcagcctctatgatacgatgagagccaatggtgttgttcctgatgttttcacgtacaatattatgatttcaagttttggtagggttggcttagttgataaggcatctgaactttttgaggaaatggaggatggcagttgcaagcctgatgtcgtcacctataattctatgataaattgtcttgggaaaaatggagatctcgatgaagcccacatgcttttcaaagatatgcaagagaaaggatatgatcctgatgtcttcacttacagcatattgattgagtgctttgggaaatccaataaggttgatatggcatgcagcttgtttgatgagatggttgcacaggggtgcattcctaatattgtaacctataacattttactagactgtttagagagacgagggaagacaacagaagctcataaattttatgaaactctgaagcaacagggattgactccagactcgataacttactcaatacttgagagattggaaagtagatctcaacgaacagtaagaatacgtaaaccaagccggaatacaggctgggttataagtccagtgtgataacctaccctggatctttcagttgcatacctccggtgtagtggggctgaggacaaatagtctgtatgcattatgcaaacttgcaagtatattgctggtcaataatgtcagcaagtgactactcaattaccgtgaaaacaatatagtagtcctgactcatcagaattatatgtatataatagtattgcatggctgctgatatttgatatcttggttctgaacaattcgtggaagatggacatcttgagaacaggttaatcagcatcatcatctgtattctacacttgagtcccttccaatgcttgaaaacaag

SEQ ID NO: 41955 - DNA, 2220 bp, Zea Mays
cacgccggcccaaaatgccccgccgcctagctacgacctacgccggccgcatcgccgccgcgacgccgtccccctcgggcccttccatcaccgtcaccgtctcgccgacaccggcccccacccctcttgacacgcgcggatattccctaccgcgccgccacctcatctgcgccgttgcccgaatcctccgctccccggtgtcacacaccccgctgcttgacctcgatgactacctccgctctctccgcctcactctcaccaccgcggaggcttctgaggtcatgaaggcgctcgcccccgacacctctctcgcgctcagcttcttccgcttcgccgccacctccctccccggcttccggcacgatgccttctcctataaccgcatcctggtcctcctcttcagcaaccgcgccgatcccgccgaggccatgcggctcatcgcggagatggagcgcgacggcgtgcccggcaacatctccaccgtgaatttgctggtcgggatgggcgtggaggtggggaggtgcctggacctggcaagtaagtgggggctcaggctgaacgggtacacctacaagtgccttgtgcaggcgcatctgaggagtcgggaggtgtggaaggggttcgaggtatatgagaagatgcggaggaagggctacaagctggacatatttgcatataacatgctgcttaatgcgcttgccaaggctggaatggttgaccaagcttaccaagtctttgaagatatgaaacaaaactactgtgatccagatgcatacacatacactatactaattagaatgtctggaaaggctgggaagaccactaaatttgtctcattgttggaggaaatggtgtccgaaggatgtgttcttaatctgattgcttataatactgttattgaggctcttggtaagaacaagatggttgacgaggcgatttttatgctttctaaaatgattgagagtgactgtcggcccaatcaattcacatatagcattatgctggatgttttatcaacagggggacaactccacaggttgaatgagattctagatatttgtagtggatgtctgaataggccagtttattcttatttgatcaaggcactctgcaaatctggtcatgcaagtgaggctcatagtgtattctgccgtatgtggaattcccatgaaaaaggagaccggtatgcttttgtatcaatgcttgaggcactatgcaatgcagaaaagacaacagaggctattgatctactgcatatgatgcctgaaaaggggattactacagatgttggaatgtataatatgatattttctgctcttgggaagctgaagcaggtgtctttcatgagcagcctctatgatacgatgagagccaatggtgttgttcctgatgttttcacgtacaatattatgatttcaagttttggtagggttggcttagttgataaggcatctgaactttttgaggaaatggaggatggcagttgcaagcctgatgtcgtcacctataattctatgataaattgtcttgggaaaaatggagatctcgatgaagcccacatgcttttcaaagatatgcaagagaaaggatatgatcctgatgtcttcacttacagcatattgattgagtgctttgggaaatccaataaggttgatatggcatgcagcttgtttgatgagatggttgcacaggggtgcattcctaatattgtaacctataacattttactagactgtttagagagacgagggaagacaacagaagctcataaattttatgaaactctgaagcaacagggattgactccagactcgataacttactcaatacttgagagattggaaagtagatctcaacgaacagtaagaatacgtaaaccaagccggaatacaggctgggttataagtccagtgtgataacctaccctggatctttcagttgcatacctccggtgtagtggggctgaggacaaatagtctgtatgcattatgcaaacttgcaagtatattgctggtcaataatgtcagcaagtgactactcaattaccgtgaaaacaatatagtagtcctgactcatcagaattatatgtatataatagtattgcatggctgctgatatttgatatcttggttctgaacaattcgtggaagatggacatcttgagaacagcatcatcatctgtattctacacttgagtcccttccaatgcttgaaaacaag

SEQ ID NO: 41956 - DNA, 2482 bp, Zea Mays
atgaaatagtgttttggtatcgatacggtaaacacggcgcccccgctcgcacgctccttcccactcagcagcagcacgcgctctgctccccacgccagcacgcccgagccccgaatcgagtcccctaccccatcgatccccgccgcccgcctttccccgccgcccgcctttcccctacccagctctcggggaccttctctcccagcccgagatccctccccaccgagatcccgcgccgccatggtgtcgtgacggcggcggaggcggcgtcatggagcgggagcccaagtcccccgacgaccgccctgagcccgctgcggcggcggcgcagccgcagccgcagccgctggagtggcggtttgcgcaggtcttcggcgagcgcgccgcgggagaagatgtgcaagatgtggacataatatctgcaattgagtttgacaaatctgggaatcatcttgctactggagatagaggtggacgtgtggttttgttcgaaagaacagacattgctgataatgcttgtcgaggagaacttgagaggcaagaatatcttgtttctaggcatcctgagttccgttacaagaccgaatttcagagtcatgaacctgagtttgactacctaaaaagtttggaaatagaagagaagattaacaagatcaagtggtgccaaacaaccaacaatgcactctttctcttgtctacaaatgacaaaacaatcaagtattggaaggttcaagagaaaaaggtgaaacgcgtttcagtgatgaatttggacacctcccaaagttcagacaatggttcaacttcaagtccgggtaccagtagttgcagagctcttcttccaaatggtggatgcacaggaaaaatgttacaggccaagaatttactcatgttgcgagaagcagacgtgtatatgcccatgcccatgactaccatattaattccatttcaaataatagcgatggagaaacgttcatatcagcagatgatctgcgaataaacctttggaatttagaaattagcaatcagagctttaacattgttgatgtgaaacctgcaaacatggaggatctaactgaggtgatcacttgtgcggagttccatccaactcactgtaatacactagcatatagtagctcaaagggtactattcggcttattgatctgcgacagtcagcactgtgtgacaaccatgctaaactatttgaggagcatgaagcacctggatcaagatccttttttacagagataatagcatcagtttcagatataaaatttgcaagggatggaagacacattcttagtcgtgattatatgacactcaagttgtgggatctaaacatggattcaggcccagttgcaacttttcaggttcatgaatacttacgtcctaagctttgtgatttatacgagaacgattcaatttttgacaaatttgagtgctgcctcagcggcgatggactccatgttgcaactggttcttatagtaatttgtttcgtgtttttggttgttctcctgaaagcgtggaggcatcaacgttggaagccagcagaaatcccatgaggcgacaggttgctgatccagcaaggcctgcacggactctgaccggtgctgtgaggagaggtggagagaacacaagcgttgacgccagcggaaactcttgcgacctctcaacaaagctgctccatcttgcgtggcacccaactgagaactccatcgcgtgcgctgccgcaaacagcttgtacatgtactacgcataggggaacgtgctagagagaactggtacagtagtgctttttttttgcttgtttgcttgcttgaagtgaaaggcgtggtctttcacacgttcaaggatccaggcgcaggaaactgttgtcggttcgatggctggggagcccccgaaaagcggcagtcggtgattccacaagatcagtcctggcacaagctgacttcctcctcgggattttccttggtggatgtgaagctgaagcatgtgttactggtttattattaccgaagctttttggcacccaaggtatgacgacggctgtagctgcctgccttgtagcgaaattggctgcggaaggataaaaggaagcggtaagaagacagacagacaggtcacaggaatacctgctcacgtatcacaaaggctgtaagatttttccccccttctcttttacgacgtgtaatgcaacctagtcagagctaaccatcagttgtcgtgaactctgatagtttctgtcatagatactgtagattttatctatgcagctgctgttgtattcattagattgttcggataagtgtaccagtgggctgtgatttgctggttgtggccgtgatgtggctacgcggaggaattcgaccgaagttaaatctctttctatttaaaattaaatataaaaggatgtaacccaacaagaaggcctcgcaggttccactcttctaataatgacaacatgaaagcttttgctgacatct

SEQ ID NO: 41957 - DNA, 2564 bp, Zea Mays
atgaaatagtgttttggtatcgatacggtaaacacggcgcccccgctcgcacgctccttcccactcagcagcagcacgcgctctgctccccacgccagcacgcccgagccccgaatcgagtcccctaccccatcgatccccgccgcccgcctttccccgccgcccgcctttcccctacccagctctcggggaccttctctcccagcccgagatccctccccaccgagatcccgcgccgccatggtgtcgtgacggcggcggaggcggcgtcatggagcgggagcccaagtcccccgacgaccgccctgagcccgctgcggcggcggcgcagccgcagccgcagccgctggagtggcggtttgcgcaggtcttcggcgagcgcgccgcgggagaagatgtgcaagatgcctcccattaggagcatagggcacacttaagtgttttcccaggccaagcctgccgggcaaggaagtgcgggggtgcatggtttccttttctgtggacataatatctgcaattgagtttgacaaatctgggaatcatcttgctactggagatagaggtggacgtgtggttttgttcgaaagaacagacattgctgataatgcttgtcgaggagaacttgagaggcaagaatatcttgtttctaggcatcctgagttccgttacaagaccgaatttcagagtcatgaacctgagtttgactacctaaaaagtttggaaatagaagagaagattaacaagatcaagtggtgccaaacaaccaacaatgcactctttctcttgtctacaaatgacaaaacaatcaagtattggaaggttcaagagaaaaaggtgaaacgcgtttcagtgatgaatttggacacctcccaaagttcagacaatggttcaacttcaagtccgggtaccagtagttgcagagctcttcttccaaatggtggatgcacaggaaaaatgtacagtccaaacaacaatatgtcatttcctccaggaggatgcacatcgctgcgtttgcctgtggtggttacaggccaagaatttactcatgttgcgagaagcagacgtgtatatgcccatgcccatgactaccatattaattccatttcaaataatagcgatggagaaacgttcatatcagcagatgatctgcgaataaacctttggaatttagaaattagcaatcagagctttaacattgttgatgtgaaacctgcaaacatggaggatctaactgaggtgatcacttgtgcggagttccatccaactcactgtaatacactagcatatagtagctcaaagggtactattcggcttattgatctgcgacagtcagcactgtgtgacaaccatgctaaactatttgaggagcatgaagcacctggatcaagatccttttttacagagataatagcatcagtttcagatataaaatttgcaagggatggaagacacattcttagtcgtgattatatgacactcaagttgtgggatctaaacatggattcaggcccagttgcaacttttcaggttcatgaatacttacgtcctaagctttgtgatttatacgagaacgattcaatttttgacaaatttgagtgctgcctcagcggcgatggactccatgttgcaactggttcttatagtaatttgtttcgtgtttttggttgttctcctgaaagcgtggaggcatcaacgttggaagccagcagaaatcccatgaggcgacaggttgctgatccagcaaggcctgcacggactctgaccggtgctgtgaggagaggtggagagaacacaagcgttgacgccagcggaaactcttgcgacctctcaacaaagctgctccatcttgcgtggcacccaactgagaactccatcgcgtgcgctgccgcaaacagcttgtacatgtactacgcataggggaacgtgctagagagaactggcgcaggaaactgttgtcggttcgatggctggggagcccccgaaaagcggcagtcggtgattccacaagatcagtcctggcacaagctgacttcctcctcgggattttccttggtggatgtgaagctgaagcatgtgttactggtttattattaccgaagctttttggcacccaaggtatgacgacggctgtagctgcctgccttgtagcgaaattggctgcggaaggataaaaggaagcggtaagaagacagacagacaggtcacaggaatacctgctcacgtatcacaaaggctgtaagatttttccccccttctcttttacgacgtgtaatgcaacctagtcagagctaaccatcagttgtcgtgaactctgatagtttctgtcatagatactgtagattttatctatgcagctgctgttgtattcattagattgttcggataagtgtaccagtgggctgtgatttgctggttgtggccgtgatgtggctacgcggaggaattcgaccgaagttaaatctctttctatttaaaattaaatataaaaggatgtaacccaacaagaaggcctcgcaggttccactcttctaataatgacaacatgaaagcttttgctgacatct

SEQ ID NO: 41958 - DNA, 2436 bp, Zea Mays
atgaaatagtgttttggtatcgatacggtaaacacggcgcccccgctcgcacgctccttcccactcagcagcagcacgcgctctgctccccacgccagcacgcccgagccccgaatcgagtcccctaccccatcgatccccgccgcccgcctttccccgccgcccgcctttcccctacccagctctcggggaccttctctcccagcccgagatccctccccaccgagatcccgcgccgccatggtgtcgtgacggcggcggaggcggcgtcatggagcgggagcccaagtcccccgacgaccgccctgagcccgctgcggcggcggcgcagccgcagccgcagccgctggagtggcggtttgcgcaggtcttcggcgagcgcgccgcgggagaagatgtgcaagatgtggacataatatctgcaattgagtttgacaaatctgggaatcatcttgctactggagatagaggtggacgtgtggttttgttcgaaagaacagacattgctgataatgcttgtcgaggagaacttgagaggcaagaatatcttgtttctaggcatcctgagttccgttacaagaccgaatttcagagtcatgaacctgagtttgactacctaaaaagtttggaaatagaagagaagattaacaagatcaagtggtgccaaacaaccaacaatgcactctttctcttgtctacaaatgacaaaacaatcaagtattggaaggttcaagagaaaaaggtgaaacgcgtttcagtgatgaatttggacacctcccaaagttcagacaatggttcaacttcaagtccgggtaccagtagttgcagagctcttcttccaaatggtggatgcacaggaaaaatgtacagtccaaacaacaatatgtcatttcctccaggaggatgcacatcgctgcgtttgcctgtggtggttacaggccaagaatttactcatgttgcgagaagcagacgtgtatatgcccatgcccatgactaccatattaattccatttcaaataatagcgatggagaaacgttcatatcagcagatgatctgcgaataaacctttggaatttagaaattagcaatcagagctttaacattgttgatgtgaaacctgcaaacatggaggatctaactgaggtgatcacttgtgcggagttccatccaactcactgtaatacactagcatatagtagctcaaagggtactattcggcttattgatctgcgacagtcagcactgtgtgacaaccatgctaaactatttgaggagcatgaagcacctggatcaagatccttttttacagagataatagcatcagtttcagatataaaatttgcaagggatggaagacacattcttagtcgtgattatatgacactcaagttgtgggatctaaacatggattcaggcccagttgcaacttttcaggttcatgaatacttacgtcctaagctttgtgatttatacgagaacgattcaatttttgacaaatttgagtgctgcctcagcggcgatggactccatgttgcaactggttcttatagcgtggaggcatcaacgttggaagccagcagaaatcccatgaggcgacaggttgctgatccagcaaggcctgcacggactctgaccggtgctgtgaggagaggtggagagaacacaagcgttgacgccagcggaaactcttgcgacctctcaacaaagctgctccatcttgcgtggcacccaactgagaactccatcgcgtgcgctgccgcaaacagcttgtacatgtactacgcataggggaacgtgctagagagaactggcgcaggaaactgttgtcggttcgatggctggggagcccccgaaaagcggcagtcggtgattccacaagatcagtcctggcacaagctgacttcctcctcgggattttccttggtggatgtgaagctgaagcatgtgttactggtttattattaccgaagctttttggcacccaaggtatgacgacggctgtagctgcctgccttgtagcgaaattggctgcggaaggataaaaggaagcggtaagaagacagacagacaggtcacaggaatacctgctcacgtatcacaaaggctgtaagatttttccccccttctcttttacgacgtgtaatgcaacctagtcagagctaaccatcagttgtcgtgaactctgatagtttctgtcatagatactgtagattttatctatgcagctgctgttgtattcattagattgttcggataagtgtaccagtgggctgtgatttgctggttgtggccgtgatgtggctacgcggaggaattcgaccgaagttaaatctctttctatttaaaattaaatataaaaggatgtaacccaacaagaaggcctcgcaggttccactcttctaataatgacaacatgaaagcttttgctgacatct

SEQ ID NO: 41959 - DNA, 2829 bp, Zea Mays
atgaaatagtgttttggtatcgatacggtaaacacggcgcccccgctcgcacgctccttcccactcagcagcagcacgcgctctgctccccacgccagcacgcccgagccccgaatcgagtcccctaccccatcgatccccgccgcccgcctttccccgccgcccgcctttcccctacccagctctcggggaccttctctcccagcccgagatccctccccaccgagatcccgcgccgccatggtgtcgtgacggcggcggaggcggcgtcatggagcgggagcccaagtcccccgacgaccgccctgagcccgctgcggcggcggcgcagccgcagccgcagccgctggagtggcggtttgcgcaggtcttcggcgagcgcgccgcgggagaagatgtgcaagatgcctcccattaggagcatagggcacacttaagtgttttcccaggccaagcctgccgggcaaggaagtgcgggggtgcatggtttccttttctggcatcgatcttaaacttgcttcttctttcctcttctttcccgttctgatcaactcatcgctgtgctgcgttactgcctgccggcttctatttagtgtcttgttcatttcacttgatatttgttgtgtcggcttgatttgttcgccagctaaatcagtttgtatcttgatcagtatgctacatgtttcagtggacataatatctgcaattgagtttgacaaatctgggaatcatcttgctactggagatagaggtggacgtgtggttttgttcgaaagaacagacattgctgataatgcttgtcgaggagaacttgagaggcaagaatatcttgtttctaggcatcctgagttccgttacaagaccgaatttcagagtcatgaacctgagtttgactacctaaaaagtttggaaatagaagagaagattaacaagatcaagtggtgccaaacaaccaacaatgcactctttctcttgtctacaaatgacaaaacaatcaagtattggaaggttcaagagaaaaaggtgaaacgcgtttcagtgatgaatttggacacctcccaaagttcagacaatggttcaacttcaagtccgggtaccagtagttgcagagctcttcttccaaatggtggatgcacaggaaaaatgtacagtccaaacaacaatatgtcatttcctccaggaggatgcacatcgctgcgtttgcctgtggtggttacaggccaagaatttactcatgttgcgagaagcagacgtgtatatgcccatgcccatgactaccatattaattccatttcaaataatagcgatggagaaacgttcatatcagcagatgatctgcgaataaacctttggaatttagaaattagcaatcagagctttaacattgttgatgtgaaacctgcaaacatggaggatctaactgaggtgatcacttgtgcggagttccatccaactcactgtaatacactagcatatagtagctcaaagggtactattcggcttattgatctgcgacagtcagcactgtgtgacaaccatgctaaacttttgaggagcatgaagcacctggatcaagatccttttttacagagataatagcatcagtttcagatataaaatttgcaagggatggaagacacattcttagtcgtgattatatgacactcaagttgtgggatctaaacatggattcaggcccagttgcaacttttcaggttcatgaatacttacgtcctaagctttgtgatttatacgagaacgattcaatttttgacaaatttgagtgctgcctcagcggcgatggactccatgttgcaactggttcttatagtaatttgtttcgtgtttttggttgttctcctgaaagcgtggaggcatcaacgttggaagccagcagaaatcccatgaggcgacaggttgctgatccagcaaggcctgcacggactctgaccggtgctgtgaggagaggtggagagaacacaagcgttgacgccagcggaaactcttgcgacctctcaacaaagctgctccatcttgcgtggcacccaactgagaactccatcgcgtgcgctgccgcaaacagcttgtacatgtactacgcataggggaacgtgctagagagaactggtacagtagtgctttttttttgcttgtttgcttgcttgaagtgaaaggcgtggtctttcacacgttcaaggatccaggcgcaggaaactgttgtcggttcgatggctggggagcccccgaaaagcggcagtcggtgattccacaagatcagtcctggcacaagctgacttcctcctcgggattttccttggtggatgtgaagctgaagcatgtgttactggtttattattaccgaagctttttggcacccaaggtatgacgacggctgtagctgcctgccttgtagcgaaattggctgcggaaggataaaaggaagcggtaagaagacagacagacaggtcacaggaatacctgctcacgtatcacaaaggctgtaagatttttccccccttctcttttacgacgtgtaatgcaacctagtcagagctaaccatcagttgtcgtgaactctgatagtttctgtcatagatactgtagattttatctatgcagctgctgttgtattcattagattgttcggataagtgtaccagtgggctgtgatttgctggttgtggccgtgatgtggctacgcggaggaattcgaccgaagttaaatctctttctatttaaaattaaatataaaaggatgtaacccaacaagaaggcctcgcaggttccactcttctaataatgacaacatgaaagcttttgctgacatct

SEQ ID NO: 41960 - DNA, 1518 bp, Zea Mays
cgaaaaccttgtggctcctatggcgcctggggtatgcctcaactccttggcgacggctcaaaaaccatgcgatggagaaacgttcatatcagcagatgatctgcgaataaacctttggaatttagaaattagcaatcagagctttaacattgttgatgtgaaacctgcaaacatggaggatctaactgaggtgatcacttgtgcggagttccatccaactcactgtaatacactagcatatagtagctcaaagggtactattcggcttattgatctgcgacagtcagcactgtgtgacaaccatgctaaactatttgaggagcatgaagcacctggatcaagatccttttttacagagataatagcatcagtttcagatataaaatttgcaagggatggaagacacattcttagtcgtgattatatgacactcaagttgtgggatctaaacatggattcaggcccagttgcaacttttcaggttcatgaatacttacgtcctaagctttgtgatttatacgagaacgattcaatttttgacaaatttgagtgctgcctcagcggcgatggactccatgttgcaactggttcttatagtaatttgtttcgtgtttttggttgttctcctgaaagcgtggaggcatcaacgttggaagccagcagaaatcccatgaggcgacaggttgctgatccagcaaggcctgcacggactctgaccggtgctgtgaggagaggtggagagaacacaagcgttgacgccagcggaaactcttgcgacctctcaacaaagctgctccatcttgcgtggcacccaactgagaactccatcgcgtgcgctgccgcaaacagcttgtacatgtactacgcataggggaacgtgctagagagaactggcgcaggaaactgttgtcggttcgatggctggggagcccccgaaaagcggcagtcggtgattccacaagatcagtcctggcacaagctgacttcctcctcgggattttccttggtggatgtgaagctgaagcatgtgttactggtttattattaccgaagctttttggcacccaaggtatgacgacggctgtagctgcctgccttgtagcgaaattggctgcggaaggataaaaggaagcggtaagaagacagacagacaggtcacaggaatacctgctcacgtatcacaaaggctgtaagatttttccccccttctcttttacgacgtgtaatgcaacctagtcagagctaaccatcagttgtcgtgaactctgatagtttctgtcatagatactgtagattttatctatgcagctgctgttgtattcattagattgttcggataagtgtaccagtgggctgtgatttgctggttgtggccgtgatgtggctacgcggaggaattcgaccgaagttaaatctctttctatttaaaattaaatataaaaggatgtaacccaacaagaaggcctcgcaggttccactcttctaataatgacaacatgaaagcttttgctgacatct

SEQ ID NO: 41961 - DNA, 1814 bp, Zea Mays
cttgtttcgccaaatggcaatcagaatatgccaagtttgacttttcaaaaattaaatacgcggtggtgtacctctaagtctctaaccggagggagtaacatttatatcgacaaaaaaggtacttgagcggagctggtaacaaggctccgcttcacgtggtaacctctttcatgtccccacagagtacagatggcgttcccgccagcgatttgcgtcctccgacgccatgtcatgcatggtcagctgatcactgataactatgagtagtcaaatctgagaaattaccccgcctttttttctctcctcatctccttgttccaaaaaaacaccagatcttcttaattaacactatgttacagcacttaattacactcccggtacactaacaaccgccgttgcggcacatcagtagagcaagagcgacggacggcagggcgcgacgagggctacgccggcgggcttgtcgccggatcaagctccgtccgccgtctggcactagcacagtagcactagcggctagcggccgccttcgccttgggcgcggcggcgacgctggtggcccagtcctggtcccgcaggaagaggcaggcggcggagcagtcgtcgacgcgggacgccgggtacctggtccgccagcgctgcgccgcggcctgggcgacggccttggaggcgtgctgcttccttggcgtggcgcagacgatggacaccacctcctggttgctgagcacgtcccacacgccgtccgtggccaggacgaggaacaggtcccccggcgcgacgcggcggtgcgccacctccggctccgacaccacgccgtgccgcttgaggcggtggtcgcccagcgaccgcgccatggccaggcccgggcagtcctcgtcgggcagccacacgcgaggcaccgacgcctcgtccttgagcgcgaacacgcgcccgttgcagcgcttgatgcgctcagcctcctctgcgacaccgacacacacacggtagcccgtctccgacacggtcgccagcacggccctggagtcgccgaggttggcgacgacgaggtcctccccctgcttgatggcgcacacggccgtggtgccgctgaagtcgcagtccaccttagcctggaccccgagctccctgtccatggcctcgaacgcgttggcgcaggcctcccgccactcctccagcatctgcgccggcgccggcgacgaccgctcgctgcggctgccgtccgtggacgacgacgccgcgggcgatgcgtcgctgaaggccgggccgtcgccgtcgtcgtcggagcccaggagcagcgcgttccgctggctcaggatcatgaaggggaggtggtccctcgccagcttgctgaccagctgcccgcagcggccgtgcccgtcgaacacgccgcagaacacaccgtcctccatgccgaatccctggcagaggatgacggcgtcctggttgggccccttcttgcccttctgcgagaagagggaggcggccaccgtccgctcccacgccgcgccacggccgtcccctccccatccccctccaccgccgccgccctgcccgtccatcaccacgtacaccacgttctcgtccgagtcctcctcctcctgctccacgcgcttggacgacgcgcagatccccatagcaaagcaaccgagagcagacgccccgccactggctggctggctggctcaactcaggcaaccgtctccccttcgccttcttggcgggagaacagagctaagcaacggaagcggtggcggcagacgcgctcgagcttgctcacaatgatggcggcgaatcgcacaggggtggtttggtgg

SEQ ID NO: 41962 - DNA, 2452 bp, Zea Mays
attccgttcattcattcatatatcgaatgcgcagacagcaatttcgatcgcaactggccgagactgctcaatcactgggaaaggctggtgtggatctctcggacggacacaccacattgcctgaaccagtgcgtcgctgcggtcaattcgactctcgtcctcccgacgcgatttgtcactgtcgcagtcgtgccgcagatgctattgatttgctgtccattgccagacccagttttccatgagagaatgatgcgatcctcctcgccctctataaaaattggcacgagaagcatcggttgggcaccgcaccggcaccaccaagactctaggcgcagcagctcctccacgcttcgctgccgggtcaagctcctctcatggagatcacggccagctgcgacgacggcgcggtcacagctggcgccgtttctggtctgctgctcgcgtctgttctgtctctgttcggcgcgtttctggtatacttctacgcgccgttctggagcgtgaggagagtcccggggcctccagccaggttcccaatcggccacctccatcttcttgccaggaacgggccagacgtcttccgtgcgattgcgaaagagtatggcccaatcttcaggtttcacatgggaaggcaaccactggtgatcgtggccaatgccgagctgtgcaaggaggtcggcatcaagaagttcaaggacatccccaaccggagcaccccgccgccgtcgatcggttccctgcaccaggacgccctcttcctcaccaggtgcacgcactggtccatccttctagggactcgacgtggtcggcgatgaggagcacggtggttccgctctaccagccagcgcggcttgccgggctcattccggtgatgcagtcgtacgtcgacacactggcggcgaacatcgccgcctgcccggaccaggactgcgtccccttctgccagctctcgctccggatggccatcgacatcatcggcaggacggccttcggcatcgagttcggcctgtccaagaacgccgcaggcacaggcagcagcagcagcgagtccccaggcggcggcgagggcgagggcgacgtcagggaattcctcagggagtacaagcggtccatggagttcgtcaagatggacctgacgagctctctgtccaccatcctcggcctcttcctcccgtgcgtccagacgccgtgcaagcgcctgctgcggcgggtgcccggcacggcggactacaagatggaccagaacgagcgccgcctctgctcccgcatcgacgccatcatagccggccgccggcgggaccgggccacgcgccggcgttgcggccccggcgccgcccccgcccccgccccgctggacttcatcgcggcgctgctggatgcgatggagagcgggcggcggcggcggcggcggtgcaggtgccaacaaggacttcgcgctggcggacaggcacgtgcgcgcgctggcgtacgagcacctcatcgccggcaccaagaccacggcgttcacgctgtcgtcggtggtgtacctggtctcgtgccacccgctcgtggaggccaagctgctgcgggagttggacggcttcgcgccgcgccgcgggcgcgggcgcgcgccggacgccgacgagctccagagcgggttcccctacctcgaccaggtcatcaaggaggccatgcggttttacgtcgtctcgccgctcatcgccaggcagacctccgagcgcgtggagatcgggggctacgttctccccaagggcgcgtacgtttggctggcgccgggtgtgctggcccgggacgcggcgcagttcccggacccggaggagttccggccggagcggttcgcgccggaggcggaggaggagcgggcgcgccacccgtacgcgcacatccccttcggcgtcgggcccagggcgtgcatcgggcacaagttcgcgctgcaacaggtgaagcttgccgtggtggagctctaccgccggtacgtgttccgacactcgccgtccatggagtcgcccatccagttcgactttgacctcgtccttgccttccgccacggcgtcaagctcagggccatcaggaggggctgaggctgcctagcttggggtcacgtgtgtgtggaactgcatccgtgacgtgatggtgccacagcgtgtcttcttgtgtgtaatatagcactaataagcatatattgagtatgtatatatagaaatagatggtgaagaagattgcacgtattggacagctggcaaatgtgttgcagatactccctctgtttcgttttagttgtcgctggatagtgcaaaattgaactatccagcgacaactaaaaagaaacggagggagtacaacttcagtagaagaacgtacgcgtgtgttgtcctggactaaacatgaatctgacatatttctcgagattttgcacaatctttacaaactagtgtattgcacgcgcccaagc

SEQ ID NO: 41963 - DNA, 1923 bp, Zea Mays
tcgaaccgaacctcgccgccgccgactcctcttccgtctctctctctcatctagtccctgtctccttccctctaaacccgcacccgcagcagcgccgctagggtttgctcaggccccgaaccccacccttggattgctctgattccgtggcggctgtttcccgaagtttgcagtatggcggggtacccggaggacaaccagcacgagttgaacgggtacgacgaggaggtcgacgaagaggagggacaccccgggaggcgggtaggccgggatgggggctctggaaagatttttgtcggaggcgttgcttgggagactactgaagaatcattctccaagcattttgagaagtatggggcaataactgattctgtaattatgaaggacaagcatactaagatgcctcgtggatttggatttgttacattttctgatccatctgttatagacaaggttttggaggatgatcacgttatagatggcagaacggttgaagttaagaggactgtcccgagggaagagatgatcaccaaagacggccctaagacaagaaagatcttcatcggtgggctaccgccatctcttactgaaggttgaaataaagaaggctgaaccaaagaaacatggatctgaccacagcagtaatgggagatcaaaccacggaggtggagcttaccgcaattcttaccgtagtggtggtggagctggtagtggcagcagtggaggcggcggtggttatgggtatggtggtgcttatcgatctgctgcagcaggttatggatatgatggtggcgcaggagcaggatatggctatggtagagggtatggctatggaggcaatgctggctttgggtctagttttggtggtggttatggtggatccatgtatggaggtgctgcctatggtgcatatggtgcctatggtggtggcgcctatggaggaggtgcctacggaggcggtgcctatggaggtggtgctgcctatggtggcgccccaggtggttatggcactggcggatacggcagttatggcggagcaggcagtactggtggtgggagcacaggtgctcggggttctagcaggtatcatccatacggaaaataagcgacgagtttaaactatttttctgggtctcaggtgttcctcttctcctagaagttcagatttcatggcatgtccatctaaacagtgggcattggaacgtagttgggtctaattaagtcaccgtgagaactgtgtaattgctgcagctgagcctccctgcctgccttgtttgcagtacaagctacacataaaacctgtgttgtattctttagtttggtatatgcagagtttagaaccctgagatcgagcattttatggtaggaacagtatttggtgcggtagaactatattccgtgctctaacattgccattgcaagattaactgttgccacatgtggtgattacaactagggacccattagaggatttggttacattttatgacttgatttacattctacaaatggaaatgaactcagggatgcgacctgggctatggcgtaaatattagagtgttgagatgtctgcattcatatttgcagttttgtgcatgagaatttgtactctgctaacttcaacgattactgcttatattctctttttatcatcagtatattattcttgcttttcttttcgaagcaattttctcttatcctcgtttgttccttcctttactttagataaatactcgaaaatccccttacaattgcaaaaaattgcaattggtactcaaaatactttacggcttattcggttatttttaatctatatggattggaggggattgatatggtttaggagggattttgacttgctagggattaaaaccccctcaatccatatagattggggtagaactgaacaacatacaagaaata

SEQ ID NO: 41964 - DNA, 2024 bp, Zea Mays
tcgaaccgaacctcgccgccgccgactcctcttccgtctctctctctcatctagtccctgtctccttccctctaaacccgcacccgcagcagcgccgctagggtttgctcaggccccgaaccccacccttggattgctctgattccgtggcggctgtttcccgaagtttgcagtatggcggggtacccggaggacaaccagcacgagttgaacggaaagatttttgtcggaggcgttgcttgggagactactgaagaatcattctccaagcattttgagaagtatggggcaataactgattctgtaattatgaaggacaagcatactaagatgcctcgtggatttggatttgttacattttctgatccatctgttatagacaaggttttggaggatgatcacgttatagatggcagaacggttgaagttaagaggactgtcccgagggaagagatgatcaccaaagacggccctaagacaagaaagatcttcatcggtgggctaccgccatctcttactgaagatgaattgaaggatcacttttcatcatatggtaatgtggttgaacatcagataatgcttgatcatagcactgggcgttctagagggtttggttttatcacatttgaaagtgaagattctgttgaaagggtcatatcagaggggagaatgcgtgatcttggtgggaagcaggttgaaataaagaaggctgaaccaaagaaacatggatctgaccacagcagtaatgggagatcaaaccacggaggtggagcttaccgcaattcttaccgtagtggtggtggagctggtagtggcagcagtggaggcggcggtggttatgggtatggtggtgcttatcgatctgctgcagcaggttatggatatgatggtggcgcaggagcaggatatggctatggtagagggtatggctatggaggcaatgctggctttgggtctagttttggtggtggttatggtggatccatgtatggaggtgctgcctatggtgcatatggtgcctatggtggtggcgcctatggaggaggtgcctacggaggcggtgcctatggaggtggtgctgcctatggtggcgccccaggtggttatggcactggcggatacggcagttatggcggagcaggcagtactggtggtgggagcacaggtgctcggggttctagcaggtatcatccatacggaaaataagcgacgagtttaaactatttttctgggtctcaggtgttcctcttctcctagaagttcagatttcatggcatgtccatctaaacagtgggcattggaacgtagttgggtctaattaagtcaccgtgagaactgtgtaattgctgcagctgagcctccctgcctgccttgtttgcagtacaagctacacataaaacctgtgttgtattctttagtttggtatatgcagagtttagaaccctgagatcgagcattttatggtaggaacagtatttggtgcggtagaactatattccgtgctctaacattgccattgcaagattaactgttgccacatgtggtgattacaactagggacccattagaggatttggttacattttatgacttgatttacattctacaaatggaaatgaactcagggatgcgacctgggctatggcgtaaatattagagtgttgagatgtctgcattcatatttgcagttttgtgcatgagaatttgtactctgctaacttcaacgattactgcttatattctctttttatcatcagtatattattcttgcttttcttttcgaagcaattttctcttatcctcgtttgttccttcctttactttagataaatactcgaaaatccccttacaattgcaaaaaattgcaattggtactcaaaatactttacggcttattcggttatttttaatctatatggattggaggggattgatatggtttaggagggattttgacttgctagggattaaaaccccctcaatccatatagattggggtagaactgaacaacatacaagaaata

SEQ ID NO: 41965 - DNA, 1929 bp, Zea Mays
tcgaaccgaacctcgccgccgccgactcctcttccgtctctctctctcatctagtccctgtctccttccctctaaacccgcacccgcagcagcgccgctagggtttgctcaggccccgaaccccacccttggattgctctgattccgtggcggctgtttcccgaagtttgcagtatggcggggtacccggaggacaaccagcacgagttgaacgggtacgacgaggaggtcgacgaagaggagggacaccccgggaggcgggtaggccgggatgggggctctggaaagatttttgtcggaggcgttgcttgggagactactgaaggttgaagttaagaggactgtcccgagggaagagatgatcaccaaagacggccctaagacaagaaagatcttcatcggtgggctaccgccatctcttactgaagatgaattgaaggatcacttttcatcatatggtaatgtggttgaacatcagataatgcttgatcatagcactgggcgttctagagggtttggttttatcacatttgaaagtgaagattctgttgaaagggtcatatcagaggggagaatgcgtgatcttggtgggaagcaggttgaaataaagaaggctgaaccaaagaaacatggatctgaccacagcagtaatgggagatcaaaccacggaggtggagcttaccgcaattcttaccgtagtggtggtggagctggtagtggcagcagtggaggcggcggtggttatgggtatggtggtgcttatcgatctgctgcagcaggttatggatatgatggtggcgcaggagcaggatatggctatggtagagggtatggctatggaggcaatgctggctttgggtctagttttggtggtggttatggtggatccatgtatggaggtgctgcctatggtgcatatggtgcctatggtggtggcgcctatggaggaggtgcctacggaggcggtgcctatggaggtggtgctgcctatggtggcgccccaggtggttatggcactggcggatacggcagttatggcggagcaggcagtactggtggtgggagcacaggtgctcggggttctagcaggtatcatccatacggaaaataagcgacgagtttaaactatttttctgggtctcaggtgttcctcttctcctagaagttcagatttcatggcatgtccatctaaacagtgggcattggaacgtagttgggtctaattaagtcaccgtgagaactgtgtaattgctgcagctgagcctccctgcctgccttgtttgcagtacaagctacacataaaacctgtgttgtattctttagtttggtatatgcagagtttagaaccctgagatcgagcattttatggtaggaacagtatttggtgcggtagaactatattccgtgctctaacattgccattgcaagattaactgttgccacatgtggtgattacaactagggacccattagaggatttggttacattttatgacttgatttacattctacaaatggaaatgaactcagggatgcgacctgggctatggcgtaaatattagagtgttgagatgtctgcattcatatttgcagttttgtgcatgagaatttgtactctgctaacttcaacgattactgcttatattctctttttatcatcagtatattattcttgcttttcttttcgaagcaattttctcttatcctcgtttgttccttcctttactttagataaatactcgaaaatccccttacaattgcaaaaaattgcaattggtactcaaaatactttacggcttattcggttatttttaatctatatggattggaggggattgatatggtttaggagggattttgacttgctagggattaaaaccccctcaatccatatagattggggtagaactgaacaacatacaagaaata

SEQ ID NO: 41966 - DNA, 1906 bp, Zea Mays
tcgaaccgaacctcgccgccgccgactcctcttccgtctctctctctcatctagtccctgtctccttccctctaaacccgcacccgcagcagcgccgctagggtttgctcaggccccgaaccccacccttggattgctctgattccgtgtttgcagtatggcggggtacccggaggacaaccagcacgagttgaacgggtacgacgaggaggtcgacgaagaggagggacaccccgggaggcgggtaggccgggatgggggctctggaaagatttttgtcggaggcgttgcttgggagactactgaagaatcattctccaagcattttgagaagtatggggcaataactgattctgtaattatgaaggacaagcatactaagatgcctcgtggatttggatttgttacattttctgatccatctgttatagacaaggttttggaggatgatcacgttatagatggcagaacggttgaagttaagaggactgtcccgagggaagagatgatcaccaaagacggccctaagacaagaaagatcttcatcggtgggctaccgccatctcttactgaaggttgaaataaagaaggctgaaccaaagaaacatggatctgaccacagcagtaatgggagatcaaaccacggaggtggagcttaccgcaattcttaccgtagtggtggtggagctggtagtggcagcagtggaggcggcggtggttatgggtatggtggtgcttatcgatctgctgcagcaggttatggatatgatggtggcgcaggagcaggatatggctatggtagagggtatggctatggaggcaatgctggctttgggtctagttttggtggtggttatggtggatccatgtatggaggtgctgcctatggtgcatatggtgcctatggtggtggcgcctatggaggaggtgcctacggaggcggtgcctatggaggtggtgctgcctatggtggcgccccaggtggttatggcactggcggatacggcagttatggcggagcaggcagtactggtggtgggagcacaggtgctcggggttctagcaggtatcatccatacggaaaataagcgacgagtttaaactatttttctgggtctcaggtgttcctcttctcctagaagttcagatttcatggcatgtccatctaaacagtgggcattggaacgtagttgggtctaattaagtcaccgtgagaactgtgtaattgctgcagctgagcctccctgcctgccttgtttgcagtacaagctacacataaaacctgtgttgtattctttagtttggtatatgcagagtttagaaccctgagatcgagcattttatggtaggaacagtatttggtgcggtagaactatattccgtgctctaacattgccattgcaagattaactgttgccacatgtggtgattacaactagggacccattagaggatttggttacattttatgacttgatttacattctacaaatggaaatgaactcagggatgcgacctgggctatggcgtaaatattagagtgttgagatgtctgcattcatatttgcagttttgtgcatgagaatttgtactctgctaacttcaacgattactgcttatattctctttttatcatcagtatattattcttgcttttcttttcgaagcaattttctcttatcctcgtttgttccttcctttactttagataaatactcgaaaatccccttacaattgcaaaaaattgcaattggtactcaaaatactttacggcttattcggttatttttaatctatatggattggaggggattgatatggtttaggagggattttgacttgctagggattaaaaccccctcaatccatatagattggggtagaactgaacaacatacaagaaata

SEQ ID NO: 41967 - DNA, 3529 bp, Zea Mays
atgaaatcttttcctataatattatagcacatttatacatgagttatcatggtattttatcttcccgttgcaatgcacgggcatccacctagtaatagaataaacaataaacgcaatgagagagcaaggtattggtgctccctgtcggctgtcttcgccgctgcgtgtaccttcctcttccagccgcgtcgaacccgagcgcgaagcatccacgacgacgcccccaacagaatacaaaaataataataaaaaaacccacaggtcacgaatggataggtagatcgctcgaagcgattgaaaaatctgcctccgacaattcctagcgcgattcagcagctgcctcggatcggatcggatcggattggaccggcgccggaagaggagaggaggcgtgggggggttcggggcctgcctcgctgccgcccatgtcccgcatgaaacacctgctacgcaagctccacctcgccgggggccccgccggggccggggccgggggcgcggcgcccgaccaccaccgctcgaggcaccgccgctcggggcatccgacgccgccgccgccgggggcggcggtagcggcccccgagccgccgcaaccggcggttactcctgccgcggctgtgtcgatcgcccccgcggtggaggagcctagaggcctcgaggcggaggcggccacgacgcggctggaagaggactaccaggtgcgcctcgcgctcgccatctccgcgtccgaccacgcggggctcgtcgacgcggactccgtccagatccgcgcggcagagctcatcagcctcggggccggcgcggggtccggacacgaccggagccccgcggaggccctctccgcgaggtactggaaccacagcgtagtcaactacgacgagcagctccccgatggcttctacgacgtctgtggcgcgcagctgcatcccggattccaggccaaattcccctcgctcgaatacctcagggctgtcccgcttgggcgtgatgccccgttcctggccattttggtggatcgggagcacgaccctgccctaaaacgactggaagatagggctgcacagattgctgcgcagactagggcaggacatggtggtgctgcttcagctgagcttgcgcagaagattgtgggtctcattgttaatgcgatgggcggtctggttgaggatgctgatggtatgaacagggagtggagcatcaagagccacgagctctctctccagctaaacagtgtcgttcttccacttggctcgcttcgggttgggctgtcgcggcacagatcactgctatttaaggtacttgctgaccgagttaacctaccatgtaagcttctgaaaggaatatgttataccgggacagatgaaggagctgttaacttggtcaaagttgattttgacagcatggaatatattattgatttgatgggagctccaggcaccttaatcccttcagacatttctgggagtcagtttcaggactccaacaatagccaattgagcagtgatgccattgaagagagtgtagcagaattgtgcttagcccttgagcagattaatggtggatatgagaacaaaaatactattggaggatgctcatctggtcacagttctattttagcgctcacgagttcacacctgggagatttatctcagacagaacttaaacaaaatgttgtttctgagaaaaaaaatgatggggatatttctgagcatgttaaggtcgatgatgtttccaagtatattgtgcctgaagtagtggacccacagtttgcacaaaatttgcatgacttacttttggagagtggtgcattgctaccctcggatttattatctgatcaaaataatcatgacattcacgagaaagagagtacaggatggttattagttgctcaaacaacacaaaatttgccaaatgcttttgtagctaaagattcgtcatcgcctgatgaagatgaacaaccccgtgcagaaaatacagaagcagccatcagagatttggatttgcatggtcatactgctagtgttatttccaatgaggatcaaatggttgctggttctttggtgaacatgtcaggaagtagcaatggaaatttggacacgttgagttggtctagtgtaaaaacgatcagctctgttatagatgatatcgctgaatacgaaataccatgggaagatcttgatattggagaacgtattggtttaggatcatttggggaagtttatcgtgcagactggaatggcacggaggttgcagtgaagaaatttcttgaccaggatttatcaggtgtttcactagagcaatttaaatgtgaagtgagaatcatgtcaaggctaaggcatcccaatgttgttcttttcttgggatatgtgacacaatcgcctaatctctctatattaactgagtacctcccaagggggagcctatatcgtctgttgcataggccaaatagtcgaattgatgaagtacggaggctaaaaatggcattcgatgtggcaaaagggatgaactacctgcactctagccatcctaccattgttcaccgtgacctgaaatcccccaatcttttagtggataaaaattgggttgttaaggtgtctgactttggcatgtccaggttgaaacatcatacttttctttcctctaagtcaactgctggaacaccagagtggatggcacctgaggtactacgaaatgaaccatctaatgagaagtgtgatgtctacagctttggagtaatcctgtgggaactagcaactatgcgtgtgccatggagtgggttgaatccaatgcaagttgtaggagcagttggattccagaacaggcgactagagatccccaaggatgtggatccacaggtggctagcataatatcttcatgttgggatagcgatccgagcaaaaggccgtcgttctcccagctcttgtcccctctaaagcaactacaacatttagttgttacagaaagctgctgacatgcgtttcctgggacaaatctcaggatacatatattcaagtatttaagctctgttacagggctaaaattttcttttttgaagctcgtggaggagtctctgcggtatagatgtgtttgggcgaaggttctgcacatcagtaatcatcaccttgtgaaaatgcgagtctctgaagccgtgcaaaggcgctgctggagaaagcgtagtgtgtagtctcaagtgaagaaaagtggtgcgacacaaagtgttctgtgccatggtaaataattgttcagttctggatttgaacgggtgataaattcaccacaaagataggatcttgaagttttttccccttgccttacaaaagatggaaagtgaagtgaaaaaaaattcacggtgtctgcaaaaagtcgcagcccgatgccacgtgaaaatgtatatgatgtaatacagttgctttggaaaggcaaacataaagttcacagttttgttcgataatggtgtgtttggttttccttcttaagaaaagaattgatatttatctcataagctaataaagctaaattggaggaatc

SEQ ID NO: 41968 - DNA, 5362 bp, Zea Mays
aaacaataaacgcaatgagagagcaaggtattggtgctccctgtcggctgtcttcgccgctgcgtgtaccttcctcttccagccgcgtcgaacccgagcgcgaagcatccacgacgacgcccccaacagaatacaaaaataataataaaaaaacccacaggtcacgaatggataggtagatcgctcgaagcgattgaaaaatctgcctccgacaattcctagcgcgattcagcagctgcctcggatcggatcggatcggattggaccggcgccggaagaggagaggaggcgtgggggggttcggggcctgcctcgctgccgcccatgtcccgcatgaaacacctgctacgcaagctccacctcgccgggggccccgccggggccggggccgggggcgcggcgcccgaccaccaccgctcgaggcaccgccgctcggggcatccgacgccgccgccgccgggggcggcggtagcggcccccgagccgccgcaaccggcggttactcctgccgcggctgtgtcgatcgcccccgcggtggaggagcctagaggcctcgaggcggaggcggccacgacgcggctggaagaggactaccaggtgcgcctcgcgctcgccatctccgcgtccgaccacgcggggctcgtcgacgcggactccgtccagatccgcgcggcagagctcatcagcctcggggccggcgcggggtccggacacgaccggagccccgcggaggccctctccgcgaggtactggaaccacagcgtagtcaactacgacgagcagctccccgatggcttctacgacgtctgtggcgcgcagctgcatcccggattccaggccaaattcccctcgctcgaatacctcagggctgtcccgcttgggcgtgatgccccgttcctggccattttggtggatcgggagcacgaccctgccctaaaacgactggaagatagggctgcacagattgctgcgcagactagggcaggacatggtggtgctgcttcagctgagcttgcgcagaagattgtgggtctcattgttaatgcgatgggcggtctggttgaggatgctgatggtatgaacagggagtggagcatcaagagccacgagctctctctccagctaaacagtgtcgttcttccacttggctcgcttcgggttgggctgtcgcggcacagatcactgctatttaaggtacttgctgaccgagttaacctaccatgtaagcttctgaaaggaatatgttataccgggacagatgaaggagctgttaacttggtcaaagttgattttgacagcatggaatatattattgatttgatgggagctccaggcaccttaatcccttcagacatttctgggagtcagtttcaggactccaacaatagccaattgagcagtgatgccattgaagagagtgtagcagaattgtgcttagcccttgagcagattaatggtggatatgagaacaaaaatactattggaggatgctcatctggtcacagttctattttagcgctcacgagttcacacctgggagatttatctcagacagaacttaaacaaaatgttgtttctgagaaaaaaaatgatggggatatttctgagcatgttaaggtcgatgatgtttccaagtatattgtgcctgaagtagtggacccacagtttgcacaaaatttgcatgacttacttttggagagtggtgcattgctaccctcggatttattatctgatcaaaataatcatgacattcacgagaaagagagtacaggatggttattagttgctcaaacaacacaaaatttgccaaatgcttttgtagctaaagattcgtcatcgcctgatgaagatgaacaaccccgtgcagaaaatacagaagcagccatcagagatttggatttgcatggtcatactgctagtgttatttccaatgaggatcaaatggttgctggttctttggtgaacatgtcaggaagtagcaatggaaatttggacacgttgagttggtctagtgtaaaaacgatcagctctgttatagatgatatcgctgaatacgaaataccatgggaagatcttgatattggagaacgtattggtttaggatcatttggggaagtttatcgtgcagactggaatggcacggaggttgcagtgaagaaatttcttgaccaggatttatcaggtgtttcactagagcaatttaaatgtgaagtgagaatcatgtcaaggctaaggcatcccaatgttgttcttttcttgggatatgtgacacaatcgcctaatctctctatattaactgagtacctcccaagggggagcctatatcgtctgttgcataggccaaatagtcgaattgatgaagtacggaggctaaaaatggcattcgatgtggcaaaagggatgaactacctgcactctagccatcctaccattgttcaccgtgacctgaaatcccccaatcttttagtggataaaaattgggttgttaaggtgtctgactttggcatgtccaggttgaaacatcatacttttctttcctctaagtcaactgctggaacagtaatacccctcacccgttaatgtttttatttgttcatattgattgttttattgtttgaaatgccagtcctaatcacaaataagtggtactctggaactttgaagaacaactttgattattactattttgttgcaaagtagttataaagcttagcaaaaatgtactttaataaaactcttctgagacaaatctgcttgtgtcattttcaaatatccaaacccaatacataaaagttcatttatccaaatccaaaacttcacttatttatgagtagagggaggataaacatagaatatactacagctaacagctagaacactgacctcgtacacgttcaccaaatgaaagaggtgttaagcgatacaggatagaataacacaaacgcaacccacttagataaacttaagaaaaaagatgagagagtgtagttggcattcatgatggtggatcctggttatactatactcttgtccgctaaattgccaactgaaacatgacacatgttctacataaaagtacatctttgttttgaagatcattagagtacgtattttggaattggctaggaagggatactgaattcttttgtagagcattagagtacttgtcttgagataggctgggaagggagacatcattattttgtagagcattggagtactcattttggaataggtttggaatggcaatatagtgctagttcaaaacacatcatttcagcatgcaatctaaaatgcacttgatctaggtctaatgcatgactacaaaaaatgaccatcttttgcaaatagcaaagctatcttgagattaaattgatttctggttgcatagggacacagatccgcacaagtaaaatatttcccatagttccatttcttaggtagctgcataatgcactatgtagaccctgtttggatcagctagagtttgtgtattgtggctttaaaagctctagctggtcctgttagacatatatgtgtttatatatgcgtgtatatagctggactgggccctgggccgtgcgcctcctgccctcctatagcctgctgaccttctctgttggttatcgataggaataggggagatcttgattggttatgtttctatataccatgattaaataatctactatttccgtgcaacacctattgctttcatggtatcatgagttttgggttaatatatatgtgtgtacatagcgtggctgggcctgtgctgtgcacctcctatttcttgttgggttatgtttctatcagcagaggccttctcctctgttgctgttgattatggataggaataagggaggagatcttgttgggttatgtttctataaacccaagatctgctccggactatgtatacatgtacgcctgtaccttgattaatcaatctactatttccacgcattacacaatccctattactttcaggttcaaacgggccagcttgtggaagcagcttttaatccacgagccatagttatccaagcagcttttaacagttttagtccagactgtgacaatcccagaatccatcttctcctaacttctttcagcttttaacaatccacaatttactagccagatttttgaagtcttcagcttgtccaacgggacttaaatgttagcataattatttcatgcatctatgtttaacttcaaacccctgcttttgtttgatggaaaaacaggcatatgcatagacattggttccagattttgttggtggtgccctatgtttttttttctcgaaagcgcaggggaactgcgcatttaattatattaagaagaggagaaacataatacatagtacatggtggtgccctatgttgtacaagaatactgccttctgttctttttctcgttctgcattgcatttttctataaatatacctattatcacatctttacgaaacatttcttgttgcttgcagccagagtggatggcacctgaggtactacgaaatgaaccatctaatgagaagtgtgatgtctacagctttggagtaatcctgtgggaactagcaactatgcgtgtgccatggagtgggttgaatccaatgcaagttgtaggagcagttggattccagaacaggcgactagagatccccaaggatgtggatccacaggtggctagcataatatcttcatgttgggatagcgatccgagcaaaaggccgtcgttctcccagctcttgtcccctctaaagcaactacaacatttagttgttacagaaagctgctgacatgcgtttcctgggacaaatctcaggatacatatattcaagtatttaagctctgttacagggctaaaattttcttttttgaagctcgtggaggagtctctgcggtatagatgtgtttgggcgaaggttctgcacatcagtaatcatcaccttgtgaaaatgcgagtctctgaagccgtgcaaaggcgctgctggagaaagcgtagtgtgtagtctcaagtgaagaaaagtggtgcgacacaaagtgttctgtgccatggtaaataattgttcagttctggatttgaacgggtgataaattcaccacaaagataggatcttgaagttttttccccttgccttacaaaagatggaaagtgaagtgaaaaaaaattcacggtgtctgcaaaaagtcgcagcccgatgccacgtgaaaatgtatatgatgtaatacagttgctttggaaaggcaaacataaagttcacagttttgttcgataatggtgtgtttggttttccttcttaagaaaagaattgatatttatctcataagctaataaagctaaattggaggaatc

SEQ ID NO: 41969 - DNA, 3485 bp, Zea Mays
ccttcctcttccagccgcgtcgaacccgagcgcgaagcatccacgacgacgcccccaacagaatacaaaaataataataaaaaaacccacaggtcacgaatggataggtagatcgctcgaagcgattgaaaaatctgcctccgacaattcctagcgcgattcagcagctgcctcggatcggatcggatcggattggaccggcgccggaagaggagaggaggcgtgggggggttcggggcctgcctcgctgccgcccatgtcccgcatgaaacacctgctacgcaagctccacctcgccgggggccccgccggggccggggccgggggcgcggcgcccgaccaccaccgctcgaggcaccgccgctcggggcatccgacgccgccgccgccgggggcggcggtagcggcccccgagccgccgcaaccggcggttactcctgccgcggctgtgtcgatcgcccccgcggtggaggagcctagaggcctcgaggcggaggcggccacgacgcggctggaagaggactaccaggtgcgcctcgcgctcgccatctccgcgtccgaccacgcggggctcgtcgacgcggactccgtccagatccgcgcggcagagctcatcagcctcggggccggcgcggggtccggacacgaccggagccccgcggaggccctctccgcgaggtactggaaccacagcgtagtcaactacgacgagcagctccccgatggcttctacgacgtctgtggcgcgcagctgcatcccggattccaggccaaattcccctcgctcgaatacctcagggctgtcccgcttgggcgtgatgccccgttcctggccattttggtggatcgggagcacgaccctgccctaaaacgactggaagatagggctgcacagattgctgcgcagactagggcaggacatggtggtgctgcttcagctgagcttgcgcagaagattgtgggtctcattgttaatgcgatgggcggtctggttgaggatgctgatggtatgaacagggagtggagcatcaagagccacgagctctctctccagctaaacagtgtcgttcttccacttggctcgcttcgggttgggctgtcgcggcacagatcactgctatttaaggtacttgctgaccgagttaacctaccatgtaagcttctgaaaggaatatgttataccgggacagatgaaggagctgttaacttggtcaaagttgattttgacagcatggaatatattattgatttgatgggagctccaggcaccttaatcccttcagacatttctgggagtcagtttcaggactccaacaatagccaattgagcagtgatgccattgaagagagtgtagcagaattgtgcttagcccttgagcagattaatggtggatatgagaacaaaaatactattggaggatgctcatctggtcacagttctattttagcgctcacgagttcacacctgggagatttatctcagacagaacttaaacaaaatgttgtttctgagaaaaaaaatgatggggatatttctgagcatgttaaggtcgatgatgtttccaagtatattgtgcctgaagtagtggacccacagtttgcacaaaatttgcatgacttacttttggagagtggtgcattgctaccctcggatttattatctgatcaaaataatcatgacattcacgagaaagagagtacaggatggttattagttgctcaaacaacacaaaatttgccaaatgcttttgtagctaaagattcgtcatcgcctgatgaagatgaacaaccccgtgcagaaaatacagaagcagccatcagagatttggatttgcatggtcatactgctagtgttatttccaatgaggatcaaatggttgctggttctttggtgaacatgtcaggaagtagcaatggaaatttggacacgttgagttggtctagtgtaaaaacgatcagctctgttatagatgatatcgctgaatacgaaataccatgggaagatcttgatattggagaacgtattggtttaggatcatttggggaagtttatcgtgcagactggaatggcacggaggttgcagtgaagaaatttcttgaccaggatttatcaggtgtttcactagagcaatttaaatgtgaagtgagaatcatgtcaaggctaaggcatcccaatgttgttcttttcttgggatatgtgacacaatcgcctaatctctctatattaactgagtacctcccaagggggagcctatatcgtctgttgcataggccaaatagtcgaattgatgaagtacggaggctaaaaatggcattcgatgtggcaaaagggatgaactacctgcactctagccatcctaccattgttcaccgtgacctgaaatcccccaatcttttagtggataaaaattgggttgttaaggtgtctgactttggcatgtccaggttgaaacatcatacttttctttcctctaagtcaactgctggaacagcatatgcatagacattggttccagattttgttggtggtgccctatgtttttttttctcgaaagcgcaggggaactgcgcatttaattatattaagaagaggagaaacataatacatagtacatgccagagtggatggcacctgaggtactacgaaatgaaccatctaatgagaagtgtgatgtctacagctttggagtaatcctgtgggaactagcaactatgcgtgtgccatggagtgggttgaatccaatgcaagttgtaggagcagttggattccagaacaggcgactagagatccccaaggatgtggatccacaggtggctagcataatatcttcatgttgggatagcgatccgagcaaaaggccgtcgttctcccagctcttgtcccctctaaagcaactacaacatttagttgttacagaaagctgctgacatgcgtttcctgggacaaatctcaggatacatatattcaagtatttaagctctgttacagggctaaaattttcttttttgaagctcgtggaggagtctctgcggtatagatgtgtttgggcgaaggttctgcacatcagtaatcatcaccttgtgaaaatgcgagtctctgaagccgtgcaaaggcgctgctggagaaagcgtagtgtgtagtctcaagtgaagaaaagtggtgcgacacaaagtgttctgtgccatggtaaataattgttcagttctggatttgaacgggtgataaattcaccacaaagataggatcttgaagttttttccccttgccttacaaaagatggaaagtgaagtgaaaaaaaattcacggtgtctgcaaaaagtcgcagcccgatgccacgtgaaaatgtatatgatgtaatacagttgctttggaaaggcaaacataaagttcacagttttgttcgataatggtgtgtttggttttccttcttaagaaaagaattgatatttatctcataagctaataaagctaaattggaggaatc

SEQ ID NO: 41970 - DNA, 5337 bp, Zea Mays
cgaacccgagcgcgaagcatccacgacgacgcccccaacagaatacaaaaataataataaaaaaacccacaggtcacgaatggataggtagatcgctcgaagcgattgaaaaatctgcctccgacaattcctagcgcgattcagcagctgcctcggatcggatcggatcggattggaccggcgccggaagaggagaggaggcgtgggggggttcggggcctgcctcgctgccgcccatgtcccgcatgaaacacctgctacgcaagctccacctcgccgggggccccgccggggccggggccgggggcgcggcgcccgaccaccaccgctcgaggcaccgccgctcggggcatccgacgccgccgccgccgggggcggcggtagcggcccccgagccgccgcaaccggcggttactcctgccgcggctgtgtcgatcgcccccgcggtggaggagcctagaggcctcgaggcggaggcggccacgacgcggctggaagaggactaccaggtgcgcctcgcgctcgccatctccgcgtccgaccacgcggggctcgtcgacgcggactccgtccagatccgcgcggcagagctcatcagcctcggggccggcgcggggtccggacacgaccggagccccgcggaggccctctccgcgaggtactggaaccacagcgtagtcaactacgacgagcagctccccgatggcttctacgacgtctgtggcgcgcagctgcatcccggattccaggccaaattcccctcgctcgaatacctcagggctgtcccgcttgggcgtgatgccccgttcctggccattttggtggatcgggagcacgaccctgccctaaaacgactggaagatagggctgcacagattgctgcgcagactagggcaggacatggtggtgctgcttcagctgagcttgcgcagaagattgtgggtctcattgttaatgcgatgggcggtctggttgaggatgctgatggtatgaacagggagtggagcatcaagagccacgagctctctctccagctaaacagtgtcgttcttccacttggctcgcttcgggttgggctgtcgcggcacagatcactgctatttaaggtacttgctgaccgagttaacctaccatgtaagcttctgaaaggaatatgttataccgggacagatgaaggagctgttaacttggtcaaagttgattttgacagcatggaatatattattgatttgatgggagctccaggcaccttaatcccttcagacatttctgggagtcagtttcaggactccaacaatagccaattgagcagtgatgccattgaagagagtgtagcagaattgtgcttagcccttgagcagattaatggtggatatgagaacaaaaatactattggaggatgctcatctggtcacagttctattttagcgctcacgagttcacacctgggagatttatctcagacagaacttaaacaaaatgttgtttctgagaaaaaaaatgatggggatatttctgagcatgttaaggtcgatgatgtttccaagtatattgtgcctgaagtagtggacccacagtttgcacaaaatttgcatgacttacttttggagagtggtgcattgctaccctcggatttattatctgatcaaaataatcatgacattcacgagaaagagagtacaggatggttattagttgctcaaacaacacaaaatttgccaaatgcttttgtagctaaagattcgtcatcgcctgatgaagatgaacaaccccgtgcagaaaatacagaagcagccatcagagatttggatttgcatggtcatactgctagtgttatttccaatgaggatcaaatggttgctggttctttggtgaacatgtcaggaagtagcaatggaaatttggacacgttgagttggtctagtgtaaaaacgatcagctctgttatagatgatatcgctgaatacgaaataccatgggaagatcttgatattggagaacgtattggtttaggatcatttggggaagtttatcgtgcagactggaatggcacggttttgtgtgagtacctctctacagtgttaggcatacacttctctattatgacaaagccaaatgaggttgcagtgaagaaatttcttgaccaggatttatcaggtgtttcactagagcaatttaaatgtgaagtgagaatcatgtcaaggctaaggcatcccaatgttgttcttttcttgggatatgtgacacaatcgcctaatctctctatattaactgagtacctcccaagggggagcctatatcgtctgttgcataggccaaatagtcgaattgatgaagtacggaggctaaaaatggcattcgatgtggcaaaagggatgaactacctgcactctagccatcctaccattgttcaccgtgacctgaaatcccccaatcttttagtggataaaaattgggttgttaaggtgtctgactttggcatgtccaggttgaaacatcatacttttctttcctctaagtcaactgctggaacagtaatacccctcacccgttaatgtttttatttgttcatattgattgttttattgtttgaaatgccagtcctaatcacaaataagtggtactctggaactttgaagaacaactttgattattactattttgttgcaaagtagttataaagcttagcaaaaatgtactttaataaaactcttctgagacaaatctgcttgtgtcattttcaaatatccaaacccaatacataaaagttcatttatccaaatccaaaacttcacttatttatgagtagagggaggataaacatagaatatactacagctaacagctagaacactgacctcgtacacgttcaccaaatgaaagaggtgttaagcgatacaggatagaataacacaaacgcaacccacttagataaacttaagaaaaaagatgagagagtgtagttggcattcatgatggtggatcctggttatactatactcttgtccgctaaattgccaactgaaacatgacacatgttctacataaaagtacatctttgttttgaagatcattagagtacgtattttggaattggctaggaagggatactgaattcttttgtagagcattagagtacttgtcttgagataggctgggaagggagacatcattattttgtagagcattggagtactcattttggaataggtttggaatggcaatatagtgctagttcaaaacacatcatttcagcatgcaatctaaaatgcacttgatctaggtctaatgcatgactacaaaaaatgaccatcttttgcaaatagcaaagctatcttgagattaaattgatttctggttgcatagggacacagatccgcacaagtaaaatatttcccatagttccatttcttaggtagctgcataatgcactatgtagaccctgtttggatcagctagagtttgtgtattgtggctttaaaagctctagctggtcctgttagacatatatgtgtttatatatgcgtgtatatagctggactgggccctgggccgtgcgcctcctgccctcctatagcctgctgaccttctctgttggttatcgataggaataggggagatcttgattggttatgtttctatataccatgattaaataatctactatttccgtgcaacacctattgctttcatggtatcatgagttttgggttaatatatatgtgtgtacatagcgtggctgggcctgtgctgtgcacctcctatttcttgttgggttatgtttctatcagcagaggccttctcctctgttgctgttgattatggataggaataagggaggagatcttgttgggttatgtttctataaacccaagatctgctccggactatgtatacatgtacgcctgtaccttgattaatcaatctactatttccacgcattacacaatccctattactttcaggttcaaacgggccagcttgtggaagcagcttttaatccacgagccatagttatccaagcagcttttaacagttttagtccagactgtgacaatcccagaatccatcttctcctaacttctttcagcttttaacaatccacaatttactagccagatttttgaagtcttcagcttgtccaacgggacttaaatgttagcataattatttcatgcatctatgtttaacttcaaacccctgcttttgtttgatggaaaaacaggcatatgcatagacattggttccagattttgttggtggtgccctatgtttttttttctcgaaagcgcaggggaactgcgcatttaattatattaagaagaggagaaacataatacatagtacatggtggtgccctatgttgtacaagaatactgccttctgttctttttctcgttctgcattgcatttttctataaatatacctattatcacatctttacgaaacatttcttgttgcttgcagccagagtggatggcacctgaggtactacgaaatgaaccatctaatgagaagtgtgatgtctacagctttggagtaatcctgtgggaactagcaactatgcgtgtgccatggagtgggttgaatccaatgcaagttgtaggagcagttggattccagaacaggcgactagagatccccaaggatgtggatccacaggtggctagcataatatcttcatgttgggatagcgatccgagcaaaaggccgtcgttctcccagctcttgtcccctctaaagcaactacaacatttagttgttacagaaagctgctgacatgcgtttcctgggacaaatctcaggatacatatattcaagtatttaagctctgttacagggctaaaattttcttttttgaagctcgtggaggagtctctgcggtatagatgtgtttgggcgaaggttctgcacatcagtaatcatcaccttgtgaaaatgcgagtctctgaagccgtgcaaaggcgctgctggagaaagcgtagtgtgtagtctcaagtgaagaaaagtggtgcgacacaaagtgttctgtgccatggtaaataattgttcagttctggatttgaacgggtgataaattcaccacaaagataggatcttgaagttttttccccttgccttacaaaagatggaaagtgaagtgaaaaaaaattcacggtgtctgcaaaaagtcgcagcccgatgccacgtgaaaatgtatatgatgtaatacagttgctttggaaaggcaaacataaagttcacagttttgttcgataatggtgtgtttggttttccttcttaagaaaagaattgatatttatctcataagctaataaagctaaattggaggaatc

SEQ ID NO: 41971 - DNA, 5133 bp, Zea Mays
gcatccacgacgacgcccccaacagaatacaaaaataataataaaaaaacccacaggtcacgaatggataggtagatcgctcgaagcgattgaaaaatctgcctccgacaattcctagcgcgattcagcagctgcctcggatcggatcggatcggattggaccggcgccggaagaggagaggaggcgtgggggggttcggggcctgcctcgctgccgcccatgtcccgcatgaaacacctgctacgcaagctccacctcgccgggggccccgccggggccggggccgggggcgcggcgcccgaccaccaccgctcgaggcaccgccgctcggggcatccgacgccgccgccgccgggggcggcggtagcggcccccgagccgccgcaaccggcggttactcctgccgcggctgtgtcgatcgcccccgcggtggaggagcctagaggcctcgaggcggaggcggccacgacgcggctggaagaggactaccaggtgcgcctcgcgctcgccatctccgcgtccgaccacgcggggctcgtcgacgcggactccgtccagatccgcgcggcagagctcatcagcctcggggccggcgcggggtccggacacgaccggagccccgcggaggccctctccgcgaggtactggaaccacagcgtagtcaactacgacgagcagctccccgatggcttctacgacgtctgtggcgcgcagctgcatcccggattccaggccaaattcccctcgctcgaatacctcagggctgtcccgcttgggcgtgatgccccgttcctggccattttggtggatcgggagcacgaccctgccctaaaacgactggaagatagggctgcacagattgctgcgcagactagggcaggacatggtggtgctgcttcagctgagcttgcgcagaagattgtgggtctcattgttaatgcgatgggcggtctggttgaggatgctgatggtatgaacagggagtggagcatcaagagccacgagctctctctccagctaaacagtgtcgttcttccacttggctcgcttcgggttgggctgtcgcggcacagatcactgctatttaaggtacttgctgaccgagttaacctaccatgtaagcttctgaaaggaatatgttataccgggacagatgaaggagctgttaacttggtcaaagttgattttgacagcatggaatatattattgatttgatgggagctccaggcaccttaatcccttcagacatttctgggagtcagtttcaggactccaacaatagccaattgagcagtgatgccattgaagagagtgtagcagaattgtgcttagcccttgagcagattaatggtggatatgagaacaaaaatactattggaggatgctcatctggtcacagttctattttagcgctcacgagttcacacctgggagatttatctcagacagaacttaaacaaaatgttgtttctgagaaaaaaaatgatggggatatttctgagcatgttaaggtcgatgatgtttccaagtatattgtgcctgaagtagtggacccacagtttgcacaaaatttgcatgacttacttttggagagtggtgcattgctaccctcggatttattatctgatcaaaataatcatgacattcacgagaaagagagtacaggatggttattagttgctcaaacaacacaaaatttgccaaatgcttttgtagctaaagattcgtcatcgcctgatgaagatgaacaaccccgtgcagaaaatacagaagcagccatcagagatttggatttgcatggtcatactgctagtgttatttccaatgaggatcaaatggttgctggttctttggtgaacatgtcaggaagtagcaatggaaatttggacacgttgagttggtctagtgtaaaaacgatcagctctgttatagatgatatcgctgaatacgaaataccatgggaagatcttgatattggagaacgtattggtttaggatcatttggggaagtttatcgtgcagactggaatggcacggaggttgcagtgaagaaatttcttgaccaggatttatcaggtgtttcactagagcaatttaaatgtgaagtgagaatcatgtcaaggctaaggcatcccaatgttgttcttttcttgggatatgtgacacaatcgcctaatctctctatattaactgagtacctcccaagggggagcctatatcgtctgttgcataggccaaatagtcgaattgatgaagtacggaggctaaaaatggcattcgatgtgggatgaactacctgcactctagccatcctaccattgttcaccgtgacctgaaatcccccaatcttttagtggataaaaattgggttgttaaggtgtctgactttggcatgtccaggttgaaacatcatacttttctttcctctaagtcaactgctggaacagtaatacccctcacccgttaatgtttttatttgttcatattgattgttttattgtttgaaatgccagtcctaatcacaaataagtggtactctggaactttgaagaacaactttgattattactattttgttgcaaagtagttataaagcttagcaaaaatgtactttaataaaactcttctgagacaaatctgcttgtgtcattttcaaatatccaaacccaatacataaaagttcatttatccaaatccaaaacttcacttatttatgagtagagggaggataaacatagaatatactacagctaacagctagaacactgacctcgtacacgttcaccaaatgaaagaggtgttaagcgatacaggatagaataacacaaacgcaacccacttagataaacttaagaaaaaagatgagagagtgtagttggcattcatgatggtggatcctggttatactatactcttgtccgctaaattgccaactgaaacatgacacatgttctacataaaagtacatctttgttttgaagatcattagagtacgtattttggaattggctaggaagggatactgaattcttttgtagagcattagagtacttgtcttgagataggctgggaagggagacatcattattttgtagagcattggagtactcattttggaataggtttggaatggcaatatagtgctagttcaaaacacatcatttcagcatgcaatctaaaatgcacttgatctaggtctaatgcatgactacaaaaaatgaccatcttttgcaaatagcaaagctatcttgagattaaattgatttctggttgcatagggacacagatccgcacaagtaaaatatttcccatagttccatttcttaggtagctgcataatgcactatgtagaccctgtttggatcagctagagtttgtgtattgtggctttaaaagctctagctggtcctgttagacatatatgtgtttatatatgcgtgtatatagctggactgggccctgggccgtgcgcctcctgccctcctatagcctgctgaccttctctgttggttatcgataggaataggggagatcttgattggttatgtttctatataccatgattaaataatctactatttccgtgcaacacctattgctttcatggtatcatgagttttgggttaatatatatgtgtgtacatagcgtggctgggcctgtgctgtgcacctcctatttcttgttgggttatgtttctatcagcagaggccttctcctctgttgctgttgattatggataggaataagggaggagatcttgttgggttatgtttctataaacccaagatctgctccggactatgtatacatgtacgcctgtaccttgattaatcaatctactatttccacgcattacacaatccctattactttcaggttcaaacgggccagcttgtggaagcagcttttaatccacgagccatagttatccaagcagcttttaacagttttagtccagactgtgacaatcccagaatccatcttctcctaacttctttcagcttttaacaatccacaatttactagccagatttttgaagtcttcagcttgtccaacgggacttaaatgttagcataattatttcatgcatctatgtttaacttcaaacccctgcttttgtttgatggaaaaacaggcatatgcatagacattggttccagattttgttggtggtgccctatgtttttttttctcgaaagcgcaggggaactgcgcatttaattatattaagaagaggagaaacataatacatagtacatgccagagtggatggcacctgaggtactacgaaatgaaccatctaatgagaagtgtgatgtctacagctttggagtaatcctgtgggaactagcaactatgcgtgtgccatggagtgggttgaatccaatgcaagttgtaggagcagttggattccagaacaggcgactagagatccccaaggatgtggatccacaggtggctagcataatatcttcatgttgggatagcgatccgagcaaaaggccgtcgttctcccagctcttgtcccctctaaagcaactacaacatttagttgttacagaaagctgctgacatgcgtttcctgggacaaatctcaggatacatatattcaagtatttaagctctgttacagggctaaaattttcttttttgaagctcgtggaggagtctctgcggtatagatgtgtttgggcgaaggttctgcacatcagtaatcatcaccttgtgaaaatgcgagtctctgaagccgtgcaaaggcgctgctggagaaagcgtagtgtgtagtctcaagtgaagaaaagtggtgcgacacaaagtgttctgtgccatggtaaataattgttcagttctggatttgaacgggtgataaattcaccacaaagataggatcttgaagttttttccccttgccttacaaaagatggaaagtgaagtgaaaaaaaattcacggtgtctgcaaaaagtcgcagcccgatgccacgtgaaaatgtatatgatgtaatacagttgctttggaaaggcaaacataaagttcacagttttgttcgataatggtgtgtttggttttccttcttaagaaaagaattgatatttatctcataagctaataaagctaaattggaggaatc

SEQ ID NO: 41972 - DNA, 3075 bp, Zea Mays
gttaaaataagtttttcttaaaaaaagcatctctcttcccccacactccaccattcccgtggacgcgcgcacacactccacggcccaagctcggcacctcgccggcggcaaaccaatccaaaaagcggcggcacaaacaagattatgcaaacgggggttaaaattcccccgtcgcagttgcccgccctcctctagtctagataaaaaaactcgccacctcacgcccttcccatccatcccatcgccactccactcgcactcggccaagaaagaagcggcaggtcactgcccactgctgctccaggagcgagaaaggccagccaaggagggagctttgctttcaggaggagaggagcggcgaggtgggcggcgggcgccatggccgcagcgccgcgtagtcttgtcacctgcagcggcgggggcagtagcagtagtcgcatcctgctcgccgtcttcctggcggccgccctcttggcgtccgcggccaatgcggccgtctcgtacgaccaccgctccctcgtcatcaacggccgccgccgcatcctcatctccggctctatccactacccgagaagcgcccccgagatgtggcccgggctgatccagaaggccaaggacggcggcctcgacgtcgtccagacctacgtcttctggaacgggcacgagccggcgcaggggcagtactacttcgccgaccgctacgacctcgtccgcttcgtcaagctcgtcaggcaggccggcctctacgtccacctccgcgtcggcccctacgtctgcgcggagtggaacttcggtggctttccagtttggctcaagtatgtgccgggcatcaggttcaggacagacaatggcccattcaaggcggcaatgcagaagttcgtggagaagatagtgtccatgatgaagtcggaggggctgttcgagtggcagggaggcccgatcatcatggctcaggtggagaacgagttcgggccaatggagtccgtcgtgggcagtggcggcaagccatacgctcactgggcggcccagatggctgtcgggaccaacgccggcgtgccgtgggtgatgtgcaagcaggatgacgccccggaccccgtgatcaacacttgcaatggcttctactgcgactacttcacgccaaacaacaagcacaagccgaccatgtggaccgaagcctggactggatggttcaccaagttcggcggcgcggcgcctcaccggccggtggaggacctggccttcgccgtggcacggttcgttcagaaaggaggctccttcgtgaactactacatgtaccatggaggaacgaactttgggcgcaccgccggtggccccttcatcgcgaccagctacgactacgatgcccccattgacgagtttggtctgctcaggcaaccgaaatggggtcacttgaggaacatgcacagagctatcaagcaggccgagcctgcgttggtttctggcgatccaacgatacgatctattggaaactacgaaaaggcatatgtcttcaagtcaaagaatggagcctgtgctgcgttcctgtcgaactaccacgttaaatctgctgtgaggatcaggtttgacgggcgtcactatgacctcccggcttggtccatcagcattctgcccgactgcaaaaccgcagtcttcaacaccgcgacggtgaaggagccgactctgctgccgaagatgagcccggtgatgcatcgcttcgcttggcagtcctacagcgaggacacgaactcgctggatgacagcgcgtttgcaagggatggcctgatcgagcagctcagcttgacatgggacaagtcggactacctgtggtacaccacccatgtcaacattggttccaacgaacgattcctcaagtctggccagtggcctcagctcagtgtgtactctgctggacactccatgcaggtgttcgtcaatgggaggtcatatggatctgtttacggcggctacgacaacccgaagctaacattcagtgggtatgtgaagatgtggcagggcagcaacaagatctccattctaagctcagcagtgggccttcctaacaacggtgaccatttcgagctgtggaacgtcggcgtcctcgggccagtgaccctctccggcctgaacgaggggaagagggacctgagccatcagagatggatataccaggtcggcctgaaaggcgagtcgctcggcctccacaccgtgaccggaagctccgccgtggaatgggccggccccggcggcggcacgcagccgctgacttggcacaaggccctgttcaacgcgccggcggggagcgatccggtggccctggacatgggcagcatgggcaagggccaggtgtgggtgaacgggcgccacgccgggcgctactggtcgtacagggctcactcccgcggctgcgggcggtgcagctacgccgggacgtaccgcgaggaccagtgcacgtccaactgcggcgacctctcccagagatggtaccacgtgccgcggtcgtggctgaagccgagcgggaacctgctggtggtgctggaggagtacggcggcgacctcgccggcgtcagtctcgcgacacggactacgtgaacaagtgaggtgaggccatggcgaggaggagcaagcataccgaccatgccgtattcgcggaccgtatttatacacacgacaccgtacattacactcgcgtgatagcaatggttatactgcaaggggaaggtaaggatggcatttaagtgcagagcggagagggtgggtgcctgggtggtctccggccatcagtgcggcggcaggaccggcagctagctagctgcgccggcgcggcacacacttcgaggccaattcaattcaactgtttcaattcatgtaactggcactctggcagcgggtgtttgctgctgcttgctgtgtttttttgaagacgtgaacatgaaatacaaaactgagcttgttttgtccatggctatattttgctgtcgtaatgttgttggcatttggaaaaaaaaaaccaaatcttggactggtatgtacaacactgtatagtattcactgtggtaaaaccgtaaaactgtgaat

SEQ ID NO: 41973 - DNA, 2952 bp, Zea Mays
gccacctcacgcccttcccatccatcccatcgccactccactcgcactcggccaagaaagaagcggcaggtcactgcccactgctgctccaggagcgagaaaggccagccaaggagggagctttgctttcaggaggagaggagcggcgaggtgggcggcgggcgccatggccgcagcgccgcgtagtcttgtcacctgcagcggcgggggcagtagcagtagtcgcatcctgctcgccgtcttcctggcggccgccctcttggcgtccgcggccaatgcggccgtctcgtacgaccaccgctccctcgtcatcaacggccgccgccgcatcctcatctccggctctatccactacccgagaagcgcccccgagatgtggcccgggctgatccagaaggccaaggacggcggcctcgacgtcgtccagacctacgtcttctggaacgggcacgagccggcgcaggggcagtactacttcgccgaccgctacgacctcgtccgcttcgtcaagctcgtcaggcaggccggcctctacgtccacctccgcgtcggcccctacgtctgcgcggagtggaacttcggtggctttccagtttggctcaagtatgtgccgggcatcaggttcaggacagacaatggcccattcaaggcggcaatgcagaagttcgtggagaagatagtgtccatgatgaagtcggaggggctgttcgagtggcagggaggcccgatcatcatggctcaggtggagaacgagttcgggccaatggagtccgtcgtgggcagtggcggcaagccatacgctcactgggcggcccagatggctgtcgggaccaacgccggcgtgccgtgggtgatgtgcaagcaggatgacgccccggaccccgtgatcaacacttgcaatggcttctactgcgactacttcacgccaaacaacaagcacaagccgaccatgtggaccgaagcctggactggatggttcaccaagttcggcggcgcggcgcctcaccggccggtggaggacctggccttcgccgtggcacggttcgttcagaaaggaggctccttcgtgaactactacatgtaccatggaggaacgaactttgggcgcaccgccggtggccccttcatcgcgaccagctacgactacgatgcccccattgacgagtttgggtctgctcaggcaaccgaaatggggtcacttgaggaacatgcacagagctatcaagcaggccgagcctgcgttggtttctggcgatccaacgatacgatctattggaaactacgaaaaggcatatgtcttcaagtcaaagaatggagcctgtgctgcgttcctgtcgaactaccacgttaaatctgctgtgaggatcaggtttgacgggcgtcactatgacctcccggcttggtccatcagcattctgcccgactgcaaaaccgcagtcttcaacaccgcgacggtgaaggagccgactctgctgccgaagatgagcccggtgatgcatcgcttcgcttggcagtcctacagcgaggacacgaactcgctggatgacagcgcgtttgcaagggatggcctgatcgagcagctcagcttgacatgggacaagtcggactacctgtggtacaccacccatgtcaacattggttccaacgaacgattcctcaagtctggccagtggcctcagctcagtgtgtactctgctggacactccatgcaggtgttcgtcaatgggaggtcatatggatctgtttacggcggctacgacaacccgaagctaacattcagtgggtatgtgaagatgtggcagggcagcaacaagatctccattctaagctcagcagtgggccttcctaacaacggtgaccatttcgagctgtggaacgtcggcgtcctcgggccagtgaccctctccggcctgaacgaggggaagagggacctgagccatcagagatggatataccaggtcggcctgaaaggcgagtcgctcggcctccacaccgtgaccggaagctccgccgtggaatgggccggccccggcggcggcacgcagccgctgacttggcacaaggccctgttcaacgcgccggcggggagcgatccggtggccctggacatgggcagcatgggcaagggccaggtgtgggtgaacgggcgccacgccgggcgctactggtcgtacagggctcactcccgcggctgcgggcggtgcagctacgccgggacgtaccgcgaggaccagtgcacgtccaactgcggcgacctctcccagagatggtaccacgtgccgcggtcgtggctgaagccgagcgggaacctgctggtggtgctggaggagtacggcggcgacctcgccggcgtcagtctcgcgacacggactacgtgaacaaggcaggcgaacgacacgcgttgcatctaactcgtacatgtatactatactccgacgtgcgagtatatacatcgattggtatttgtttagtgaggtgaggccatggcgaggaggagcaagcataccgaccatgccgtattcgcggaccgtatttatacacacgacaccgtacattacactcgcgtgatagcaatggttatactgcaaggggaaggtaaggatggcatttaagtgcagagcggagagggtgggtgcctgggtggtctccggccatcagtgcggcggcaggaccggcagctagctagctgcgccggcgcggcacacacttcgaggccaattcaattcaactgtttcaattcatgtaactggcactctggcagcgggtgtttgctgctgcttgctgtgtttttttgaagacgtgaacatgaaatacaaaactgagcttgttttgtccatggctatattttgctgtcgtaatgttgttggcatttggaaaaaaaaaaccaaatcttggactggtatgtacaacactgtatagtattcactgtggtaaaaccgtaaaactgtgaat

SEQ ID NO: 41974 - DNA, 2886 bp, Zea Mays
aacggacacagtaaaacaggaacaaggaagcccccgtaatagtgtagccacccaatgatgggagaaaactctaaggtccaaatttggcgaaacagcaaaactgcctgaaaacacatttgcagttttggttgggtggctcaattacagcagagaaacgggggagggaggttagggacgagcaggacaaaataaggcgacgggagaggagagaaaaaaaaatacctgctgtctctctccaccctccctccgtttcgccccttgctgggaatcgattgggccggaagctgattgttgcattgcgaaagaggaagaggacagtggtgctcgccgtcaccatcgaagatgttctcctcgcccttctccgtgacctcttcgcacagcagcgagcatgagccggttgcaagggacagctccatcatcgtcgccgtcgaccgggacaagaacagccagcaggcggcgaaatgggcggtggataagctcctcaccaggggcagcatgctccagctcgtccatgtgagggttgaagcaaacaaagatgagggtgacgcagagataacacagctatttatatcatatagagggtattgtgctcgtaaagggatgcatctgaaggagttgatcttggatggcactgacatctccaaagcaataattgactatgccactagcaatgccatcacagacattgtcgtcggcgcatcaactaagaacacattcatcagaaggtttagaaatcccgatgtcccaacgtgtttgatgaagatggcgcctgattattgcacggtacatgtcatccacaaggcaaaagccatccaggtgaaggcagccaaagctcctgcaccctttgctactctccctccaaagcaacactcgcaaccaaacatagagtctgatgcttcaagggcctcaagaggagactggaagaagactcctcctacatcgtctccattggcaagtagaaatgaaattcagtggaccggttatctgcctatgcaaaggccccgtcgagagataggcctcttaccggagctaggacagcaccccagaaggattttgacgactacatcgatttcatagcaccaccgaggccctcagtggcccgtagctccttttcagatgacattgatttcgcaatgagcatggagctgccatccatagactttggtgaatccatggagctctcctcagcgatgtccatggaaagcctgagttgtgccggggatgtggaagctgaaatgagacgcctgagactagaactgaaacagacaatggagatgtataactctgcatgtaaggaagctgttgatgccaaacagaaggcagcacagatgcaccagatgaaggtggaggagtccaagaagtaccaagaactacggaattcagaagaggaagctcttgcgctagttgaaatggagaaagcgaagtgtagagctgcacttgaggcagcagaagctgcgcagaaaattgcagagctcgaggcgcagaagagattgagagcagagtggaaggcaaagagggaggctgaggataggaagaaagcaactgatgcactgaacaaaaatgatatccggtacaggagatactccatcgatgacatagaggctgctactcataagtttgataaggcgctcaagataggagaaggcggatatggaccagtatacaaagcagtactggatcataccaatgttgctatcaaaatcttgagaccagatgcatcacaggggcggaaacaatttcagcaagagattgaagtactaagctgcatgcggcatccaaacatggttctgttgcttggagcctgcccagagtatgggtgcctggtgtacgagtacatggactatgggagcctagaggatcggctctgcaggcgaggaaaaacgttgccaatcccatggagcatccgcttcaggatcgccgctgacatcgcaactggactcctcttcctccaccaagcgaagccagaaccacttgtccaccgggacctgaagcccgccaacatcctcctcgaccacaacttcgtcagcaagatcagcgacgtcgggctcgcgaggctggtgccacagtccgcggccgacgtcacgcagtacaggatgacatcgacggccggcaccttctgctacatcgacccggagtaccaacagactggcatgctcaccaccaagtccgacgtgtactcgctcggcatcatgctgctccagatcatcacggcgaggtcgcccatggggctcacgcaccatgtggagaacgccatagagagaggagccttccaggagatcctcgacccgacggtgaccgactggccggtggaagaggctctggaattcgccaagctggcgctgcggtgcgcggagctgcggaagaaagacaggccggatctcgggaaggaaatcttgccggagctgaacaggctgcgcaatcttgggcatgagtatgagacttcccaggtcagctgcgcaagtacgaactgctcaagctccgctccttacagtttcaataacgatgacatctgaatgccatgggaaggaatcttccgccggatcaagcaaatcaagcatactcataattgtatagagtatagacgggcatgaggttgccttccaggtctggaaaaccactgctgtccatgcttgttcagattcagtcctgactcagatgagatggtcatggactgcagcgcctgatgatggggcctaaaatagttccagtgaaccaaacgagattgttagcgtgtagataaggggagcatacaaaggaaacttatggtgtgtacatgtgtgtaaaatgtgttgatttcttttttgctgtaacagcagcctcaagtttccaaactatggtttgcctcctttatttaattcaccagctcggttcctgaaaaaaaaataa

SEQ ID NO: 41975 - DNA, 1648 bp, Zea Mays
aaccatcaaaccacacacgaacctagatcgacctgctcgctctgcacacctggaacaacgtgttcctcgtcccgagaagagtcgaggaaaaatctcgcattcgcaaaccaagcaaatggaggcatgagctccgccgcctccccgtctctcgccgatctcccccaaaccctagcctcgacctgaccgccagcgggcccgcaggccggagaaggagtcggagtcgcccccacccacccaccctctgccgcgggcggggagcgggcggaggtcaaggtgctctgcgagcaggccaaggccatcctcatggaggaatggaacgtgcagcccgtgcgctgccccgtcaccgtctgcggcgacatccacggccagttctatgacctcatcgagctcttccgcatcggcggcgactctcccgacaccaactacctcttcatgggcgactacgtcgatcgtggctattattcagttgaaacggtttctctgttagtggctttgaaagtccgttacagagatagaattacaatacttcgaggaaatcatgagagcagacaaatcactcaagtgtacggcttctatgatgaatgcttaagaaaatatggaaatgcaaatgtatggaagtattttacagacttgtttgattatttgcctctcacagctcttatagaaaatcaggtcttctgtcttcatggaggcctctctccgtcattggacacattggataacattcgttctcttgatcgcatacaggaggtacctcatgaaggacccatgtgtgatcttttgtggtctgacccagatgaccgatgtgggtggggaatttcacccagaggagcaggttacacatttgggcaagacattgcacagcagttcaaccatacaaatggtctctctctcatttcaagggcccatcaacttgtaatggaaggatttaattggtgccaggataagaatgtagtcacagtcttcagtgcgcctaattactgttaccgctgtggtaacatggctgctattcttgaaatcggggaaaacatggaccagaacttccttcaattcaaccccgcacctcggcaaattgagccagacacaactcgcaaaaccccagactactttctgtaattgtggtggtgaccttaactttctggtgtttgatgctcctctcttccgcagcatcaggacagggaatggaggacgcagtaggaacgcccctgctatgcttttgctcatcacatcatccgcgtggctgaataaattgcgtccagatgcgaaggttttggtttgcagcttccccatctgatgtgcctagtgctgtgtaatgttggttggcgccttgcagtttctacatgtgaatatgtgatggccaaaatggtttcatggtgattcttatatcacttatggcaaatcaagattattcaatatgtacagatgacgcataatcggcagttcaacagatcagctctattcatgcttacatgattttgctgttgtattgagacgcgtgatggaacatcttggcatgtgatgggatctagctggctagagggagtaaataatctatattttaaatgctgtaaagtaataaagcaagtgatgcaaaagaaatacttatactagctctattttactgttttataatgaacattgatttggc

SEQ ID NO: 41976 - DNA, 1722 bp, Zea Mays
aaccatcaaaccacacacgaacctagatcgacctgctcgctctgcacacctggaacaacgtgttcctcgtcccgagaagagtcgaggaaaaatctcgcattcgcaaaccaagcaaatggaggcatgagctccgccgcctccccgtctctcgccgatctcccccaaaccctagcctcgacctgaccgccagcgggcccgcaggccggagaaggagtcggagtcgcccccacccacccaccctctgccgcgggcggggagcgggcggcggacgagatgccgtcgcacggggatctggaccggcagatcgcgcagctgcgcgactgcaagtacctgcccgaggcggaggtcaaggtgctctgcgagcaggccaaggccatcctcatggaggaatggaacgtgcagcccgtgcgctgccccgtcaccgtctgcggcgacatccacggccagttctatgacctcatcgagctcttccgcatcggcggcgactctcccgacaccaactacctcttcatgggcgactacgtcgatcgtggctattattcagttgaaacggtttctctgttagtggctttgaaagtccgttacagagatagaattacaatacttcgaggaaatcatgagagcagacaaatcactcaagtgtacggcttctatgatgaatgcttaagaaaatatggaaatgcaaatgtatggaagtattttacagacttgtttgattatttgcctctcacagctcttatagaaaatcaggtcttctgtcttcatggaggcctctctccgtcattggacacattggataacattcgttctcttgatcgcatacaggaggtacctcatgaaggacccatgtgtgatcttttgtggtctgacccagatgaccgatgtgggtggggaatttcacccagaggagcaggttacacatttgggcaagacattgcacagcagttcaaccatacaaatggtctctctctcatttcaagggcccatcaacttgtaatggaaggatttaattggtgccaggataagaatgtagtcacagtcttcagtgcgcctaattactgttaccgctgtggtaacatggctgctattcttgaaatcggggaaaacatggaccagaacttccttcaattcaaccccgcacctcggcaaattgagccagacacaactcgcaaaaccccagactactttctgtaattgtggtggtgaccttaactttctggtgtttgatgctcctctcttccgcagcatcaggggaatggaggacgcagtaggaacgcccctgctatgcttttgctcatcacatcatccgcgtggctgaataaattgcgtccagatgcgaaggttttggtttgcagcttccccatctgatgtgcctagtgctgtgtaatgttggttggcgccttgcagtttctacatgtgaatatgtgatggccaaaatggtttcatggtgattcttatatcacttatggcaaatcaagattattcaatatgtacagatgacgcataatcggcagttcaacagatcagctctattcatgcttacatgattttgctgttgtattgagacgcgtgatggaacatcttggcatgtgatgggatctagctggctagagggagtaaataatctatattttaaatgctgtaaagtaataaagcaagtgatgcaaaagaaatacttatactagctctattttactgttttataatgaacattgatttggc

SEQ ID NO: 41977 - DNA, 1190 bp, Zea Mays
aaacgacctaaagagctgatcctggagattagaatctcccaacatggaccatatactacactcatcaaccattgttttaggagacccagaatgttcgacaaaactccatcaaacacacaggtacctcatgaaggacccatgtgtgatcttttgtggtctgacccagatgaccgatgtgggtggggaatttcacccagaggagcaggttacacatttgggcaagacattgcacagcagttcaaccatacaaatggtctctctctcatttcaagggcccatcaacttgtaatggaaggatttaattggtgccaggataagaatgtagtcacagtcttcagtgcgcctaattactgttaccgctgtggtaacatggctgctattcttgaaatcggggaaaacatggaccagaacttccttcaattcaaccccgcacctcggcaaattgagccagacacaactcgcaaaaccccagactactttctgtaattgtggtggtgaccttaactttctggtgtttgatgctcctctcttccgcagcatcagggtatgtagatcttgtccttagatatgggtcccatgtgcccggccttaacgtctccctattcttttgtttggagattttgtttctgcttctcgatcttgatacaagatgttagaagttgaatgccagtgtatttttttcttcctgctgtacgtcgactttgtattatttgtagacagggaatggaggacgcagtaggaacgcccctgctatgcttttgctcatcacatcatccgcgtggctgaataaattgcgtccagatgcgaaggttttggtttgcagcttccccatctgatgtgcctagtgctgtgtaatgttggttggcgccttgcagtttctacatgtgaatatgtgatggccaaaatggtttcatggtgattcttatatcacttatggcaaatcaagattattcaatatgtacagatgacgcataatcggcagttcaacagatcagctctattcatgcttacatgattttgctgttgtattgagacgcgtgatggaacatcttggcatgtgatgggatctagctggctagagggagtaaataatctatattttaaatgctgtaaagtaataaagcaagtgatgcaaaagaaatacttatactagctctattttactgttttataatgaacattgatttggc

SEQ ID NO: 41978 - DNA, 1592 bp, Zea Mays
gccagctactcctttgctttgctgaataaccataccaaacacgcccatattaatacccgctcggcggtggttctgcaatcaaacgcaggccgcagtcgcgtgcggaactagagctccttcagagaagtgccgtgccagtgccaccgccggccgcatcatcgttccgcccccctggtacgagcacttcgcagagctgcaacctacatcccttttacataaatctattgtctcgtattgccgttgacgccggaatagtcttcgcatcccttttacataaatccgatgttttctttctccgattcctttgaggaatcatcacgggtcagggcaggtgttctgccgtttgcccttttctttatattctccttagaagaaatatttagttggaggctggacatagccggaggagctaactaatcgagcggtgtactggcaaaacaaaaggagcggagcaagaaaggggagaaaaaactagccactgccggagcgctattggccgtgttgggcctggaagcttgcatcaatacttccctcgccccgatttggttccaaaatcatacaagtcccaaagttgtcaagatattggagagtgttcagtaacttcttccgatccatattatggcttcaaagcagcagcagaaacagttcctggatgaagccatgatcaagcagccgacaccggaggaggaccgtgagggcgcatggccctcagtgctgacgatcatcggctttggattcctaaccttcaactcattcatggctgtgtacaggtcaaatggagatgttggatctatctcctttgtggtcttctcttacctggtcctcgttctgctgttctactgcctgcgccgattcgagacaactccaccagagtcgcctagccgggagcacataaaaatggccgtgtgggtactcaccacgatgctcactgctgcgttctcatacaaggtggcagcaattatgccactcccggtgcaggtgctggtgtgggcaatggcaggagcaactgtgttcggtggtttttatgctttcttcatccaccaggaaaaaaccgcccagctggaacccccaaaaccataacgaggtacaaatctcatctgtgccttgctctagtttcccaaatggaattaactatgcatgatttgtttggaaactcttattgcatccatccagataatgcatccaccataaggtaatatcttgatgacatctgtgcctgatggtgtaccaaatgtctctatctctgcattgagccacgagtaggaggatagcctaggggtgccttgactccaaagttgtattgaaaaagatggatgaagcaggcaaatgctgcctgaatccatgactcagggcacagattttccactcaaaggaagataagattgcattacttcatgatcttttgaactgcctctgcaagacgggactcggatagtggatgcaaagatctaatactggcctcaggcaacgagttgtttcactcgaaagtctagaaatgaccgggctcaaattttgcaccccaaggaaagtgagtttgcattacttcatgaccttttgaactgcctctgcaagactggactcagattacgctt

SEQ ID NO: 41979 - DNA, 1010 bp, Zea Mays
gccagctactcctttgctttgctgaataaccataccaaacacgcccatattaatacccgctcggcggtggttctgcaatcaaacgcaggccgcagtcgcgtgcggaactagagctccttcagagaagtgccgtgccagtgccaccgccggccgcatcatcgttccgcccccctgagtgttcagtaacttcttccgatccatattatggcttcaaagcagcagcagaaacagttcctggatgaagccatgatcaagcagccgacaccggaggaggaccgtcaaatggagatgttggatctatctcctttgtggtcttctcttacctggtcctcgttctgctgttctactgcctgcgccgattcgagacaactccaccagagtcgcctagccgggagcacataaaaatggccgtgtgggtactcaccacgatgctcactgctgcgttctcatacaaggtggcagcaattatgccactcccggtgcaggtgctggtgtgggcaatggcaggagcaactgtgttcggtggtttttatgctttcttcatccaccaggaaaaaaccgcccagctggaacccccaaaaccataacgagataatgcatccaccataaggtaatatcttgatgacatctgtgcctgatggtgtaccaaatgtctctatctctgcattgagccacgagtaggaggatagcctaggggtgccttgactccaaagttgtattgaaaaagatggatgaagcaggcaaatgctgcctgaatccatgactcagggcacagattttccactcaaaggaagataagattgcattacttcatgatcttttgaactgcctctgcaagacgggactcggatagtggatgcaaagatctaatactggcctcaggcaacgagttgtttcactcgaaagtctagaaatgaccgggctcaaattttgcaccccaaggaaagtgagtttgcattacttcatgaccttttgaactgcctctgcaagactggactcagattacgctt

SEQ ID NO: 41980 - DNA, 1574 bp, Zea Mays
gccagctactcctttgctttgctgaataaccataccaaacacgcccatattaatacccgctcggcggtggttctgcaatcaaacgcaggccgcagtcgcgtgcggaactagagctccttcagagaagtgccgtgccagtgccaccgccggccgcatcatcgttccgcccccctgtacaggtgttatcagtattgctcgtgatgcggtgaagcatgagctcaccaagcatattggagttgatgtttcgtatacacgagctcaagtctaggatgatgttatcttgctttgagtgttcagtaacttcttccgatccatattatggcttcaaagcagcagcagaaacagttcctggatgaagccatgatcaagcagccgacaccggaggaggaccgtgagggcgcatggccctcagtgctgacgatcatcggctttggattcctaaccttcaactcattcatggctgtgtacaggtcaaatggagatgttggatctatctcctttgtggtcttctcttacctggtcctcgttctgctgttctactgcctgcgccgattcgagacaactccaccagagtcgcctagccgggagcacataaaaatggccgtgtgggtactcaccacgatgctcactgctgcgttctcatacaaggtggcagcaattatgccactcccggtgcaggtgctggtgtgggcaatggcaggagcaactgtgttcggtggtttttatgctttcttcatccaccaggaaaaaaccgcccagctggaacccccaaaaccataacgagggtgcccgtcctgctagccggtgtgcttgctgtgcgatcgtttggcatgtgcttgttgaggggttgctaggggattggagaggattgaagggattaaatctcctcctattcaattttgaataggaggggatttaatccccttcaatccccctcaaaccactagtaaccgaacgtggcctgagggggcgggcgagtctttatattgaatgaaactacataaaatagcatgccgtctctgtcactggcaatggacggtggtgcctagcgcaactcagcgcacaactgtgtgtcttgatttttcttctgtttatcacggcattagtgccatgccgttttatgttacagtgttgtgtgctcgcaagcatccgaaaatatgcgtctgagtttagggttgggtcaaacttgtcgaatttggggttctgttataatatgttgagcatgaataaagatggatgctggtgactctgtcgccatcgccgtccatcatgagtgtcctgtaattcaacttatatctatcatgtatgtatgtatgtatgtatgtatgtatgtatatgctgtctactatgcttctttgttttaactgaaatgtgtgttacagtgttacttctctggggtccatttaaaacggcatttcgtttacgataggaaccagccattataatctttaaccaataatttcgctaaccaatttcaactattgcaatgcgaacttaatattatcagatttataaccgaatgcgctatcaaataatcataaggttgtaatcataataatataatataaaataaa

SEQ ID NO: 41981 - DNA, 368 bp, Zea Mays
gttcatctccccggcccctcatcccattagtaaggaacaagtttaagtatggtttcacattgaaggggaggtttgatagtggaaaggttatgacacacttgaaagtcgtatgtgcgaaagattgaaagcctcaagctaggaagattgaaaaccctacatttggttttggtaattgagacaacttgtggactaacctttactctagtattgtgggtgagctaggttaaatccacatccaagtttgagcaagagcggcaaccataaaaatgatggtgatggtgatagccacaagtgaagacaagtgttcaacatgagagagaagaaagagaaaaactagatgcaagggctcaatgcaaaggtgttttagt

SEQ ID NO: 41982 - DNA, 964 bp, Zea Mays
aacatactcctacgcctgtctctgttcacaactcttccgagcacgcggccgtctcctttgtcatcatcatcagctcagatctagcagcttcgccttctcagacgcgcccacttcgcaaccgccgctgtgcctatgctaccgcatgggcctctgcgcctgggaggcttgcggctgccaggcttaagtcacggggcagcaggagttcagattttttttaggcctctgaaacaaggctagcgcatattagcatcgagagtcaggagagtacgaatgggaagtaccgtcataaaattatctttgctactagcaataggaagcaccgtcataaaattaactctggtaataaaatcgattggatatatattgtttctaggaaactaggaaggatcccgtgtagaaagtgtggatagctagcctttttcatcggatcatttggttttttcttgaaatatttctttcaaaacagtctcacttttttcttaagttgtattggtgctccctaagatcgaaagcaggaatactacttttctgtaaaatcacaaaaatgcacacatttgggacctttcctaagctgtgtcttcgagcaaccaaaaagctgatgttagtttattttcattttttttgagagaagaaaattctttgcttgatgcttaatcagagatgaaaatattgatcattttttacatgtgtgctgatcatttttttactggactgctgtcaggtataattggagtgctgtcataagtggagtgttgttagttacatgtgtgctgatcattctaatcacattgttcgtcgttaatcatgtgaagaaaatattcaaagttataacttgaatttttgttgaatctggcaattgtatggcctagaatttattgttcattagtcagaaagactacgttcattagttcaggtcttgctgatttactttgcagcaacatggtatataaacctgatgcattct

SEQ ID NO: 41983 - DNA, 960 bp, Zea Mays
gttcacaactcttccgagcacgcggccgtctcctttgtcatcatcatcagctcagatctagcagcttcgccttctcagattcgtttgttctcgccagacgcgcccacttcgcaaccgccgctgtgcctatgctaccgcatgggcctctgcgcctgggaggcttgcggctgccaggcttaagtcacggggcagcaggagttcagattttttttaggcctctgaaacaaggctagcgcatattagcatcgagagtcaggagagtacgaatgggaagtaccgtcataaaattatctttgctactagcaataggaagcaccgtcataaaattaactctggtaataaaatcgattggatatatattgtttctaggaaactaggaaggatcccgtgtagaaagtgtggatagctagcctttttcatcggatcatttggttttttcttgaaatatttctttcaaaacagtctcacttttttcttaagttgtattggtgctccctaagatcgaaagcaggaatactacttttctgtaaaatcacaaaaatgcacacatttgggacctttcctaagctgtgtcttcgagcaaccaaaaagctgatgttagtttattttcattttttttgagagaagaaaattctttgcttgatgcttaatcagagatgaaaatattgatcattttttacatgtgtgctgatcatttttttactggactgctgtcaggtataattggagtgctgtcataagtggagtgttgttagttacatgtgtgctgatcattctaatcacattgttcgtcgttaatcatgtgaagaaaatattcaaagttataacttgaatttttgttgaatctggcaattgtatggcctagaatttattgttcattagtcagaaagactacgttcattagttcaggtcttgctgatttactttgcagcaacatggtatataaacctgatgcattct

SEQ ID NO: 41984 - DNA, 1537 bp, Zea Mays
gttcacaactcttccgagcacgcggccgtctcctttgtcatcatcatcagctcagatctagcagcttcgccttctcaggtggccatttggtacaggcgtcggactcccaggaggatgaccggtggcaagaggttcggcggcgggcgggtgccgacggggaccccgtccctcgcgtggtcgtccgtcgtcatcgtcgcctccctcctcgttggcgcctccatcgtccacaacatctacaagcctgacatgaccattccacctgtggagggtgccgccggcggcggcggccaagaaagctgagctacgaatggctggacactgcatgcaagagaggaggctgggcatgggagtagtgagggaccggccatcagcacctttttttttttgttctagaacaaaaacgatattatgttgttcttttctgttttgctaccaaaagatgtgaggctgcatagtatttgcttcgttaggcgctactggtcacgcgtaaccatggtatatgtacgttgattttgttttttctaatgcctaataatcactacactcaaaatgtacgggcttgtggtggcactgcggcgggaggtggttggttggttccacttccatccaggctgctccgtggatgcgacggtgattcacgagcggatacgcaagtgtagctgtggcctgcacttggggccggattgtgacccattatcaggcttaggcctgcgtgcggggtcgtttgccgttgtgtacacatggaagaacggggcaccaagtcttgcttccattgccgccgccccttccgtgcacgcgcgcacggcgcacctatacatatgcaccgccccatgccccgcacgccctccctctcccagcgacaccagagagccgaatttacttcgttctcagcctccgttgcccctcgcgcgcgttacgctgtaccaccaggctcgatcggtcgatcctttgctgggcgtcagagaagcatggcagcagctggcaagtcgtcggccatggaggaggtggtggcggcggcggattgactggcaggccgttgacaggggcatcgcctacctgctcatggtggccacgtacgcgcttcactagagccgtcttggcttcggtctgctccggccggcggcagagatcacgggaaggaaggctttgtgagctctgcttcccggcctcagcgtgagagttcccccgcgccaaacttcattcgtttctcttccactcttcctcttgtatggagatggagatggagatatgcctgtgtctttaccactagaaaaaaatgttgttttttctattgtctttctgtgattattctgtgcaaaatggtcaattgttgccaaaacgatcaatgttaccatggtttcggcttgcgtctatcttctgttgtgattgggttcgacattcagagtttgcacaaggccatacatagcatacatatatggcagagtttgcagcgtgaggaaaactgtcatcgccgtgtattttagcattatacataacataccccatccgttcattccaataggcatataagctacca

SEQ ID NO: 41985 - DNA, 1792 bp, Zea Mays
ccgccgctccaggccgcagctcctccgccacagctccaggccgccgcttggccgcgccaggccgctgctcggccgcgccaggccgccgctcagccgccagcagctccaggccgcgctccaggccgctcccgctgtctgccggccactacagagacagccaaccctccagccctgcttcactggtgactggtgagtggtgagtaccatcttaatttgttgaaggaagaaggattgaggtgaggtgcttcctgctgtcatctgaacatatgcattcactggtgactggtgactggtgagtggtgagtggtgagtggtgagtaccatcttattgcagaatagattggaggagaaatggctgattttagcacggaagcatctgcagctggctctcaaatacgaagtgatggatatgatccactgaaagatccaaaaaggaaacccaaatctgatgatccaggctggaagtatgcctattatgtagagcctggcaagcgagagttgatccaatgcgccctttgcccgaggaaaattaaaggaggaattctgagggtgaagaaacatcttgtgggcggattcttgaggatgatgaagatgaagatgatgttgatgagggtgatgagaatgaagatgatgatgatgctgttgatgagggtgatgagaatgaagacgatgacaattttgtgcttgacgaccttgacatggatgatgaagaagaaacaaacaatagtggtggccgtggtgatgagcaagacaaggatgatgttggtttagatgatttggatgatgactgcccccgcctctacacccgccatccagcccgcacgtcgcaatcccgtcgcggccgccgcgaaccactcgcccgcacgccctacgcccatccgcccgcccgcacgctgcaaacccagccgcgaccatggcgaaccgcccgccctaccgcccggtcgggccaggcggcgtgtcaatctctgagatctacagggacgcacgacgctgccgatggcgaaacgaggaaaatccgcacctcggctccagatccgcccgtagccgccgttcggcttccgtggaacccaccggcgccggcagtccccacgatcattctgatctcgctcgctgcgctcctcatccgcatgctggtttccgtgggcccctactccggtcagggtgcggcgcccaagttcggcaactatgaggcgcagcggcactggatggagctcacactccacctcacgcccgccgactggtaccgcaacacctccgacaatgaccttgcctactggggcctggactacctgtccctctccgcctaccagagcctcgtccacgggcagctggtgccgtggtcgagcttggacccgaacttctcaaccgggggcaactttgagttcgccttcaacgaggccaacttctccaatcaggaattgcagattgaggtcatcgcgggggacgatgacgcgccggggtctaggggcgacgatgctggaggaggtggcctcgccgactgggcgcgccattgcaagcaccgacgctgggagttcttcaaggagaaaggtacacgacaatataggttataatgggaaatgaattggagaaggatgaagaggaatttcaatttggagttgctgcgatgtacatgtacgaattatctaacactttgatctctcaccaaccacaataattgtcaaacgaatttacaagaataaaaccatggctttgcgggtggagaagcaataggagaagctttcctgtaacttgtatttgcccagaagattgaactcctagcggctcacctgag

SEQ ID NO: 41986 - DNA, 4522 bp, Zea Mays
ccgccgctccaggccgcagctcctccgccacagctccaggccgccgcttggccgcgccaggccgctgctcggccgcgccaggccgccgctcagccgccagcagctccaggccgcgctccaggccgctcccgctgtctgccggccactacagagacagccaaccctccagccctgcttcactggtgactggtgagtggtgagtaccatcttaatttgttgaaggaagaaggattgaggtgaggtgcttcctgctgtcatctgaacatatgcattcactggtgactggtgactggtgagtggtgagtggtgagtggtgagtaccatcttattgcagaatagattggaggagaaatggctgattttagcacggaagcatctgcagctggctctcaaatacgaagtgatggatatgatccactgaaagatccaaaaaggaaacccaaatctgatgatccaggctggaagtatgcctattatgtagagcctggcaagcgagagttgatccaatgcgccctttgcccgaggaaaattaaaggaggaattctgagggtgaagaaacatcttgtgggcggattcttgaggatgatgaagatgaagatgatgttgatgagggtgatgagaatgaagatgatgatgatgctgttgatgagggtgatgagaatgaagacgatgacaattttgtgcttgacgaccttgacatggatgatgaagaagaaacaaacaatagtggtggccgtggtgatgagcaagacaaggatgatgttggtttagatgatttggatgatgactgcccccgcctctacacccgccatccagcccgcacgtcgcaatcccgtcgcggccgccgcgaaccactcgcccgcacgccctacgcccatccgcccgcccgcacgctgcaaacccagccgcgaccatggcgaaccgcccgccctaccgcccggtcgggccaggcggcgtgtcaatctctgagatctacagggacgcacgacgctgccgatggcgaaacgaggaaaatccgcacctcggctccagatccgcccgtagccgccgttcggcttccgtggaacccaccggcgccggcagtccccacgatcattctgatctcgctcgctgcgctcctcatccgcatgctggtttccgtgggcccctactccggtcagggtgcggcgcccaagttcggcaactatgaggcgcagcggcactggatggagctcacactccacctcacgcccgccgactggtaccgcaacacctccgacaatgaccttgcctactggggcctggactacctgtccctctccgcctaccagagcctcgtccacgggcagctggtgccgtggtcgagcttggacccgaacttctcaaccgggggcaactttgagttcgccttcaacgaggccaacttctccaatcaggaattgcagattgaggtcatcgcgggggacgatgacgcgccggggtctaggggcgacgatgctggaggaggtggcctcgccgactgggcgcgccattgcaagcaccgacgctgggagttcttcaaggagaaagggagttgtgtgcctcattattttggtgtaaactctgattttcgtaggtacacgacaatataggttataatgggaaatgaattggagaaggatgaagaggaatttcaatttggagttgctgcgatgtacatgtacgaattatctaacactttgatctctcaccaaccacaataattgtcaaacgaatttacaagaataaaaccatggctttgcgggtggagaagcaataggagaagctttcctgtaacttgtatttgcccagaagattgaactcctagcggctcacctgagggtcaagcaagtgaactacatcaggcttcctgaccatcctgggcaggctttacactattctcagactgcggctgctctcctctccagcagctcggggcgcttgattgacaatcccgacccttatctctgcggtggagccttgaagctctgctcatggacgtcgaaaaatcataggaccctcatgatgccagtggcaactagctaggaatagtgctattagtgtcgtgctgtatgtgtcaaggttattgcatttctcgtgcgactacaaaggatgacagaagaaattaactaaatgaaaagtattgttctttagttcaggagaaaatgacgatagtttaatttattcatattactataatatgcaggtcctgaataccagcgcatctaattaagaatttctaaatgtgagtcactgcaagcaacctctctgacgccttccttgcctcttgttttgcacaaagtgttgtttcgtatcgattttcacattaacatgattattgtttccaattcccaactatgattttgttcttggatcaagaatgaacaatagcccttttggtgctagataaaggaccaacctcccatcatctagcaccaacaactttttgcccttttccttttggtcctgttattttcttttgcataggatgggatggaaggcacaaagcttgtttgcgtatcgtcttcccttgtcttgagttctagagaggtccaattgagttttagtagttgaacctcaaggaaggcacatcttctttgtgcgcttattgtattggttgtcagcatctttgacaagtcacatattggctcttcaaaatctgattttggttctatttctaacaaagcagtgggagacatggcacaactaggttgctccctctttagtttttaacatgtttggcttccgagcaaactttctccagaccccaagaaaatataagatccgatcagatatgtgtcgatgctcatctcagcgtactcccgttgcaacgggcacacacccagtacagctgatatccggaacgagcccgctcggccaaatcgaccggacctgagcgctctcgttctctctactcctccgttctctctcacgcgagcagtgcatccttgagccaccgccgccgtgaggagctccgcccgtccgccgtcatccgtcaaatcagggagcttcacagtgatggatctgaagagaagtgggaaatggcagaaaagacccggcagctaggtggccatttggtacaggcgtcggactcccaggaggatgaccggtggcaagaggttcggcggcgggcgggtgccgacggggaccccgtccctcgcgtggtcgtccgtcgtcatcgtcgcctccctcctcgttggcgcctccatcgtccacaacatctacaagcctgacatgaccattccacctgtggagggtgccgccggcggcggcggccaagaaagctgagctacgaatggctggacactgcatgcaagagaggaggctgggcatgggagtagtgagggaccggccatcagcacctttttttttttgttctagaacaaaaacgatattatgttgttcttttctgttttgctaccaaaagatgtgaggctgcatagtatttgcttcgttaggcgctactggtcacgcgtaaccatggtatatgtacgttgattttgttttttctaatgcctaataatcactacactcaaaatgtacgggcttgtggtggcactgcggcgggaggtggttggttggttccacttccatccaggctgctccgtggatgcgacggtgattcacgagcggatacgcaagtgtagctgtggcctgcacttggggccggattgtgacccattatcaggcttaggcctgcgtgcggggtcgtttgccgttgtgtacacatggaagaacggggcaccaagtcttgcttccattgccgccgccccttccgtgcacgcgcgcacggcgcacctatacatatgcaccgccccatgccccgcacgccctccctctcccagcgacaccagagagccgaatttacttcgttctcagcctccgttgcccctcgcgcgcgttacgctgtaccaccaggctcgatcggtcgatcctttgctgggcgtcagagaagcatggcagcagctggcaagtcgtcggccatggaggaggtggtggcggcggcggattgactggcaggccgttgacaggggcatcgcctacctgctcatggtggccacgtacgcgcttcactagagccgtcttggcttcggtctgctccggccggcggcagagatcacgggaaggaaggctttgtgagctctgcttcccggcctcagcgtgagagttcccccgcgccaaacttcattcgtttctcttccactcttcctcttgtatggagatggagatggagatatgcctgtgtctttaccactagaaaaaaatgttgttttttctattgtctttctgtgattattctgtgcaaaatggtcaattgttgccaaaacgatcaatgttaccatggtttcggcttgcgtctatcttctgttgtgattgggttcgacattcagagtttgcacaaggccatacatagcatacatatatggcagagtttgcagcgtgaggaaaactgtcatcgccgtgtattttagcattatacataacataccccatccgttcattccaataggcatataagctacca

SEQ ID NO: 41987 - DNA, 1951 bp, Zea Mays
ggaaggcacaaagcttgtttgcgtatcgtcttcccttgtcttgagttctagagaggtccaattgagttttagtagttgaacctcaaggaaggcacatcttctttgtgcgcttattgtattggttgtcagcatctttgacaagtcacatattggctcttcaaaatctgattttggttctatttctaacaaagcagtgggagacatggcacaactaggttgctccctctttagtttttaacatgtttggcttccgagcaaactttctccagaccccaagaaaatataagatccgatcagatatgtgtcgatgctcatctcagcgtactcccgttgcaacgggcacacacccagtacagctgatatccggaacgagcccgctcggccaaatcgaccggacctgagcgctctcgttctctctactcctccgttctctctcacgcgagcagtgcatccttgagccaccgccgccgtgaggagctccgcccgtccgccgtcatccgtcaaatcaggcgtcggactcccaggaggatgaccggtggcaagaggttcggcggcgggcgggtgccgacggggaccccgtccctcgcgtggtcgtccgtcgtcatcgtcgcctccctcctcgttggcgcctccatcgtccacaacatctacaagcctgacatgaccattccacctgtggagggtgccgccggcggcggcggccaagaaagctgagctacgaatggctggacactgcatgcaagagaggaggctgggcatgggagtagtgagggaccggccatcagcacctttttttttttgttctagaacaaaaacgatattatgttgttcttttctgttttgctaccaaaagatgtgaggctgcatagtatttgcttcgttaggcgctactggtcacgcgtaaccatggtatatgtacgttgattttgttttttctaatgcctaataatcactacactcaaaatgtacgggcttgtggtggcactgcggcgggaggtggttggttggttccacttccatccaggctgctccgtggatgcgacggtgattcacgagcggatacgcaagtgtagctgtggcctgcacttggggccggattgtgacccattatcaggcttaggcctgcgtgcggggtcgtttgccgttgtgtacacatggaagaacggggcaccaagtcttgcttccattgccgccgccccttccgtgcacgcgcgcacggcgcacctatacatatgcaccgccccatgccccgcacgccctccctctcccagcgacaccagagagccgaatttacttcgttctcagcctccgttgcccctcgcgcgcgttacgctgtaccaccaggctcgatcggtcgatcctttgctgggcgtcagagaagcatggcagcagctggcaagtcgtcggccatggaggaggtggtggcggcggcggattgactggcaggccgttgacaggggcatcgcctacctgctcatggtggccacgtacgcgcttcactagagccgtcttggcttcggtctgctccggccggcggcagagatcacgggaaggaaggctttgtgagctctgcttcccggcctcagcgtgagagttcccccgcgccaaacttcattcgtttctcttccactcttcctcttgtatggagatggagatggagatatgcctgtgtctttaccactagaaaaaaatgttgttttttctattgtctttctgtgattattctgtgcaaaatggtcaattgttgccaaaacgatcaatgttaccatggtttcggcttgcgtctatcttctgttgtgattgggttcgacattcagagtttgcacaaggccatacatagcatacatatatggcagagtttgcagcgtgaggaaaactgtcatcgccgtgtattttagcattatacataacataccccatccgttcattccaataggcatataagctacca

SEQ ID NO: 41988 - DNA, 1591 bp, Zea Mays
gtggaactccagtctctccactccaccactgctcgtctaacccggtcttcaaatttgagcttttctctctctctctctctctctctctctctctctgcgccaacaaattctccagccttacagtagattttggtggccatttggtacaggcgtcggactcccaggaggatgaccggtggcaagaggttcggcggcgggcgggtgccgacggggaccccgtccctcgcgtggtcgtccgtcgtcatcgtcgcctccctcctcgttggcgcctccatcgtccacaacatctacaagcctgacatgaccattccacctgtggagggtgccgccggcggcggcggccaagaaagctgagctacgaatggctggacactgcatgcaagagaggaggctgggcatgggagtagtgagggaccggccatcagcacctttttttttttgttctagaacaaaaacgatattatgttgttcttttctgttttgctaccaaaagatgtgaggctgcatagtatttgcttcgttaggcgctactggtcacgcgtaaccatggtatatgtacgttgattttgttttttctaatgcctaataatcactacactcaaaatgtacgggcttgtggtggcactgcggcgggaggtggttggttggttccacttccatccaggctgctccgtggatgcgacggtgattcacgagcggatacgcaagtgtagctgtggcctgcacttggggccggattgtgacccattatcaggcttaggcctgcgtgcggggtcgtttgccgttgtgtacacatggaagaacggggcaccaagtcttgcttccattgccgccgccccttccgtgcacgcgcgcacggcgcacctatacatatgcaccgccccatgccccgcacgccctccctctcccagcgacaccagagagccgaatttacttcgttctcagcctccgttgcccctcgcgcgcgttacgctgtaccaccaggctcgatcggtcgatcctttgctgggcgtcagagaagcatggcagcagctggcaagtcgtcggccatggaggaggtggtggcggcggcggattgactggcaggccgttgacaggggcatcgcctacctgctcatggtggccacgtacgcgcttcactagagccgtcttggcttcggtctgctccggccggcggcagagatcacgggaaggaaggctttgtgagctctgcttcccggcctcagcgtgagagttcccccgcgccaaacttcattcgtttctcttccactcttcctcttgtatggagatggagatggagatatgcctgtgtctttaccactagaaaaaaatgttgttttttctattgtctttctgtgattattctgtgcaaaatggtcaattgttgccaaaacgatcaatgttaccatggtttcggcttgcgtctatcttctgttgtgattgggttcgacattcagagtttgcacaaggccatacatagcatacatatatggcagagtttgcagcgtgaggaaaactgtcatcgccgtgtattttagcattatacataacataccccatccgttcattccaataggcatataagctacca

SEQ ID NO: 41989 - DNA, 3397 bp, Zea Mays
ctccacttcagatccaatccacgctacctcgtcgacccgttagcccgtttgctacctctacactcccgtctccacctcgtttcccccgcaggcccgcactcgcaaatctcctccccgcgcggcgcgcctgcacctcccggtccggcgagaggccaccgcccgcgcggccgcgctcctcacactaccacccgccccctctacgcaaggcctagaagcgccgcctccacggctgcacctccgccagttgcgctcctcgcctcgccgctgcctccgtagccgtcgcgggcgccaccatgccgctccggttggatatcaagaggaagctcgcgcagaggtcggagagggtgaagtccgtggatctgcatccgacagagccatggattttgtcgagtctttactcaggaagcgtttgtgtatggaactaccagactcagacaatggtgaaatcatttgaagtcacggatttaccagttcgttcggctaaatttattgcacgtaagcaatgggttgttgctggtgccgacgatatgttcatccgtgtgtacaactataacacaatggacaaggtcaaggtttttgaagctcacactgattacattagatgtgtggctgttcatccaacccagccctttgtgatatcatcatccgatgacatgctgattaagctgtgggattgggataaaggctgggtgtgtactcaaatattcgaagggcattctcactatgtgatgcaagttacatttaacccaaaagataccaacacctttgctagtgcttccctggatcgcacaataaagatatggagtcttggttcccctgatccaaatttcacactagatggccattcgaaaggtgtgaactgtgttgattacttcactggtggtgaccgaccatacttaattactggctctgatgatcagactgcaaaggtttgggactaccaaacaaagagctgcgttcaaacacttgaaggacatgcacataatgtttctgctgtatgtttccacccagagctacctataataattactggttcagaggatgggacagttcgaatgtggcattctactacctacaggctcgagaacactcttaactatggccttgagcgagtttgggctttagggtatatgaaagggtcaagaagggttgtgattggatacgatgaagggacaataatgataaaaattggtcgtgaagttcctgttgctagcatggatagcagtggaaaaattatatgggcaaagcataatgaaatccaaactgttaatatcaagagtgttggtgcagacaatgagatcgcagatggtgatcggttaccgttggccgtgaaggagttgggaagctgtgacctttatccacaaagtttaaggcacaatccgaatgggagatttgtagttgtatgtggagatggagaatacataatatacacagccttagcatggagaaacagatcatttgggtctgcacttgaatttgtttggtcaactgatggagaatatgccatcagagaaagcacctcgaggataaagatatacagtaaaaatttccaggagaagaaaagtataaggccatccttttccgctgaacggatatttggtggagtgttacttgctatgtgtacaaatgacttcatttgcttctatgattgggcagaatgcagattgatacgtcgaatcgatgtcaatgtgaagaatctttactgggctgacagtggtgatttagtaacaattgcaagtgatacgtcattctacattttgaaatataatagggatgtagtttcatctcatttggatagagggggttcagctggtgaggaaggtgtggaagatgcctttgaactgcttcatgagatcaacgaacgtgtccggactgggctatgggttggcgattgtttcatctacaataattcttcatggcgtcttaattactgtgtaggaggagaggtcacaactttgtttcacttggatcggccaatgtatttattaggatatcttgcaaaccaaagccgtgtctatcttattgataagcaatttaatgttgtggggtatactttactccttagtttgatcgaatataaaacacttgtaatgcgtggggatttcgatcgcgcgaatgatgttttatcatctataccaaaggaacaatatgacagtgtggcgcgtttcttggaatcacggggaatgttggaggaagccctcgagatagcaactgacactaattacagatttgacctggctgtgcaacttggtcgacttgaaattgcgaaggcgattgctaccgaggtgcaaagtgagtccaagtggaagatattaggggagttagctatgtcaagtggaaagcttgagatggcagaggagtgtcttctacatgctatggacctcagtggtttgttgcttttgtattcttcccttggggatgctgaaggcattaacaaattggcatctgtagccaaagaacaaggaaagaacaatgttgctttcctttgtttcttcatgctaggaaagctggaagagtgtcttcaattgctaatagaaagcaatcgtattccggaagcagcattgatggcaagatcttatcttcccagcaaagtccctgagattgtagcattgtggaaaaaggatctccagaaggtaaactcaaaagcagcagagtcgctggctgatcctaatgagtacccaaacttatttgaagactggcagattgctctcaacgtagaagctgctgttgcctctaaaaggagtatctatccatcggccgaggagtacatgattcatgctgaaaggtcaaatgagagtttagtggaagcttttaaaaatatgcatgtacatgaagagatggtaccagatgataatgaagatactgttcacgaggttattgaggatggtggagtagagagtcaagaagatgctgttgaggtcgatgcagaggatgacggagtagaagaaagtcaagatgaagctgttgaggttgaggctgagggttcaagtgatggtgctgtccttgtgaatggaaacagtagcgaggaacagtgggtgctgactgagcaatagtggattaacggatcagcaacttcgcttcagcggtgtagtttgtaaaggaaattttgtgcttccctttctacatgtagatcaggccttaggcgtcgaagacattttatagcctaccatgaggtactcgtttcacggagatggtatatgatataggtgatcggagtgatattttacatggtgcatatagtagcttgtcgaactgagaatgttttacctgtgatgtacatcggacttgggagctttgtatcattgtgttacaccttttcaatggtggcgaataaatttacagcagatgttttcaatagccttttagtaaatgtgtgaacgatttgcgttgtgctatg

SEQ ID NO: 41990 - DNA, 3422 bp, Zea Mays
tctacactcccgtctccacctcgtttcccccgcaggcccgcactcgcaaatctcctccccgcgcggcgcgcctgcacctcccggtccggcgagaggccaccgcccgcgcggccgcgctcctcacactaccacccgccccctctacgcaaggcctagaagcgccgcctccacggctgcacctccgccagttgcgctcctcgcctcgccgctgcctccgtagccgtcgcgggcgccaccatgccgctccggttggatatcaagaggaagctcgcgcagaggtcggagagggtgaagtccgtggatctgcatccgacagagccatggattttgtcgagtctttactcaggaagcgtttgtgtatggaactaccagactcagacaatggtgaaatcatttgaagtcacggatttaccagttcgttcggctaaatttattgcacgtaagcaatgggttgttgctggtgccgacgatatgttcatccgtgtgtacaactataacacaatggacaaggtcaaggtttttgaagctcacactgattacattagatgtgtggctgttcatccaacccagccctttgtgatatcatcatccgatgacatgctgattaagctgtgggattgggataaaggctgggtgtgtactcaaatattcgaagggcattctcactatgtgatgcaagttacatttaacccaaaagataccaacacctttgctagtgcttccctggatcgcacaataaagatatggagtcttggttcccctgatccaaatttcacactagatggccattcgaaaggtgtgaactgtgttgattacttcactggtggtgaccgaccatacttaattactggctctgatgatcagactgcaaaggtttgggactaccaaacaaagagctgcgttcaaacacttgaaggacatgcacataatgtttctgctgtatgtttccacccagagctacctataataattactggttcagaggatgggacagttcgaatgtggcattctactacctacaggctcgagaacactcttaactatggccttgagcgagtttgggctttagggtatatgaaagggtcaagaagggttgtgattggatacgatgaagggacaataatgataaaaattggtcgtgaagttcctgttgctagcatggatagcagtggaaaaattatatgggcaaagcataatgaaatccaaactgttaatatcaagagtgttggtgcagacaatgagatcgcagatggtgatcggttaccgttggccgtgaaggagttgggaagctgtgacctttatccacaaagtttaaggcacaatccgaatgggagatttgtagttgtatgtggagatggagaatacataatatacacagccttagcatggagaaacagatcatttgggtctgcacttgaatttgtttggtcaactgatggagaatatgccatcagagaaagcacctcgaggataaagatatacagtaaaaatttccaggagaagaaaagtataaggccatccttttccgctgaacggatatttggtggagtgttacttgctatgtgtacaaatgacttcatttgcttctatgattgggcagaatgcagattgatacgtcgaatcgatgtcaatgtgaagaatctttactgggctgacagtggtgatttagtaacaattgcaagtgatacgtcattctacattttgaaatataatagggatgtagtttcatctcatttggatagagggggttcagctggtgaggaaggtgtggaagatgcctttgaactgcttcatgagatcaacgaacgtgtccggactgggctatgggttggcgattgtttcatctacaataattcttcatggcgtcttaattactgtgtaggaggacaggtcacaactttgtttcacttggatcggccaatgtatttattaggatatcttgcaaaccaaagccgtgtctatcttattgataagcaatttaatgttgtggggtatactttactccttagtttgatcgaatataaaacacttgtaatgcgtggggatttcgatcgcgcgaatgatgttttatcatctataccaaaggaacaatatgacagtgtggcgcgtttcttggaatcacggggaatgttggaggaagccctcgagatagcaactgacactaattacagatttgacctggctgtgcaacttggtcgacttgaaattgcgaaggcgattgctaccgaggtgcaaagtgagtccaagtggaagatattaggggagttagctatgtcaagtggaaagcttgagatggcagaggagtgtcttctacatgctatggacctcagtggtttgttgcttttgtattcttcccttggggatgctgaaggcattaacaaattggcatctgtagccaaagaacaaggaaagaacaatgttgctttcctttgtttcttcatgctaggaaagctggaagagtgtcttcaattgctaatagaaagcaatcgtattccggaagcagcattgatggcaagatcttatcttcccagcaaagtccctgagattgtagcattgtggaaaaaggatctccagaaggtaaactcaaaagcagcagagtcgctggctgatcctaatgagtacccaaacttatttgaagactggcagattgctctcaacgtagaagctgctgttgcctctaaaaggagtatctatccatcggccgaggagtacatgattcatgctgaaaggtcaaatgagagtttagtggaagcttttaaaaatatgcatgtacatgaagagatggtaccagatgataatgaagatactgttcacgaggttattgaggatggtggagtagagagtcaagaagatgctgttgaggtcgatgcagaggatgacggagtagaagaaagtcaagatgaagctgttgaggttgaggctgagggttcaagtgatggtgctgtccttgtgaatggaaacagtagcgaggaacagtgggtgctgactgagcaatagtggattaacggatcagcaacttcgcttcagcggtgtagtttgtaaaggttgctgactgctatagagtacatgatatccattttttccccaacggtattaatcaacacttccatctttgtgcccgataggaaattttgtgcttccctttctacatgtagatcaggccttaggcgtcgaagacattttatagcctaccatgaggtactcgtttcacggagatggtatatgatataggtgatcggagtgatattttacatggtgcatatagtagcttgtcgaactgagaatgttttacctgtgatgtacatcggacttgggagctttgtatcattgtgttacaccttttcaatggtggcgaataaatttacagcagatgttttcaatagccttttagtaaatgtgtgaacgatttgcgttgtgctatg

SEQ ID NO: 41991 - DNA, 3451 bp, Zea Mays
ctcgtttcccccgcaggcccgcactcgcaaatctcctccccgcgcggcgcgcctgcacctcccggtccggcgagaggccaccgcccgcgcggccgcgctcctcacactaccacccgccccctctacgcaaggcctagaagcgccgcctccacggctgcacctccgccagttgcgctcctcgcctcgccgctgcctccgtagccgtcgcgggcgccaccatgccgctccggttggatatcaagaggaagctcgcgcagaggtcggagagggtgaagtccgtggatctgcatccgacagagccatggattttgtcgagtctttactcaggaagcgtttgtgtatggaactaccagactcagacaatggtgaaatcatttgaagtcacggatttaccagttcgttcggctaaatttattgcacgtaagcaatgggttgttgctggtgccgacgatatgttcatccgtgtgtacaactataacacaatggacaaggtcaaggtttttgaagctcacactgattacattagatgtgtggctgttcatccaacccagccctttgtgatatcatcatccgatgacatgctgattaagctgtgggattgggataaaggctgggtgtgtactcaaatattcgaagggcattctcactatgtgatgcaagttacatttaacccaaaagataccaacacctttgctagtgcttccctggatcgcacaataaagatatggagtcttggttcccctgatccaaatttcacactagatggccattcgaaaggtgtgaactgtgttgattacttcactggtggtgaccgaccatacttaattactggctctgatgatcagactgcaaaggtttgggactaccaaacaaagagctgcgttcaaacacttgaaggacatgcacataatgtttctgctgtatgtttccacccagagctacctataataattactggttcagaggatgggacagttcgaatgtggcattctactacctacaggctcgagaacactcttaactatggccttgagcgagtttgggctttagggtatatgaaagggtcaagaagggttgtgattggatacgatgaagggacaataatgataaaaattggtcgtgaagttcctgttgctagcatggatagcagtggaaaaattatatgggcaaagcataatgaaatccaaactgttaatatcaagagtgttggtgcagacaatgagatcgcagatggtgatcggttaccgttggccgtgaaggagttgggaagctgtgacctttatccacaaagtttaaggcacaatccgaatgggagatttgtagttgtatgtggagatggagaatacataatatacacagccttagcatggagaaacagatcatttgggtctgcacttgaatttgtttggtcaactgatggagaatatgccatcagagaaagcacctcgaggataaagatatacagtaaaaatttccaggagaagaaaagtataaggccatccttttccgctgaacggatatttggtggagtgttacttgctatgtgtacaaatgacttcatttgcttctatgattgggcagaatgcagattgatacgtcgaatcgatgtcaatgtgaagaatctttactgggctgacagtggtgatttagtaacaattgcaagtgatacgtcattctacattttgaaatataatagggatgtagtttcatctcatttggatagagggggttcagctggtgaggaaggtgtggaagatgcctttgaactgcttcatgagatcaacgaacgtgtccggactgggctatgggttggcgattgtttcatctacaataattcttcatggcgtcttaattactgtgtaggaggacaggtcacaactttgtttcacttggatcggccaatgtatttattaggatatcttgcaaaccaaagccgtgtctatcttattgataagcaatttaatgttgtggggtatactttactccttagtttgatcgaatataaaacacttgtaatgcgtggggatttcgatcgcgcgaatgatgttttatcatctataccaaaggaacaatatgacagtgtggcgcgtttcttggaatcacggggaatgttggaggaagccctcgagatagcaactgacactaattacagatttgacctggctgtgcaacttggtcgacttgaaattgcgaaggcgattgctaccgaggtgcaaagtgagtccaagtggaagatattaggggagttagctatgtcaagtggaaagcttgagatggcagaggagtgtcttctacatgctatggacctcagtggtttgttgcttttgtattcttcccttggggatgctgaaggcattaacaaattggcatctgtagccaaagaacaaggaaagaacaatgttgctttcctttgtttcttcatgctaggaaagctggaagagtgtcttcaattgctaatagaaagcaatcgtattccggaagcagcattgatggcaagatcttatcttcccagcaaagtccctgagattgtagcattgtggaaaaaggatctccagaaggtaaactcaaaagcagcagagtcgctggctgatcctaatgagtacccaaacttatttgaagactggcagattgctctcaacgtagaagctgctgttgcctctaaaaggagtatctatccatcggccgaggagtacatgattcatgctgaaaggtcaaatgagagtttagtggaagcttttaaaaatatgcatgtacatgaagagatggtaccagatgataatgaagatactgttcacgaggttattgaggatggtggagtagagagtcaagaagatgctgttgaggtcgatgcagaggatgacggagtagaagaaagtcaagatgaagctgttgaggttgaggctgagggttcaagtgatggtgctgtccttgtgaatggaaacagtagcgaggaacagtggggtacgaaaaatgaagaaccatcagcataaaagctgtagttgagcaagttgctgactgagcaatagtggattaacggatcagcaacttcgcttcagcggtgtagtttgtaaaggttgctgactgctatagagtacatgatatccattttttccccaacggtattaatcaacacttccatctttgtgcccgataggaaattttgtgcttccctttctacatgtagatcaggccttaggcgtcgaagacattttatagcctaccatgaggtactcgtttcacggagatggtatatgatataggtgatcggagtgatattttacatggtgcatatagtagcttgtcgaactgagaatgttttacctgtgatgtacatcggacttgggagctttgtatcattgtgttacaccttttcaatggtggcgaataaatttacagcagatgttttcaatagccttttagtaaatgtgtgaacgatttgcgttgtgctatg

SEQ ID NO: 41992 - DNA, 3274 bp, Zea Mays
gctcctcacactaccacccgccccctctacgcaaggcctagaagcgccgcctccacggctgcacctccgccagttgcgctcctcgcctcgccgctgcctccgtagccgtcgcgggcgccaccatgccgctccggttggatatcaagaggaagctcgcgcagaggtcggagagggtgaagtccgtggatctgcatccgacagagccatggattttgtcgagtctttactcaggaagcgtttgtgtatggaactaccagactcagacaatggtgaaatcatttgaagtcacggatttaccagttcgttcggctaaatttattgcacgtaagcaatgggttgttgctggtgccgacgatatgttcatccgtgtgtacaactataacacaatggacaaggtcaaggtttttgaagctcacactgattacattagatgtgtggctgttcatccaacccagccctttgtgatatcatcatccgatgacatgctgattaagctgtgggattgggataaaggctgggtgtgtactcaaatattcgaagggcattctcactatgtgatgcaagttacatttaacccaaaagataccaacacctttgctagtgcttccctggatcgcacaataaagatatggagtcttggttcccctgatccaaatttcacactagatggccattcgaaaggtgtgaactgtgttgattacttcactggtggtgaccgaccatacttaattactggctctgatgatcagactgcaaaggtttgggactaccaaacaaagagctgcgttcaaacacttgaaggacatgcacataatgtttctgctgtatgtttccacccagagctacctataataattactggttcagaggatgggacagttcgaatgtggcattctactacctacaggctcgagaacactcttaactatggccttgagcgagtttgggctttagggtatatgaaagggtcaagaagggttgtgattggatacgatgaagggacaataatgataaaaattggtcgtgaagttcctgttgctagcatggatagcagtggaaaaattatatgggcaaagcataatgaaatccaaactgttaatatcaagagtgttggtgcagacaatgagatcgcagatggtgatcggttaccgttggccgtgaaggagttgggaagctgtgacctttatccacaaagtttaaggcacaatccgaatgggagatttgtagttgtatgtggagatggagaatacataatatacacagccttagcatggagaaacagatcatttgggtctgcacttgaatttgtttggtcaactgatggagaatatgccatcagagaaagcacctcgaggataaagatatacagtaaaaatttccaggagaagaaaagtataaggccatccttttccgctgaacggatatttggtggagtgttacttgctatgtgtacaaatgacttcatttgcttctatgattgggcagaatgcagattgatacgtcgaatcgatgtcaatgtgaagaatctttactgggctgacagtggtgatttagtaacaattgcaagtgatacgtcattctacattttgaaatataatagggatgtagtttcatctcatttggatagagggggttcagctggtgaggaaggtgtggaagatgcctttgaactgcttcatgagatcaacgaacgtgtccggactgggctatgggttggcgattgtttcatctacaataattcttcatggcgtcttaattactgtgtaggaggacaggtcacaactttgtttcacttggatcggccaatgtatttattaggatatcttgcaaaccaaagccgtgtctatcttattgataagcaatttaatgttgtggggtatactttactccttagtttgatcgaatataaaacacttgtaatgcgtggggatttcgatcgcgcgaatgatgttttatcatctataccaaaggaacaatatgacagtgtggcgcgtttcttggaatcacggggaatgttggaggaagccctcgagatagcaactgacactaattacagatttgacctggctgtgcaacttggtcgacttgaaattgcgaaggcgattgctaccgaggtgcaaagtgagtccaagtggaagatattaggggagttagctatgtcaagtggaaagcttgagatggcagaggagtgtcttctacatgctatggacctcagtggtttgttgcttttgtattcttcccttggggatgctgaaggcattaacaaattggcatctgtagccaaagaacaaggaaagaacaatgttgctttcctttgtttcttcatgctaggaaagctggaagagtgtcttcaattgctaatagaaagcaatcgtattccggaagcagcattgatggcaagatcttatcttcccagcaaagtccctgagattgtagcattgtggaaaaaggatctccagaaggtaaactcaaaagcagcagagtcgctggctgatcctaatgagtacccaaacttatttgaagactggcagattgctctcaacgtagaagctgctgttgcctctaaaaggagtatctatccatcggccgaggagtacatgattcatgctgaaaggtcaaatgagagtttagtggaagcttttaaaaatatgcatgtacatgaagagatggtaccagatgataatgaagatactgttcacgaggttattgaggatggtggagtagagagtcaagaagatgctgttgaggtcgatgcagaggatgacggagtagaagaaagtcaagatgaagctgttgaggttgaggctgagggttcaagtgatggtgctgtccttgtgaatggaaacagtagcgaggaacagtggggtacgaaaaatgaagaaccatcagcataaaagctgtagttgagcaagttgctgactgagcaatagtggattaacggatcagcaacttcgcttcagcggtgtagtttgtaaaggaaattttgtgcttccctttctacatgtagatcaggccttaggcgtcgaagacattttatagcctaccatgaggtactcgtttcacggagatggtatatgatataggtgatcggagtgatattttacatggtgcatatagtagcttgtcgaactgagaatgttttacctgtgatgtacatcggacttgggagctttgtatcattgtgttacaccttttcaatggtggcgaataaatttacagcagatgttttcaatagccttttagtaaatgtgtgaacgatttgcgttgtgctatg

SEQ ID NO: 41993 - DNA, 6841 bp, Zea Mays
aatagataaccaacagctaaccaaaggcagagtgtccacatgttgtaaaacacaacacttaactgactccagtatgaacaataatctgaaacagatattcacatcttctagaactccatgaatattatggctgacaaagccaaagggcattatataacatgatgccaatttagggcccaggtattaaggtcctggcaattgtttacaatttctacaggatttgaaagttcaaacagagtttacattgtgccatttgcatataggtgctaacacaaacctggcatgcaatgatgtagtattgtttttagctcgtaattatcccactttgctaatgttttcaagttgtccgactaatcgtgattaatcacgattaatcgcccaagtcggtcagccataacgatcagcaagtcgcccgacttgaaaacatttttcaaccattgttcatctaggatatgtaagttcacaagtaataacagtcatgagacaaaagggaaccatgcggacggaaacgtttccgctcccgccccgtcggaacccaccccttggcgttacctctcccgccgacgcctcgatccttgctccccaccacagccacacggcggcgcttgctccaagcccggcggccaccacttctctctccccggcgtcggtgggttctccttcgtttcctctctctggtgggcgttcgtctcttctgggcgggtcttcttcccctgttgccgcgctggtgaagggtggggagccgccatcctacagagacgttctggtctctgctcgcccttcctctggcgctgattcctcctctggtgatggcgctgggggcggctgggtgaaggttgtgggccgcagggggcgtcgtctgtccgctggccagagctttctccagacgaggtcttcgttcgttcagcggccggtgcctcggagccttcatccccctgtggatttgcgtgggaggtgcttcaactgcttcgcctcctctcatcgggcggcggcctgtcggagtatcgtgcggtgctttaactgccggctgcctgggcaccgctttcgcgtgtgcccgcgccgtgcgactgcacctgcccctccgcggcgcgtttcagtgtggaggccggtttctaaggggcccagtgttttgccggtgccgtcgtgccacgccatggaggttgctccgctgtctggtggttcgtctgctgttgagaaagcgaggaagcgcacccgccggggtcagagaaagcggaagaacggcgccgatgcaggtggtgattctggcctgcgatcggttgtgcctccggtggagtctgcccataatgtttgcgtcctcaaacggtctggcagaattgatcgtgctgaggagggccttcgtcgcgcgctgattctcacggttgttggagaggagggtcttggctgcgccttggagatcagagatgcgctggctttgaagtttcagcttcaggcagagtcgctccatctccgtcgtgctgcgccaaactcattcctctgttttttcccttcggtggaagtggctgaacagattattcaaaatgggcattcgattttcgcgccacctttccgtctgcatgttaggagatggtctcgccatgctttcgcttctggtggaggtgccttgcctgtgctcgtcgacattgaattgcaagggattcctgcgcacctttgggatttggagacagctgagcttttgcttggggctcacggattggttcaaggtctttccacagtttcttcagagggtgtggattctgcagatatgactgctttcagtgtgagtttttggtgcttctcgcctgaggctttgccggatgttctgtttcttcacgccgttgagccgcgagttgctgtggaggccgggtcctggtttccgcgtaccatggtgttcaagattgcagtgaaggttattcgttctggcgacatgattggtgctgaccagccccctccttcgttgccggatttgggtggggatgatggtgatcgggataatctcaggcggaggccacatttgcactatcacccatctccttccgctagggtctctgcgctctctcggcttgggccgcgcgtctcctcggcggtgccgggtggtggtccagtcgatgccatttctcccctgatggtcggggtggagaggatggcgcctgggtccactctgtcccctggctcggtgatttccttcccagttgatgcccattctttcccggttttggcggttgatgaggtggttgctcctggatctcctgactccactgcccaggacgtggattgggatccagttgacgcccattctctccccttgatctcggtggatgggatggtggctcctggggttcttgttggcactgttgattgtgggcctgctgttcagttggggtcttcggttctatctatgccagctgacccgcctggttctgatattcaggtgattgatgtccttgcaggcagtgtgactgtgattgttaagtttgggatttctgtgcaaagaattatttggactgttgatcccttgaacagaatgtcttcgttattgctcagtaagatgcttcatggctggacagttgcttctccctgcctcaaggtttattccaggagaaagaagcttgttatagagccagttcaggatgaggagtgtgtgctttcttcacagctgctggagttcaagaatgatgtcactggtccgattaatagtttgctgcctcctcctcgaaccaccaatagaaggaggaggactgtgcctgctaatttcattcccaggcgtagcaggagggtggccaagtttcctccagaattgggttctagttctgctgcccaggtctgtagacatttgggtttttgtgatgagatggagaacatctctcttgatgatgccaacggttatgcaaggttattcaaaaatggtctctctggtagccatgttgctgcagttgctgcgctttttggatggcaggtgcctcttgtggggcagtgttagggcctgttgctggtttatctctttaggtggatttctttatgtcaatgatagatcgctgttttttgtgttggaatgtgagaggccttaatgaccgagcaaagagggattcggttaaatctgtggtggttgaccttaggccttcaatcatttgtttgcaggaaaccaaattaagtgtcgtttcagattatgatttactctccatccttggggctggtttcagtaattatgtttttaaaccagctcagggttctagggggggagtgctgattgcttgggcgtgatggtactttctcctcggttgcgtcttttataaaagattattcgatatcagttcaattccaggatgagtctggtgctgcttggtggtttactggagtgtatgggcctcatcaggacagtttcaaactttctttcctgcaagaattaagagaaatcagagatgtttgtattggaccatggctgttatgtggtgattttaatttgattttcaagcccgaggataagaataattccaacatcaataggactttgatgggtaatttcaggaatctaattaactccatggagctgaaagaaattcctttgattggcagaaaatttacttggtcgaaccagagacaggatcccacccttgtgaagcttgatcatgttttttgcacatctagttgggaggattttttccctgattgtctgctgtatagcaacgcctctgtttgctctgatcattgccctttaactctcaaatttcgagaggattgtagagggaagcgcagatttcattttgaaggtttctggcccaagctccctggtttcaatgaggcggtggctgattcatggaatcagccaatgttggcaacctgcgctttggaaaggctgtccctaaagctcagaaggcttgctaaacagctgcagtcctgggggcatagagaggtgggaaatgtgagtaaccagttgggtcttgctagagaggtgatgcataggctggaatcagcacaggactttagagttttgtcagaagatgagttttggctgattggaaagctgaagcaacattgttttgtttatgcttctatggaaagaacaattgcaagattgaggtccaggattaagtacctaaaagagggggatgcaaatactaaattctttcatatgcaggctcgtttcaggaagaaaagaaatttcatttcatatctagaagatgaaggtagagtggtctctaaccatgaggatatgcaggaggtgctagatgaatttttttccggtcttttgggtgctgattttcagaggcaaagcactattaatttatcgagttgtcacagagaggccgtggatctcagtgatcttgagtgccccttctcagagaaagaagtgttggacacaattgcgtgccttccgtctgataaggctcctgggcctgatgggtttacagggaggttctataaatcttgttggagtatcattaaggtggatctgctggcggctctgtctatcattcaccagggcaattttcagagattggggcaactgaattcctcctacattattttgattcctaaaaagatggatgcttcgtcggctggtgatttcaggccaattagcctaattcatagtgttgctaaattggtcacaaaattactcgctaatcgtttgggccctcgtctgcatgaattggttgaagctaatcaaagtgcttttatcagaggtagatcgattcatgataattttatgttggtccaacaatcgattaaatcccttcacaagagaaaggttgacagcctgtttctgaagcttgacatttctaaggcctttgactcggtctcgtgggctttccttcttgaagttttatctcacctgggtttcggtcctatttggcgcaatttgatttcaaatctgctggcttcagcttctacgcaagtgttattaaatgggtctcctggaatccatataaagcatcggagaggtcttcgtcagggagaccctctctctcctatgttgtttgtgctgatcatggacgtgcttagcagtctatttagggctgctgaatgtaggggattgctgcatagcttggaaagggcaggagtccgtaataggctttctatctacgctgatgatgtggtcctgtttgttaaacctattgaggaagatctgaaatgtgttagattaattctgaattgttttgggtcagcctctggattggttaccaatttgaataagagttatgctattcctatcagatgtgaggagcatgtggttcaagagggctgcaatgtgctgaggtgcagtttggcctcatttccttgctcttacttggggctgccaatctcagacaggaagctgaagcgaaatgatcttaagatatggatagataaaattgcagacagactccctaactggaaggctcgtttattgaacctggccggcaggacaacattggtgcggtttgtcttatcagccatcccaatttatctccttattgcaattaaaattcccaaatgggttattaaatcaattgacaagattcgcagagggtttctttggaaagggcgaaaggaggtgaatggtggaagttgtgctgttccctgggagagtgtgacaaggccactaagtttagggggtcttggtgttcctaatttgcaattgatgagttgggcactgcaggctaagtggctctggctagagaagactgatccatctcggccgtggcttggtttgtgtatccctgtgcagcagcaagttagacaattttttaatgcttcggtgatctctgttgttgggaatgggaccaatactttttttctggtcagacagatggctgaatgggcagaggatacaggattttgcacctgaagttgttaatatggtgagcagcaagccatttagttcgagaactgttgctcaggcgttgcataatgggcaatgggttcgcgatatcacgaatcctttatctttgattggtctacatcagtatttgcagctgtgggatgctttaagtggagtggtgcttaatctggaggaggacagacatgtgtgggtgcactcgagctctggtgttttctcttccaaatcttgttattcggcgttgtttatgggagctattattttccagccatggaaatgggtgtggaagtcgtgggcaccccccaaatgcaaattttttgtttggctggcgataaggaataaatgttggactgcggatagacttcagaggaaaggattacctcacccggtggtctgtccactatgtgatcaagagcaggaaactatattgcacctcttgtgctcttgcagtttcgctagacaattttggcatattatattttcagctttgaggatgggtcatcttacgcctactagggaggcgggctcttttgtggattggtggggcaaggtgcatagaaaggtccccaaacatatcagaaaaggtttccatagtctcattatcctgggggcctggtgtttatggctgcatcgcaatagggcggtatttgatggtgtcaacccgtcactaagcaccattcagagacttttcttggatgaggtggagtgctggtgtttggctggtgcgaagcagctcgagagtcttgggcttctggctgcttttgctaggggggctagggcttttcctagtgtatgaggctacattgttttatttttctttgtattattgcctgttagggctttgtactttggtccatttcggacctttctctctttcaatataatgacgcgcagttctcttgcgtgttcgagaaaaaaaaaaaaaaaccattgttcatctcaaatatcaaataagtgcttgcactacaactcagaatatccagtaattagacacaaagataatatactttcaccagaattttaaac

SEQ ID NO: 41994 - DNA, 5067 bp, Zea Mays
aaaggtataaatttaatggaaaaatcttacattgaagtattgaacccagctgtgcacagtctactacatacaatttacacagaagcccttttctgttcagtacaggccaaactggccggaatacaaaaaatgaagtcaaacttcctagaaataaacaaaggctaagtatacactctttctcgtcactttacattgctgcaggacctatatactgaagtgagctggaataacaccaaatcctttttggatgacgccctcccttatcttctctggaagttgaagactttgatggagaaggcaaagacgaaagcaaagagaacagtgaatccaacaacagcggtagctacataacccaagttgtcatgctcgaatccaaagaatctgttgacgaaatctttcactagttccccgtcatcttccagcctgatgtctgcgatgtctccaaattgtgaggcaacaagtccatatagtgtccaagccactgggcaagcccacgagtaccatctccaccatattggtatcctctgcaagccagtcacatgtatgattcagcatcaacagtacaacgaaaagtgaggtttagcatagtacaagagtttctcttgggcacttaccgggcgggggataaggaagccggcaaagatgttccatattgcgtagaatgcagttgagactatagccgcaatgtcgctgtttggtgtcatggcgactgccatcattccataaaatgtgaagtacatgaaggtgaagaacatgaagaacatataccagaagaactttgcaactgtccaatcaaagccaatcaggctgtagacaatgagaccatacacaactgtctgaaggaagatgtgtgggatctcaataagaacctgttcgaatgtaaaattgttagaattcaactctaggttgaaggaataaaagagcaattatttcctattatccagattttcagttacaaccaattacctgtgcaaaagcatagggtagagcagagtacatcccagctgccttttctcggtagaaaactgttcgctcgacatccacaattggctgcacagtttgaccattctgaattccaatgaaaagaactgctgcatacatggaccccaaagaattgaaaaggtcctgcctagtgccactgtacgaggaaagacagtacaagtaagtttctttgtcacaatatgccaacatatataccaggtctcaataagtgttgtaagcaatggtccttacattttctttcccaagtttaagaagatagttccgaagatgagagcaataactgttgtgaagaagatcctagttgcggtatatgatggatttctccagtaagacttgtgctgcttccacaggcaagccatgcattgtgtgaggaaggactgtgagtactgggttgggaagtacaagtccttggaccctggtggtggtgtgcttagttcactaatcaaatctttattcctcctgcaatgatgcaccccgattagtgacatgaacagaaagcagaaacacaattctgaggttgatccgatggaacataccggtataggtcagagtttctgtatacttcagcaaagttgatcccaaggatatcttcttgagctaaggtggtcacttccaacatccatgttgcagggttgtaaccatccttgattttctttactccttctattccctgcatttgaagcatgaagcaaagttaccaaggatgtttaagttgggagctgaatgttttgttcagtaggtgagtgctgaagttcacctcaaagtagttaattagatggcatgagttgcgtcccaaaggtccgacatatatttcttcccctccccgtttcatcagaaatagctgcggagttcaaaaatacatgctggtggattgtgcagacaaccgtccttccggtgtccaccgtgtttcggactgtcctcatcacaattgcagctgccctagcatctagtccagaagttggttcgtccatgaatatgatggatgggttggccacgagctcaacagcaatagtgagtctcttccgctgttctgtggataaaccatttactcctggcagtcctaccaatgctcccctcagtggtgtcaattccacgagttccatgacttcttccacaaacatctgcacccatgaagttatccgattagccaagcactataattatcagttgctatgaaaatgttactgtgttacttatgagctagcaggatgaagacaattttgacgcacctttcttgcttctgaatccacttcatggggcaaccggagccatgcggagtacaggagggattcataaacagtgacatgtggagaatgaatatcattttgctcacagtagccagcaatccgagcaaaggtctcttgtttctttgggtatccagagattgaaatatctccttcaatgtgaccaccagttttccttcccgccaatacatccatcagggtagttttacccgctccactgactcccatcagtgctgtaaggactcctggtctgaaggctccgcttacacccttcagcagcagtagccgatcttcagtaatacctttatctttcatttcctgtaaaacagtcatacaattactaattattatttagtattatcagtttgtattttggtgataagtcaggtcttccaacttctgcttacctgaggcatgtccaccgagtatttgatattgtcaaaggtgatggacaacggcgtaaatggaagtaccattcctctcttcctgctttcagctccagcaatttctcctcttcctgcatttttatggacttgttacaatgatgcaacaatgacatgtattatctgatgtatgctgcaaggaggtctgcttatgactgaccatctgaaggcggattctgggaagctgttccaagaggcagcaactcaacattttgaccacagagagagggtactcacggccaagccaatcaaggaacagaacgaagagtacgttgaagagcatgatatacccaagcaatgcaccaacaccaatccaataccagtttggatcgacaaaaatgccacgggcctttaggatttgaacaccgagtgtgtcgttgctatgtgtcctatcgacaacctgcacaaagattgccattgtttgttaactcagctgtctctctgaactttagagtggtcataggctcatatcttagattggtttagaagtcaccgcattaccatctgccagctatggccaaggaactcattcaccgctacggcattctgggcatacatcagaggggaggaccagtagccccagatccaccattttttaatgttatctgcagaaagaaaactcaattacatgctcctggaactatcaaagcaatgtgtgaatgaaggcttgtcttacctcttgctatcaagaagccaccaagaatcagaagaacaagctgcgcgaatgacccaaatgtgtctgcgacaaccatttctcttcctagtgcagcaagaagccggaaaagaccagatgccatctggctgactagtacaagcagaaggtaatggcgaaagaacctttcgatgcttggatcaaagccaatgacatagtaagtcatgccgatccacacagcacattccaagaatgatattggtatctttagcaaccatgtaggcgatgcatatgcccatgatggatagaagaggaggtccctctgcttataaaatatcggcagctttgcgatactcatggcgagctcagcaaaaccattgaacaaatgtgtgactagtccaaggaacatggcgcccagaaatatcaccccatcttcgacaccacgtcgatgcattgttgtgcgcaggaagaccgtcattgcaattgttccaagaattatgagctggtacaaatatggagcattcatcagaatttactacctgaatttggaagttgagaagattttaggaagcaagatggatacctggactactttgaagatataaacaaatgagttcctcttcatcagtagccactccctagagaagcatgctctgagaagttccatcttgctgataccatactttgacgttgtgagagctgcaggatggttcctggtgcgatcgaagggcaccttgagatctgatcccagcttacggccaacatggaatgctttgaatgcctctgaaaagtcgttaactgagatgtatctgtatggctcgtctcttctacaccagtactggtgctgatccttcctagatgtaacctgtgatcagagagagtaatgtcagatggggttccaagtctgaatgaacagtaaataggattctgcaggatcactcacttcttgcaagaagtctgcaacaccttttctctcaggacatttgaagcccatgacctcaaaaaattccaggacattctcccgaggaccctggtacacaatttggccctccgagaggagaacaatgtcatcgaagagctcgtatgtttcaggcgcaggctgaagcaatgcgataagtgcagttccaccaaggatgtggaccgactgccttagagagttgacgatctgatatgttgtggagctgtccaggccggtggagatttcatccatgaatagcgccttagctggaccaacaagcatctcgcctgtgaaaattcaacaagacatgaagtcagatttttttcgatcagggtcaaagggtttgatgcacaaatcttaatataactgcagattgcacataccggtagtgacacgcttcttttgtcctcctgagatacctctgatcatagagtctccaaccattaaggcaagtgtttcccggaccgtcatttcgccgacgtgaacatcgtgctgcccgatgtacgccgatgtcctctgagggacaaattcatccatgtcatgaccattattggagtcaagtttccctgacaaagccagaagtagacttgttttcccggatccaggagggccaagcagcaaggacattctgaaagaagtgccagttagtaagtacaactacagaaaaactgaaaaccttgcactttaaaattctttggcttcttacctgccgggtcttatgaccccactgatatcgtgaaggatggagacaggcctcttcccgctaga

SEQ ID NO: 41995 - DNA, 1729 bp, Zea Mays
taaaaaaaagattgtccttaaatataggcgccgaaacgaagccgacctaaccgccagacccaagccaacaagcaagaccgaccgcttctgcttgtgacccgaaacctttcttcgaacgcaaaaagaaccccacccgacgtaccgcgagccggctatggcgacggtggcgatggacatctcgaagcccacgccggcagcgtccggtgacgaggcagcggcggcggcgaaggggaggagcggcggcgggggcgaggggctgcggcagtactacctgcagcacatccatgacctgcagctccagatccggcagaagacccataacctcaaccgcctcgaggcccagcgcaacgacctcaactcccgagttagaatgctcagggaagagttgcagttgcttcaagagcctggctcatatgttggtgaggtggtgaaggtcatggggaaatcaaaggttctggtgaaggtacatcccgaaggcaaatatgtggtggatatagataagagcattgatatcactaagatcacaccttcaacaagagttgctcttcggaatgacagctatatgctccatctgatcctaccaagcaaagttgatccattggtcaatctcatgaaagttgagaaggttccggattctacctatgatatgattggaggccttgaccagcaaattaaagagatcaaagaggtcattgagcttccaatcaaacatccggaactgtttgagagccttggaattgcgcaaccaaagggtgtccttctttatggacctccgggcacaggaaagacattgttggcacgtgcggttgctcatcacactgactgcaccttcatcagggtgtctggttctgagttggttcagaagtatattggtgagggctcccggatggttagggaactctttgttatggccagggaacatgcaccatccattatatttatggatgaaattgactctatcggatctgctagaatggagtctggaactggcaacggtgacagtgaagttcagcgtactatgcttgaacttctaaaccagctcgatggttttgaagcatcaaacaaaattaaggttttgatggcaacgaacagaatagacattttggatcaagcccttctgaggcctggccgcatagacaggaagattgaatttccaaatcctaacgaggattcacgtttcgatatcttgaagatccattcaagaaaaatgaacttgatgcgtggcattgatctgaaaaagatcgcggaaaagatgaatggggcctcaggagctgagctcaaggccgtctgcacagaggctggaatgtttgctcttcgtgagagaagggtgcacgttacccaggaggacttcgagatggcagtggccaaggtgatgaagaaagacacggagaagaacatgtccctgcgcaagctctggaatggcagtgccttcatatccatatcttttaccaaagcagtggaatggtgtaacggcatgctctggacaatgttatctcaagttgcgccgcgcatgcttatgtttaaaattttccttataacggctgtagtgtgttgttgcaaagttgattggatttatcagatcagctagattacggtactaatacattgctagctcgcgatgtggacactgcataatggttacttgctcggattatccacattctcgtgtgtaacatgcattgcaatgtcgtggcccattcaatatctcatatttttaacgtaaaaataa

SEQ ID NO: 41996 - DNA, 548 bp, Zea Mays
gccgcacgcacgacgcaagtgcagccgcgaccgcgttcagccacccacccctagccagcttgcccaacctgttagccctctcttcttccccacgtaactgcccccacccccacggcaggagcaccatttggacccccacgttcccctcacctcgctaccctctctctcattcttgcacggccagcccagcgccctcgttgtgctcgccttcccacacaactgtcgtcgtcgtgtgcctcgccgtgcctcgtccgagctgtgcccggcgtcgcgacatcccgcgccggccctggtgcggccgttcccgaagccacgggcagccaccgtacagcgccccgtcaggccacacgtccagtccttgcgcgcaattgcattcggtcgacgctgtctcgccgtgggtctgtgctactctcgtcgtcgctgaggttagtggccagattgtgatatgttcctgagcttcgaggaatcgacgatcaagacttggtgaaccactggtcccgagatcaagctcttcgagttctacgagattgaagactctgagcatctgt

SEQ ID NO: 41997 - DNA, 570 bp, Zea Mays
cccgcactgtctcgtgcgtcgttcgcgtgctatgtcgcgcgtgtccgcgcgtcgtctgcatgctgtcgtattatttcatgcgtcgtaaattcgcctcgcttagaatccctcgtgctaattatattagttatttgtttgataactactagtgtggtagatttaatcaaaactacatagcggttataagttatattttaattgaatgtcctgactactacttgcgtagcgtaaacgttataacttctcgaccgtagcttcgactatcgcgtttctttttcctcgcgtgaccgtagtaacgcgctctatttcattctgcatgttttattatgtttttctttgaatggtgtaatgttcttatgcatatatgttggtttgcttgtgcttgttcgtcttcgctgtgtgtcgcgaatagattgtgatatgttcctgagcttcgaggaatcgacgatcaagacttggtgaaccactggtcccgagatcaagctcttcgagttctacgagattgaagactctgagcatctgtttggtgaaggcaagtgtcctttgacctatctctgtcctattcattat

SEQ ID NO: 41998 - DNA, 1363 bp, Zea Mays
gtttcccgctgccaccgactcgtgggaccggccggcgctgccctttgacccgcctcgacgtcggtgcctcgcgtcccttcctctcccaccgatcaggcgaacaaatacgcacgcgaacgcaaagaaaaaaaaactgttgttttgttcttgcggagacgagacgagacgaggcgacgcgagtcgcgaggagtcgaggaggatcggggctcaggcaagatgaacaggaagccaggagactgggactgcagggcgtgccagcacctcaacttcagccgccgagacatatgccagcgctgcagcgagccacgtggagttgctgatcgtggcggcggaggaggaggaggcgactacgccagcttcggtggccgcggtggctcctccttcggcggcggctttggcgctgctggctctgacgtccggcctggtgactggtactgctcctgcggcgcgcacaacttcgccagccgctccagctgcttcaagtgctccgcctacaaggaggaggccgctgtgaacagtggcgctggcggctttgacggcgacatgtcacgctcacggggctacggcttcggcagcggtgctgctggtgctggtgctggcgctgcccgtactaccaaccgccccggttggaagtccggagactggatctgcaccagatccggatgcaacgagcacaacttcgccagcaggatggagtgcttcaggtgcaacgcaccgcgggactctggcactgaggtgtaggatcgagcaagttaaaaagtctgcagcgccgaagaaagcgacgacaagaggagtcctcatcacgtcgtaacgtaagagagagagagagtagtggatttgcaacaaaaaaaaaaaaagacggccgcgatgctctgttactagctagctagttttgttcaaccacccatgccgtctcttctcttttattagatttggtttggttctcatagccctttaattaccatttgggacctatgtttgctgttctgtttcccgttcgtctcctccgcatgtttgcgcttggatcgagtcttgtgatgtaaccccccaaaaaacgcttgcttaactagtactgttgcttcttaatatctccgggggcgttcatcttgttcttgctttatggtgtaaggctagctccaacaaggagctttaaaaggttctgtaccctaaatttagaggatcagggtcatctactctctccagcagcgtctctaaatgctgctggatcctttatatatagagtttctctaaacggttttttatctatttgaatactttaaacaaccggtttagtaaaactaaaatatgtataatatatttgagagtatgataaatacgtatgtataaaaaataaaaaatatct

SEQ ID NO: 41999 - DNA, 1010 bp, Zea Mays
ctcccctcctctttctagttttacgtgattcccttgttcctcgcgggccaaagcgcgctaagaatcaaaggcacaaagatagctcaccctcggtttcagcatcccctccaaacatcactataaatacccctgcacacacgcaccttgctgcatcaccaccatctcacttcatataccactccctaggaggacccagcaacacacacagccgagctttgcttaggcaagatgaacaggaagccaggagactgggactgcagggcgtgccagcacctcaacttcagccgccgagacttcgccagcaggatggagtgcttcaggtgcaacgcaccgcgggactctggtagcgctgccatgacctacgaaaactacttgcactgaggtgtaggatcgagcaagttaaaaagtctgcagcgccgaagaaagcgacgacaagaggagtcctcatcacgtcgtaacgtaagagagagagagagtagtggatttgcaacaaaaaaaaaaaaagacggccgcgatgctctgttactagctagctagttttgttcaaccacccatgccgtctcttctcttttattagatttggtttggttctcatagccctttaattaccatttgggacctatgtttgctgttctgtttcccgttcgtctcctccgcatgtttgcgcttggatcgagtcttgtgatgtaaccccccaaaaaacgcttgcttaactagtactgttgcttcttaatatctccgggggcgttcatcttgttcttgctttatggtgtaaggctagctccaacaaggagctttaaaaggttctgtaccctaaatttagaggatcagggtcatctactctctccagcagcgtctctaaatgctgctggatcctttatatatagagtttctctaaacggttttttatctatttgaatactttaaacaaccggtttagtaaaactaaaatatgtataatatatttgagagtatgataaatacgtatgtataaaaaataaaaaatatct

SEQ ID NO: 42000 - DNA, 2242 bp, Zea Mays
ttcctcccgccagcacggtcagagagcatactatgacagcctcaaatctgtaacatgggggggggggcaaagtaattttttggaggtggggtgattcacttttcacgccgaagacaagacacagaccttagaggagaaatatggttgcggtttaaggcgcccaacgaatccaaaaatctaagatgcgaatcgtaagaagcgactaacagatccaataaatgtgaagcagaaggaactagatctgctagaaggacaaagtatcgggaaaaaagaaaacatgcctttttctaacctggcaaaaacgtaggaagacgaagtggctacagatagacaagacggagggagtaaggacgaagaggagcgtggcagaaagaataatgagaggcgattacagtggaagactactggtcgaccgatgcaagctgcagaggatcgacggagggagtgaggagaaagagagacagaacaaaacgagcgagggtgggtgggaagtgaggaggaagagagacggagcaaaacgagggtgggtgggaagtgaggaggaagagagacggagcaaaacgagcgagacgaggctgacgctagcgtcacttggaagtctctagaggcgataagtacgaggggcgtatgagagagcaaggaagatggactaatgatccatcatcgaacggctacaaagttttctgacgacgtgaatgagctagtaggcgccgtccgttaataataaggaaatatgttgttaatatagatgtttaatgtataaaggaaaaaatgagatatcgaaaaaaaaatattttacgcgaggacggataggacattcggcgttcctaggtaccccgctgcttccgtgctcacctcgcctgcagggccgcagccgctggaagaacacgaagacgacgggagtgcggggtggcgtcgccgctggagcaccagctgtagccgccggctaggcctccgcgccgctctccgtggccaacgcgccgtcatgcttgcggcgtcggcgcggcggctgtccgccgccgcctcgttttcctcttcttccatgcgctccagccagctcgccgccgtactgaaccaacagaggtggatgcacgacaggaacaagaaggcgatggagctggtggccaagggatggagtgcgctccaggaggtcgaccgcgtcatcgactacgccgatctcaacgacaagcgcctcatcccgcttctaaggggcgctaaggaaaactttgagctggctttggagattgacaatggtaatacacatgcgaggtattggctgggaaaaatgcatttcaagtatcatgttcctggtgcttgcaaggcagttggtgctgctttgttggttgaagctgcaaatatgggtgatccagatgcacagtatgaacttggatgtcgactaagaattgagaatgactatgttcagtcggatcaacaggctttccattacattgagcaagctgttgatcagctgcaccctggtgctttatatcttctcggtgctgtatatctaactggggactgtgttaagagagatatggcttccgcgttgtggtgttttcatagagcttcagaaaagggacatgctggtgcagctatcgcatatggatccttgcttcttaaaggtgctgaaatacctgaagttattacaaggttcaactcaggcaagagtccatcaactgggaaaatgcggaaaaggacccaacagcaggatccagtaaagctagcgaaagaacagtttcaaattgcagctgaggcaggctgtgatctcggtctgcggtggttgaagaggcttgaagcttatgaaaaccaagaagaaaagctaaagcaggttcagcaatgatatccactgaaagaatcccattgcatttgtcgcatacaagtatggtatatggcagcatggttgctgcacataggtataccaataatttcctttcctgccttcattatgttggaggctattcgatcctcggatgttcgggtcaactttgcaggaagatatactgaaatttggatatttagactaacttcttggattataggcgattggatgttcactttgtacgatgtattagcgttgacattactggaagccctaattgtgagaagtagaaacatatcatgtgtgttgctacgggcattatggatgatttagaataaaattagactatataactacttatacgaaggaataaattgtggcatatgatgatgtggataacaaaatgttctgtggcttcctgac

SEQ ID NO: 42001 - DNA, 945 bp, Zea Mays
ctgggatgccatcttggagaaactccaagtggtgctgctttgttggttgaagctgcaaatatgggtgatccagatgcacagtatgaacttggatgtcgactaagaattgagaatgactatgttcagtcggatcaacaggctttccattacattgagcaagctgttgatcagctgcaccctggtgctttatatcttctcggtgctgtatatctaactggggactgtgttaagagagatatggcttccgcgttgtggtgttttcatagagcttcagaaaagggacatgctggtgcagctatcgcatatggatccttgcttcttaaaggtgctgaaatacctgaagttattacaaggttcaactcaggcaagagtccatcaactgggaaaatgcggaaaaggacccaacagcaggatccagtaaagctagcgaaagaacagtttcaaattgcagctgaggcaggctgtgatctcggtctgcggtggttgaagaggcttgaagcttatgaaaaccaagaagaaaagctaaagcaggttcagcaatgatatccactgaaagaatcccattgcatttgtcgcatacaagtatggtatatggcagcatggttgctgcacataggtataccaataatttcctttcctgccttcattatgttggaggctattcgatcctcggatgttcgggtcaactttgcaggaagatatactgaaatttggatatttagactaacttcttggattataggcgattggatgttcactttgtacgatgtattagcgttgacattactggaagccctaattgtgagaagtagaaacatatcatgtgtgttgctacgggcattatggatgatttagaataaaattagactatataactacttatacgaaggaataaattgtggcatatgatgatgtggataacaaaatgttctgtggcttcctgac

SEQ ID NO: 42002 - DNA, 858 bp, Zea Mays
caatcacctagttttttttgttagaatgactatgttcagtcggatcaacaggctttccattacattgagcaagctgttgatcagctgcaccctggtgctttatatcttctcggtgctgtatatctaactggggactgtgttaagagagatatggcttccgcgttgtggtgttttcatagagcttcagaaaagggacatgctggtgcagctatcgcatatggatccttgcttcttaaaggtgctgaaatacctgaagttattacaaggttcaactcaggcaagagtccatcaactgggaaaatgcggaaaaggacccaacagcaggatccagtaaagctagcgaaagaacagtttcaaattgcagctgaggcaggctgtgatctcggtctgcggtggttgaagaggcttgaagcttatgaaaaccaagaagaaaagctaaagcaggttcagcaatgatatccactgaaagaatcccattgcatttgtcgcatacaagtatggtatatggcagcatggttgctgcacataggtataccaataatttcctttcctgccttcattatgttggaggctattcgatcctcggatgttcgggtcaactttgcaggaagatatactgaaatttggatatttagactaacttcttggattataggcgattggatgttcactttgtacgatgtattagcgttgacattactggaagccctaattgtgagaagtagaaacatatcatgtgtgttgctacgggcattatggatgatttagaataaaattagactatataactacttatacgaaggaataaattgtggcatatgatgatgtggataacaaaatgttctgtggcttcctgac

SEQ ID NO: 42003 - DNA, 2897 bp, Zea Mays
atgcggtgccatgcacctggactactagtacgcttggggaatggggatgggtgcaacggtagaggaagatccggcggtgaccgtgctcctgttcgttctcctggtcttgattcgattgggaggggaaggggttccttcggtcttgggaaattcgaagacatgcctgcgctctacgcttattacggagatggcgggtgcctcgtctcggcgccggctgagctggccgggctcttctgccgcggcgccgtgcagcagcggaagcgcacgctggtgaccgcgtccgcggtcgccgcggcggcggccgagttcgtgagggcggccaagaagcagaggcagctgccgctgccgtcgctcgacgcgctcccagacgagtgcctcttcgagatcctgcgccgcgtgcccggcggccgcggccgcggcgcctccgcctgcgtctcccgccgctggctcgcgctcctcggcagcatccgggcctccgagctcggccaggccgcggcggcggcggcggacaccccgtcgctgcccgacctgaacgaggaattcgtcatggaggaggataatgaggagtcccccgcggatcggtgcgtcgacagggtcctagagggcaaggaggccaccgacgtccgcctggccgccatggccgtcgtcgccggatcccgtggcgggctggagaagctcgccgtccgcggcagccacccgacccgtggcgtcacggaccaaggactgtcggcggttgcacgcggcagccccaacctcagctcgctcgcgctctgggatgtgcctcttatcaccgatgctgggctcgcggagattgctgccgggtgtccctcgctcgagcgtctggatatctgtcgatgtcccctcatcacagacaagggcctcgtcgctgttgcgcaggggtgccccaacttggtgtctctgaccattgaggcatgccccggtgttgccaatgagggcctgagggcgattggccgcagctgcgtgaagctgcaagctgtgaacatcaagaactgccctcttgttggtgaccaaggcatttccagcctggtgtgctctgctaccgctgctcttacaaagatccggctccagggattgaacataactgatgcttcgcttgctgtgattggatactatgggaaagccatcactgaccttacacttactcgtctcgctgctgttggtgagaggggtttctgggtgatggctaatgctgctggcctgcagaatctcaggtgcatgagtgttacctcttgccctggagtcaccgatcttgcgcttgcttctattgccaagttctgcccgaacttgaagcagctgtacctcaggaagtgcggatatgtgtcagatgctggcctcaaggcgttcacagaatcagcaaaggtgtttgagaacttgcatctcgaggaatgcaaccgggtttctcttgtcggtattcttgctttcctcctcaactgcagagagaagttcagggctctatcgttggtgaaatgcatggggatcaaggatatctgctctgcgcctgcacaacttcctctttgccgatcacttcgtttccttacaatcaaggattgcccaggtttcaccgatgcaagcttggctgcggtggggatgatttgccctcagttggagcaggttgacctgagtggtcttggtgaggtcactgacaacgggcttcttccattgatccagtcttctgaagctggtctggtcaaggttgacttgagtggttgcaagaacattacagatgtggctgtctcctccctggtgaagggacatggaaaatctctgaagaaaatcaaccttgagggttgcagcaagataacagatgctatcctcttcaccatgtctgagagctgcaccgagcttgcggagcttaatctttcaaactgcatggttagtgactacggtgttgccatcctggcatctgcaaggcacctcaagctccgtgttctctcactgtcaggctgctctaaggttactcagaagagcgtgctgttcttgggcaaccttggccagtctatagagggcctcaatcttcagttctgtgacatgattggcaaccacaacattgcatcgctggagaagaagctctggtggtgtgacatccttgcataggcagacaagatggtccattgctggaagggctcatgtctagtctactgggagccacctccagatgcagatatacgaccgtagcagtagcacaaccaggtgatcttcaggtttttggctcgcatgcgatgcgagtgatgatggtgggcttccgcattgttcaaggaccagttgttttagggggtgctttctagtcaagtgctcgtttttcacagatcacctctcgggaggtttatctgttttttgagccttggctgccatcactggcatcctgcccctcgatccagacactggtccttgccttatagtcatataaggttttttaggttgccatagtgtccaagtcctttttcgttttactgcttcctggttatgaagttgcaggcatccgtgatccattggcagctctggactatcacaattctaactcaagaaccagatgctggtgtcatcttttccagggctgctgatgctggagcgtctgtggatttgtgcagtgtgtttggttgtcgagttttgagtttgtttttagtcttgatgtgttgtgtgctgttcatgttctccatggtgtgtaagggtcatgtagggttgcatcttttttacagtctctctgggatgcttggtgttcatggtgatcttggccaatgctaggcgcatactagaagccttgccttgacaaccttttatggtttttttgccagatccctatttttacaagcagattgttgagtgctgtaagcttggcgaccctctttgaataaatgaaatatgtgtttatgttgaaa

SEQ ID NO: 42004 - DNA, 1755 bp, Zea Mays
ctgaattatcggctcgatagatctccgagccaacggcaacgtgtggtctcaaacattcgtggattcaaatagttatgggctagctagcaagccccaatctgggctagtttcggcccatctcaggcgaacagccatttcgaatacaagcaacggcccgtccaactattccgacatcacctcgctctgtcaaggaaaccctagggcccgccgccgccggccgccacacccgacacctctctgattctctccctctatataacctgacctgattttcagatcctgctcgaagctaccgccaccgccgccgattgctcgagctcgcttccttacgccggatctgcatctgcgtgctgatatcttcttttcctgttcgctcgttccgtgcttctctgttttttccctattcttctctcaactgtgcgagggattggttcgtagctcgggctgatgatgatttggatccgagaggatcttagcggatttcggtgaggcggatacttccgccgctgatcgccttatgttgttacacacactgaagcccccccttcgatgcgtctatcagatgggttcttttcccgtttcgtctctctcgctagatttctcactgggtggctgctgcaatgcgatgatgattcaatacatggttttggcagtggttaccccttgtggtcaccgtgagccgtcaaacctgaaaacgacttctctttccactgagcattgcgaaaaaaatgcagcgtattatcatcgggcaattgaatttatcatcaaatccacactgattctagcaaaaaaaaaacagataatttcacgtgagtctcaagtttttgaaaactcaatgcaggtttcatggaagtgactttacggcacctgccaattaccagtcgccccattttttaggaacgaacgcacctttcctcaacacgggtcgaatcggacatccaaggccaaacaaatccttgataaaacccgcattcagtatcgtctgacagcagagagcaacttcagcgccacccgttgcttcaccttgccgcctgaaaccacaacggcgccgtccctgaccagagcgttatccaccggccgatctgaatgtatcatgcctagcagttccgagtttctgcggcggggtatcattgtttgatcaagtcgtccttggccattatcagattcgggcatcatttctaggcatgcagttcattaccagcttcagcggtccacattgctgaggaaaagagcttcacagctcttcattcctggcaggatttaggttgccacttttctgatgttgagtaacattcgagatatgtgttccgagacttttgtggacacaccagaacatgctaaatgaataccctacattagttgatctgcaaggataaatcagttatttcattatttgttctctccatagccacagggggagaaatcacagaacataatgaaacaactgaaataacaaagaactacgcatcagttattccgaacgtttgacaaataacagaactgtttgacaccaaaatgagccggtggactgtccggccctgaggccggacggtccgcggtccggacagtccgcgcctgtgtgccggacggtccgcgcatgcgcagagcagtttaggttccgagttttgtgctacgattgttagctatattcgcgggattagctcggaatcagttgtgtaaagggtccagcccccctctataaatagagaggtctacggccgatttgtaatcaacaatcgaatcaatacaacttct

SEQ ID NO: 42005 - DNA, 1233 bp, Zea Mays
cccacctccttgccccaagaggcatgttcaccggctgggccgtatttttctacacaggaatacttggagcaatgcagaactggtcagaggattggaaaatgttcaggttcaagctgtatctgcttcaggcgttgtttcagcagcaataggatctgatggttccctatgggtttgggggaggtcaaagcgtggccaacttggacttgggaaggacattgtagaggcagcagtgccatctaaagtgaaagctcttgctagctacgacattgttaaggtatcatttggatgggggcattccatggcactgacaaaggatggaaagctatttggttggggctactcggaaaatggaaggttaggagaaatgggccaaagcactagagctctttctgcagaagaatacataggaaaaacggtagacaagtattctagtgtaatgctggaggctgttgaaaagatggttgaagagaaaattcagagtgaagacgatatgcccattatctgggaaccatcccttgttcatgaagtgagtcgtcttgaggtgtctgatgtgtcttgtgggcttgaccattccttgattctctgctctgatggcattgtactgagcggtggtgacaacacttatggacagctgggtaggaaggccgggccacccgaattgcttcctgttggcatgagctataggccattctccatgtcggcaagtgtcggccactctcttgcactatgctacacaacgactgaaggcaccgctggtgtggaaactggcctcctctcatggggatggaactgcagctcccagctcggacggtccagccaagaggacatccctgcactggtggactctctgagcagggagaggctggtatcggcctcggctggtcgagtccattcggttgctctcacgtcgaaaggtgaagtttggacctggggatcgggcaggaatggcaggctaggcctgggcagctccattgatgaggcggcgccatgtcttgtagataccctggaaggggtggaagtcttgcaagttgcagcagggatggaccataatctcctcctggttgccgagtaggtataggttggtatgctggtgaactgaaagatggtactccatttgttcttaactagctgaatgctcgtgcgttgcaacggaaatatataataccagtatactacgataacttatatacaaaatgtgtgttataccgttataagaaaatgtttcataatcaa

SEQ ID NO: 42006 - DNA, 1706 bp, Zea Mays
acaggtatcaacccaagtgacctcctctctttcccggctccggtcgcgaatgcgcgatgcgttctctcctcctgccccgcaggtgcgccttcgcttcgcggcgcttcctctccgcgctcgccggcagcggggctagggccccgtgcgccggcgttgtgtacgggttcggggataacagccatggcgcggtgggccagcctccaccggctgcccacgcctacgtgcccacgcccgtgccctccctcccgccgtccgtgagcgccgtcgccgccggtcactaccactccctcgccgtatctgccgccggagaggtctgggcgtgggggcgcaacgacgagggccaactcggccgcgggcttcactccccgaggaatacttggagcaatgcagaactggtcagaggattggaaaatgttcaggttcaagctgtatctgcttcaggcgttgtttcagcagcaataggatctgatggttccctatgggtttgggggaggtcaaagcgtggccaacttggacttgggaaggacattgtagaggcagcagtgccatctaaagtgaaagctcttgctagctacgacattgttaaggtatcatttggatgggggcattccatggcactgacaaaggatggaaagctatttggttggggctactcggaaaatggaaggttaggagaaatgggccaaagcactagagctctttctgcagaagaatacataggaaaaacggtagacaagtattctagtgtaatgctggaggctgttgaaaagatggttgaagagaaaattcagagtgaagacgatatgcccattatctgggaaccatcccttgttcatgaagtgagtcgtcttgaggtgtctgatgtgtcttgtgggcttgaccattccttgattctctgctgatcaacatagaaaaagttatgtcatcttaacctcataggaaacagactacaagaaaatgaaaaacggtgagaatctatcattctcaaattagcctttttggttattcttattttcaaatctctatctcccactctcatatggattctgtaattttccagctgatggcattgtactgagcggtggtgacaacacttatggacagctgggtaggaaggccgggccacccgaattgcttcctgttggcatgagctataggccattctccatgtcggcaagtgtcggccactctcttgcactatgctacacaacgactgaaggcaccgctggtgtggaaactggcctcctctcatggggatggaactgcagctcccagctcggacggtccagccaagaggacatccctgcactggtggactctctgagcagggagaggctggtatcggcctcggctggtcgagtccattcggttgctctcacgtcgaaaggtgaagtttggacctggggatcgggcaggaatggcaggctaggcctgggcagctccattgatgaggcggcgccatgtcttgtagataccctggaaggggtggaagtcttgcaagttgcagcagggatggaccataatctcctcctggttgccgagtaggtataggttggtatgctggtgaactgaaagatggtactccatttgttcttaactagctgaatgctcgtgcgttgcaacggaaatatataataccagtatactacgataacttatatacaaaatgtgtgttataccgttataagaaaatgtttcataatcaa

SEQ ID NO: 42007 - DNA, 547 bp, Zea Mays
gagaacaagttggaggaggtgtgagtgtcttccttcgatccaggccgcagcgctcctctctcaaacggcccaagcccaaaaaggctgagatctcagagtagagcccactcgtcgggcgcgcacgcacgcacgccgtgaagacgacgacagagcccaagtcgaagcgagcggttttgccggcggcggcggcgaccggaggatggggatgggaggccggggcgtggtgggagacaggtggtcgcaacgcattctctggatctgcgccctgggcagcgccgcatctactttgtggcggtggagaggcaggcgcagaaccgcgcgcgggcggtagcggagggcctcaagggcctcgacggcgcaggggatgacgtgtgacagagctggacgctgccgttgcagaggggcctcctttgtttagaaaggaatgttgatcaatgtgggtgttctcctatgtcacttaatccatctgagcctctgttgctgcacagaaacgtagggcgtttttttttatttcacacgatttgtccatttaaggatccaatacaat

SEQ ID NO: 42008 - DNA, 3364 bp, Zea Mays
gagtgctagtcttcacggcggggttgttgtcgcttgtggccagccgccagcaccagcacaaggcgatcgagagtggtgaccaccagtaaactgcaaagtgcaaaccaaacaccacccacgagaaagcggaggagggagcaatggcggagccgagccagcagctgcggtcgttcgtggaggtgccggcgggctcccacttccccatccagaacctgcccttcggggtcttccgccggcggggggtgcaggcgcaggcgccgcgccccgcggtggccatcggggacttcgcgctcgacctcgccgccgtcgccgacgcggggctcttcgacgggcccgcgctctccggctccccgtgcttccaccaggagacgctcaacatgttcttggggatgggccggccggcgtggagggaggcgcgcgccacgctacagaaaatcctatcagccgacgagcccgtcttgcgtgacaacgaagcactgaggaacaagtgtctggtaccaatgagtgatatagagatggttctaccaatcacggttggaggttacacggacttcttttgttctgtgcaccatgcaatgaattgtggattcatcttccgagggccgcagactccagtcaatccaaattggttttatcttccagtaggatacaatgggcgagcatcatctatagttgtgtctggaaccaatgtcattaggcccaggggacaaggacatccaacaggaaactccgctccttattttggtccctcgcagaagcttgattttgagcttgagatggctgccattgttggtccagggaatgaattaggcaaacctattgatattaatgacgccgaagaacatatttttggcctaactttgatgaatgattggagtgccagagatatccaggcttgggagactatacctcttggacctttccttgggaaaagcttcagtaccacggtatcaccatggattgttaccctagatgctttgaagcctttcatgtgtgatgctcctaagcaggaacccgagcctttaccgtacttagccgaaaagaatcacataaattatgacattcctcttgaagcctggattaagccgaaagatcaaaatgacgcatcaattgtcacaaaaactaatttcaagcatctcacataacagtgctggcacatttcttgtaaccaatttttgcacaggtattggacgctgacacagcagctagcacaccacaccatcaacggatgcaacatgaggccgggggatatatttgcgactggcacactgagtggacctgaaccggactccctcgggtgtctgctggagctgacatggaacgggcagaaggagataccggtggggaatttgacccgcaagttcctagaagatggagatgaagtcatcttgacaggatgttgcaagggtgaaggctacaacattggttttggaacctgcaccgggaaggttctgccggcacttccctgagccaacacgtcttggcatcagttctccggagtctcaacgatctcagctatcagagagttgtctcaacggtctcaactatcaaagagttcatgccgctatctagcaaggctgctatgtaactgaacaatatgaatatgggttgttttcctgggctgttgaagatgaggagactgatgctctgttgtgcaataaaaccgcttcaccattttatacgatgtctccctctatttaagagttgggttgtgttcttaaacttgtacattgcaatgtcctctgtggcatgaaatttagatcatgtatatattttgaatggaattatagatccacactagtagaatgaataagaaagttcgcagattgccagaggcctaaaaaaagactggcgagagtgagaaagagagaggtgacgaagagtgagtgatggatgcaagtaggttcagacgcaggcgagctccttcgccatgccaatggacttgccgatggcgttcttgcagacggacatggtcttgttgtcggacctgttgtacttgatgtcgacgttgatgagctgcacgccctggcagggcaggttgttggcgcagttgagcgtgatggcctccggcgtgttggaggtgccgtggatgttcttgaagacgacgtcgttgacggccaccttggaggcgccggacttgacgcagatgttgttggggcagtacttctggtctatgatgatggggtaggagacgttgtccatggtgacgtcctggtacaggaacttggtggccttgagcgacgacttggagtcctcgtacgacttgatgcgcaggccgttggtggtgccggcgagcgtgcaccccgtcaccttcacgtcctccacgtccttctcgtccttgtaccgccccaggctgccgacgctgatgccgtggcccgggccgcacttgacgcccttcacgcggatggtcttgctcccggggccgatggagacgcagtcgtcgccgacggcgatggtggtgccgctgatggtcacgttgctcgagtcgccgatgtggatgccgtccgtgttggggctgttgccgggggccttgatcgtcaccttgtcgatcaccacgttcttgctcccgaagatgttcatgtggaagaacttgctgttcagcagcgtgatgccgcggatctgggcgttcgtcacgaagtccagcaccaggctctgcacgcgttcgccgttgcgatttacatcacatcaccttccgaagcaggggacagacagagaaagaagaagcacgtacgttggggaggattttgcagttgtaggaacgctggcactcgttcttgttccacaccagggctccctgcccgtcgatggtgccgtggccgttgatggacaggttgtcgacgttctggatctcgatccagttcctcttgtacgcgttgaggtcgccggtgccgagcaggttgccgtcgaggcggatgatgatggaggacttgcaggggcccaccaggtccagcgcgcccgtcaggtagttgcccttggggatgacgatcttctgctgccccgtcgcctcgcacgcgtgcttccacgccttgagcaccatcggggtgctgtccgacttgccgtcgcccttggcgcccagctgcgcgatgtccagcgagccagcgggcaccgacggcgcgcctcccacagccttcgccttcgcctccgcctccgccgccaccgcgcgcgcggcaggcgacaccgcggcgaacaccagcagagcggccacggctgccttcatcgccgcactgctgatgaacgccatcgatatgtctcgtgctgtagggtgcgtgccgcgccggagccgtggcgcgctcgggcacatatatatgcggcgacggcgagggggtggcgtgctatgtttgggatggccatggcgcgccgggcg

SEQ ID NO: 42009 - DNA, 3093 bp, Zea Mays
gagtgctagtcttcacggcggggttgttgtcgcttgtggccagccgccagcaccagcacaaggcgatcgagagtggtgaccaccagtaaactgcaaagtgcaaaccaaacaccacccacgagaaagcggaggagggagcaatggcggagccgagccagcagctgcggtcgttcgtggaggtgccggcgggctcccacttccccatccagaacctgcccttcggggtcttccgccggcggggggtgcaggcgcaggcgccgcgccccgcggtggccatcggggacttcgcgctcgacctcgccgccgtcgccgacgcggggctcttcgacgggcccgcgctctccggctccccgtgcttccaccaggagacgctcaacatgttcttggggatgggccggccggcgtggagggaggcgcgcgccacgctacagaaaatcctatcagccgacgagcccgtcttgcgtgacaacgaagcactgaggaacaagtgtctggtaccaatgagtgatatagagatggttctaccaatcacggttggaggttacacggacttcttttgttctgtgcaccatggaatgaattaggcaaacctattgatattaatgacgccgaagaacatatttttggcctaactttgatgaatgattggagtgccagagatatccaggcttgggagactatacctcttggacctttccttgggaaaagcttcagtaccacggtatcaccatggattgttaccctagatgctttgaagcctttcatgtgtgatgctcctaagcaggaacccgagcctttaccgtacttagccgaaaagaatcacataaattatgacattcctcttgaagcctggattaagccgaaagatcaaaatgacgcatcaattgtcacaaaaactaatttcaagcatctgtattggacgctgacacagcagctagcacaccacaccatcaacggatgcaacatgaggccgggggatatatttgcgactggcacactgagtggacctgaaccggactccctcgggtgtctgctggagctgacatggaacgggcagaaggagataccggtggggaatttgacccgcaagttcctagaagatggagatgaagtcatcttgacaggatgttgcaagggtgaaggctacaacattggttttggaacctgcaccgggaaggttctgccggcacttccctgagccaacacgtcttggcatcagttctccggagtctcaacgatctcagctatcagagagttgtctcaacggtctcaactatcaaagagttcatgccgctatctagcaaggctgctatgtaactgaacaatatgaatatgggttgttttcctgggctgttgaagatgaggagactgatgctctgttgtgcaataaaaccgcttcaccattttatacgatgtctccctctatttaagagttgggttgtgttcttaaacttgtacattgcaatgtcctctgtggcatgaaatttagatcatgtatatattttgaatggaattatagatccacactagtagaatgaataagaaagttcgcagattgccagaggcctaaaaaaagactggcgagagtgagaaagagagaggtgacgaagagtgagtgatggatgcaagtaggttcagacgcaggcgagctccttcgccatgccaatggacttgccgatggcgttcttgcagacggacatggtcttgttgtcggacctgttgtacttgatgtcgacgttgatgagctgcacgccctggcagggcaggttgttggcgcagttgagcgtgatggcctccggcgtgttggaggtgccgtggatgttcttgaagacgacgtcgttgacggccaccttggaggcgccggacttgacgcagatgttgttggggcagtacttctggtctatgatgatggggtaggagacgttgtccatggtgacgtcctggtacaggaacttggtggccttgagcgacgacttggagtcctcgtacgacttgatgcgcaggccgttggtggtgccggcgagcgtgcaccccgtcaccttcacgtcctccacgtccttctcgtccttgtaccgccccaggctgccgacgctgatgccgtggcccgggccgcacttgacgcccttcacgcggatggtcttgctcccggggccgatggagacgcagtcgtcgccgacggcgatggtggtgccgctgatggtcacgttgctcgagtcgccgatgtggatgccgtccgtgttggggctgttgccgggggccttgatcgtcaccttgtcgatcaccacgttcttgctcccgaagatgttcatgtggaagaacttgctgttcagcagcgtgatgccgcggatctgggcgttcgtcacgaagtccagcaccaggctctgcacgcgttcgccgttgcgatttacatcacatcaccttccgaagcaggggacagacagagaaagaagaagcacgtacgttggggaggattttgcagttgtaggaacgctggcactcgttcttgttccacaccagggctccctgcccgtcgatggtgccgtggccgttgatggacaggttgtcgacgttctggatctcgatccagttcctcttgtacgcgttgaggtcgccggtgccgagcaggttgccgtcgaggcggatgatgatggaggacttgcaggggcccaccaggtccagcgcgcccgtcaggtagttgcccttggggatgacgatcttctgctgccccgtcgcctcgcacgcgtgcttccacgccttgagcaccatcggggtgctgtccgacttgccgtcgcccttggcgcccagctgcgcgatgtccagcgagccagcgggcaccgacggcgcgcctcccacagccttcgccttcgcctccgcctccgccgccaccgcgcgcgcggcaggcgacaccgcggcgaacaccagcagagcggccacggctgccttcatcgccgcactgctgatgaacgccatcgatatgtctcgtgctgtagggtgcgtgccgcgccggagccgtggcgcgctcgggcacatatatatgcggcgacggcgagggggtggcgtgctatgtttgggatggccatggcgcgccgggcg

SEQ ID NO: 42010 - DNA, 3317 bp, Zea Mays
gagtgctagtcttcacggcggggttgttgtcgcttgtggccagccgccagcaccagcacaaggcgatcgagagtggtgaccaccagtaaactgcaaagtgcaaaccaaacaccacccacgagaaagcggaggagggagcaatggcggagccgagccagcagctgcggtcgttcgtggaggtgccggcgggctcccacttccccatccagaacctgcccttcggggtcttccgccggcggggggtgcaggcgcaggcgccgcgccccgcggtggccatcggggacttcgcgctcgacctcgccgccgtcgccgacgcggggctcttcgacgggcccgcgctctccggctccccgtgcttccaccaggacgctcaacatgttcttggggatgggccggccggcgtggagggaggcgcgcgccacgctacagaaaatcctatcagccgacgagcccgtcttgcgtgacaacgaagcactgaggaacaagtgtctggtaccaatgagtgatatagagatggttctaccaatcacggttggaggttacacggacttcttttgttctgtgcaccatgcaatgaattgtggattcatcttccgagggccgcagactccagtcaatccaaattggttttatcttccagtaggatacaatgggcgagcatcatctatagttgtgtctggaaccaatgtcattaggcccaggggacaaggacatccaacaggaaactccgctccttattttggtccctcgcagaagcttgattttgagcttgagatggctgccattgttggtccagggaatgaattaggcaaacctattgatattaatgacgccgaagaacatatttttggcctaactttgatgaatgattggagtgccagagatatccaggcttgggagactatacctcttggacctttccttgggaaaagcttcagtaccacggtatcaccatggattgttaccctagatgctttgaagcctttcatgtgtgatgctcctaagcaggaacccgagcctttaccgtacttagccgaaaagaatcacataaattatgacattcctcttgaagcctggattaagccgaaagatcaaaatgacgcatcaattgtcacaaaaactaatttcaagcatctgtattggacgctgacacagcagctagcacaccacaccatcaacggatgcaacatgaggccgggggatatatttgcgactggcacactgagtggacctgaaccggactccctcgggtgtctgctggagctgacatggaacgggcagaaggagataccggtggggaatttgacccgcaagttcctagaagatggagatgaagtcatcttgacaggatgttgcaagggtgaaggctacaacattggttttggaacctgcaccgggaaggttctgccggcacttccctgagccaacacgtcttggcatcagttctccggagtctcaacgatctcagctatcagagagttgtctcaacggtctcaactatcaaagagttcatgccgctatctagcaaggctgctatgtaactgaacaatatgaatatgggttgttttcctgggctgttgaagatgaggagactgatgctctgttgtgcaataaaaccgcttcaccattttatacgatgtctccctctatttaagagttgggttgtgttcttaaacttgtacattgcaatgtcctctgtggcatgaaatttagatcatgtatatattttgaatggaattatagatccacactagtagaatgaataagaaagttcgcagattgccagaggcctaaaaaaagactggcgagagtgagaaagagagaggtgacgaagagtgagtgatggatgcaagtaggttcagacgcaggcgagctccttcgccatgccaatggacttgccgatggcgttcttgcagacggacatggtcttgttgtcggacctgttgtacttgatgtcgacgttgatgagctgcacgccctggcagggcaggttgttggcgcagttgagcgtgatggcctccggcgtgttggaggtgccgtggatgttcttgaagacgacgtcgttgacggccaccttggaggcgccggacttgacgcagatgttgttggggcagtacttctggtctatgatgatggggtaggagacgttgtccatggtgacgtcctggtacaggaacttggtggccttgagcgacgacttggagtcctcgtacgacttgatgcgcaggccgttggtggtgccggcgagcgtgcaccccgtcaccttcacgtcctccacgtccttctcgtccttgtaccgccccaggctgccgacgctgatgccgtggcccgggccgcacttgacgcccttcacgcggatggtcttgctcccggggccgatggagacgcagtcgtcgccgacggcgatggtggtgccgctgatggtcacgttgctcgagtcgccgatgtggatgccgtccgtgttggggctgttgccgggggccttgatcgtcaccttgtcgatcaccacgttcttgctcccgaagatgttcatgtggaagaacttgctgttcagcagcgtgatgccgcggatctgggcgttcgtcacgaagtccagcaccaggctctgcacgcgttcgccgttgcgatttacatcacatcaccttccgaagcaggggacagacagagaaagaagaagcacgtacgttggggaggattttgcagttgtaggaacgctggcactcgttcttgttccacaccagggctccctgcccgtcgatggtgccgtggccgttgatggacaggttgtcgacgttctggatctcgatccagttcctcttgtacgcgttgaggtcgccggtgccgagcaggttgccgtcgaggcggatgatgatggaggacttgcaggggcccaccaggtccagcgcgcccgtcaggtagttgcccttggggatgacgatcttctgctgccccgtcgcctcgcacgcgtgcttccacgccttgagcaccatcggggtgctgtccgacttgccgtcgcccttggcgcccagctgcgcgatgtccagcgagccagcgggcaccgacggcgcgcctcccacagccttcgccttcgcctccgcctccgccgccaccgcgcgcgcggcaggcgacaccgcggcgaacaccagcagagcggccacggctgccttcatcgccgcactgctgatgaacgccatcgatatgtctcgtgctgtagggtgcgtgccgcgccggagccgtggcgcgctcgggcacatatatatgcggcgacggcgagggggtggcgtgctatgtttgggatggccatggcgcgccgggcg

SEQ ID NO: 42011 - DNA, 3354 bp, Zea Mays
gagtgctagtcttcacggcggggttgttgtcgcttgtggccagccgccagcaccagcacaaggcgatcgagagtggtgaccaccagtaaactgcaaagtgcaaaccaaacaccacccacgagaaagcggaggagggagcaatggcggagccgagccagcagctgcggtcgttcgtggaggtgccggcgggctcccacttccccatccagaacctgcccttcggggtcttccgccggcggggggtgcaggcgcaggcgccgcgccccgcggtggccatcggggacttcgcgctcgacctcgccgccgtcgccgacgcggggctcttcgacgggcccgcgctctccggctccccgtgcttccaccaggagacgctcaacatgttcttggggatgggccggccggcgtggagggaggcgcgcgccacgctacagaaaatcctatcagccgacgagcccgtcttgcgtgacaacgaagcactgaggaacaagtgtctggtaccaatgagtgatatagagatggttctaccaatcacggttggaggttacacggacttcttttgttctgtgcaccatgcaatgaattgtggattcatcttccgagggccgcagactccagtcaatccaaattggttttatcttccagtaggatacaatgggcgagcatcatctatagttgtgtctggaaccaatgtcattaggcccaggggacaaggacatccaacaggaaactccgctccttattttggtccctcgcagaagcttgattttgagcttgagatggctgccattgttggtccagggaatgaattaggcaaacctattgatattaatgacgccgaagaacatatttttggcctaactttgatgaatgattggagtgccagagatatccaggcttgggagactatacctcttggacctttccttgggaaaagcttcagtaccacggtatcaccatggattgttaccctagatgctttgaagcctttcatgtgtgatgctcctaagcaggaacccgagcctttaccgtacttagccgaaaagaatcacataaattatgacattcctcttgaagcctggattaagccgaaagatcaaaatgacgcatcaattgtcacaaaaactaatttcaagcatcttgctggcacatttcttgtaaccaatttttgcacaggtattggacgctgacacagcagctagcacaccacaccatcaacggatgcaacatgaggccgggggatatatttgcgactggcacactgagtggacctgaaccggactccctcgggtgtctgctggagctgacatggaacgggcagaaggagataccggtggggaatttgacccgcaagttcctagaagatggagatgaagtcatcttgacaggatgttgcaagggtgaaggctacaacattggttttggaacctgcaccgggaaggttctgccggcacttccctgagccaacacgtcttggcatcagttctccggagtctcaacgatctcagctatcagagagttgtctcaacggtctcaactatcaaagagttcatgccgctatctagcaaggctgctatgtaactgaacaatatgaatatgggttgttttcctgggctgttgaagatgaggagactgatgctctgttgtgcaataaaaccgcttcaccattttatacgatgtctccctctatttaagagttgggttgtgttcttaaacttgtacattgcaatgtcctctgtggcatgaaatttagatcatgtatatattttgaatggaattatagatccacactagtagaatgaataagaaagttcgcagattgccagaggcctaaaaaaagactggcgagagtgagaaagagagaggtgacgaagagtgagtgatggatgcaagtaggttcagacgcaggcgagctccttcgccatgccaatggacttgccgatggcgttcttgcagacggacatggtcttgttgtcggacctgttgtacttgatgtcgacgttgatgagctgcacgccctggcagggcaggttgttggcgcagttgagcgtgatggcctccggcgtgttggaggtgccgtggatgttcttgaagacgacgtcgttgacggccaccttggaggcgccggacttgacgcagatgttgttggggcagtacttctggtctatgatgatggggtaggagacgttgtccatggtgacgtcctggtacaggaacttggtggccttgagcgacgacttggagtcctcgtacgacttgatgcgcaggccgttggtggtgccggcgagcgtgcaccccgtcaccttcacgtcctccacgtccttctcgtccttgtaccgccccaggctgccgacgctgatgccgtggcccgggccgcacttgacgcccttcacgcggatggtcttgctcccggggccgatggagacgcagtcgtcgccgacggcgatggtggtgccgctgatggtcacgttgctcgagtcgccgatgtggatgccgtccgtgttggggctgttgccgggggccttgatcgtcaccttgtcgatcaccacgttcttgctcccgaagatgttcatgtggaagaacttgctgttcagcagcgtgatgccgcggatctgggcgttcgtcacgaagtccagcaccaggctctgcacgcgttcgccgttgcgatttacatcacatcaccttccgaagcaggggacagacagagaaagaagaagcacgtacgttggggaggattttgcagttgtaggaacgctggcactcgttcttgttccacaccagggctccctgcccgtcgatggtgccgtggccgttgatggacaggttgtcgacgttctggatctcgatccagttcctcttgtacgcgttgaggtcgccggtgccgagcaggttgccgtcgaggcggatgatgatggaggacttgcaggggcccaccaggtccagcgcgcccgtcaggtagttgcccttggggatgacgatcttctgctgccccgtcgcctcgcacgcgtgcttccacgccttgagcaccatcggggtgctgtccgacttgccgtcgcccttggcgcccagctgcgcgatgtccagcgagccagcgggcaccgacggcgcgcctcccacagccttcgccttcgcctccgcctccgccgccaccgcgcgcgcggcaggcgacaccgcggcgaacaccagcagagcggccacggctgccttcatcgccgcactgctgatgaacgccatcgatatgtctcgtgctgtagggtgcgtgccgcgccggagccgtggcgcgctcgggcacatatatatgcggcgacggcgagggggtggcgtgctatgtttgggatggccatggcgcgccgggcg

SEQ ID NO: 42012 - DNA, 3775 bp, Zea Mays
gtcagccacgttctgatttcgaagaggggcaaaaaagtccaagcagatgatcttttctctgttgatgtatcgaatagctcttcaatggcattttgtctgtaaacagcgtgtgagaatggcgaactagcgaagaccttgtacataatggcatttgggcgaaacccaagtttcataatggcatgattccaaatttctcctctccgcgacgggcgcccatggccatggcagacgaaacccttgcgccctcgtcgtcgtcggcaaagccctaaactttagtccacctccatttcggaaccttagccgggcgttcctgcgccgctgccatgggctgcagtcgccatgtccgttttgtctcctccggcgtcaagctaccgtccgcgtccgcgccatccccgttcccggcgcccgctcccgcgctcctctctgcggcgctcccgttcgcgcacatcggccgcgccatcgacgccgccgcgcgccgcctgggcgcatgcctgccccgcgtcccggttgcacgggccgacacggctccgcccccgccgcggaggcacgggaaggacggcggaggggccgaggagcgggtgctgatcagcgaggttgcggtgcggggaaaggacggggagccactggagcggcccgagctggaggccgaggccgcggcggcgctgcgcgcgtgccgccccaatgccgcgctcaccgtgcgggaggtgcaggaggacgtgcaccgcatcgtcgagagcggactcttccgatcgtgtatgcccgtcgctgtcgacacccgtgatggcattcgcctcgtcttcgaggtggagccgaaccaagacttccatgggctggtatgcgagggtgccaacttgctaccgtccaagttcctggaagatgcattttgtgttcgccatggaaaaattattaacattaggcatctggatcaagtgatcaagtccgtcaatggatggtatcaggagcgtggcctaactgggttggtctcatatgctgagatactttctggagggattctgaggctggaggtttcagaagctgaggttaataacattagcattcgctttctagacaggaagactggtgaaccaacacttggaaaaacacagccggaaaccatccttcggcagcttaccaccaggaaagggcaggtcagagcgcattttcaggagtacctttctcaatctgtctatgttttatatacctcaggaggactattgatgatatgctaaaatgcaaatagcatctttcagtcatgttcttctagatgtcgcatgaaatgctaacccttccaacttcacatttttttggatttcatgttctgttttgcattattcaagcactgaaatttctatgcaaaggctaataccagaatcaccagcattgataacaatataggcgtatcagtttggttggcgacttccgacttggagcccacataaccaagtccctcttttcttttattatgattgtgtatattctgtcattttcacagtaatatttggactcagactgggtgctttggacttaacattatgaaaataagcactgcagcattctgaaccaaaataatattatcaaccatctaaaaactatcacgtcgcaatagtatataaattttaacgttttatccatgtcctgttgtcttatgctctaacattaatattgcctgttaaaacttcaaattagtcgtgtctatttaaaattaagcaggcttacaatagggcacaagtgaaaagggatgtagaaacaatacttactatgggaataatggaggatgttacgataattccacaaccagttggagattctagtaaagtggaccttgtcatgaatcttgttgaacgcccttcgggtggtttctctgctggtggcggaatttcaagtgggataacaaatggacccctttctggacttattggcagctttgcgtattcacatcggaatgtttttgggaggaacaagaaattaaatctctctttggaaagggggcaaatcgattcaatatttagattgaactttactgacccttggattgatggtgacaacaagagaacctccagaactgttatggttcagaactctaggactcctggaacacttgtccatggtggtgatcatcctgaccatgggcctataacaattggacgtgttactgctggcttggaatatagtcgaccattcagacccaagtggagtgggacacttggcttaatttttcagcatgctggcgctcgtgatgataaagggaatcccgccatcagggatttctataacagccaattaactgccagtggacatgattatgatgatacattgctagctaaatttgaaagtatctacacagattctggggaccatagctctgcaatgtttgttttcagcgttgagcaaggtctccctgttcttcctgagtggctaagcttcaacagagtgacaacacgtttgaggcagggctatgaaattggtcctgctaggcttcttctaagtgcctctggaggtcacgtggagggaaattttccacctcatgaagcatttgcaattggtgggacaaatagtgtaaggggatacgaagaaggtgctgttggctctgggcgttcttatgctgtaggtagtggtgaagtgtcatgccgcatggtaaacttctttctcctcccaaccttactggcattttgtagttgtcaaatgggctccacgtggaagtatgccaaaatccagacacaattgtatggtaatttacctcagaatgctgtattggcaacaagggtatacatatctacataattcattataactggtactatcttagtatgatttgcaatttaagtaaaatttctttctcagatttagtttaatatatagctaactcagaaaggaaataaacaggtgggcatcctgtcacactgttcaagactcgaatacagattagatatggagcattttgtgcgtgtgtgtgcgtgcacccacactttttttatctgtatgcatgtatggaaccttctactgataggcgcctgacccagaagtaggaccccaaattaaaacacaatagagcagaccagtgctggaggcttccacatgagtgggatggggtcagtcttggaatgtgaatatctagcaatgaatattttagcaaaagcaagatgaatattcaacgtggggtggggtcagtcttggaatgtgaggctgccatttgattacttaatgttcttgttctgaatgcagtttgggccactggaaggcgtggtctttggcgactatggtagcgatcttggttctggtcctaaagttcctggtgacccagccggagctcgtggaaagccaggtagtggctatggctacggtgttggcgtccgcgtggactcccctctgggacctctgcggcttgagtacgccttcaatgataggcaagcaaggagatttcactttggtgttggctacagaaattgacatgtatattgattacattcagattcagccttgttcttcttagcattttgggctggtagaagatagtgccatgccttccaatttttggcgtttatcaaagcaaattttgtttagatcagatttctttttttctgtaacatatagtttccttctccacttctgtcgagtgttctccagctagagaaattagatggccccctgtaacgccctgaatttggggtaagattttttcttcttttctctcaccaaattcgggtgttactctcttttctctttccccgtttgctccttctccccaatttcaaactagtatagcgacaggtgtccg

SEQ ID NO: 42013 - DNA, 2633 bp, Zea Mays
gtcagccacgttctgatttcgaagaggggcaaaaaagtccaagcagatgatcttttctctgttgatgtatcgaatagctcttcaatggcattttgtctgtaaacagcgtgtgagaatggcgaactagcgaagaccttgtacataatggcatttgggcgaaacccaagtttcataatggcatgattccaaatttctcctctccgcgacgggcgcccatggccatggcagacgaaacccttgcgccctcgtcgtcgtcggcaaagccctaaactttagtccacctccatttcggaaccttagccgggcgttcctgcgccgctgccatgggctgcagtcgccatgtccgttttgtctcctccggcgtcaagctaccgtccgcgtccgcgccatccccgttcccggcgcccgctcccgcgctcctctctgcggcgctcccgttcgcgcacatcggccgcgccatcgacgccgccgcgcgccgcctgggcgcatgcctgccccgcgtcccggttgcacgggccgacacggctccgcccccgccgcggaggcacgggaaggacggcggaggggccgaggagcgggtgctgatcagcgaggttgcggtgcggggaaaggacggggagccactggagcggcccgagctggaggccgaggccgcggcggcgctgcgcgcgtgccgccccaatgccgcgctcaccgtgcgggaggtgcaggaggacgtgcaccgcatcgtcgagagcggactcttccgatcgtgtatgcccgtcgctgtcgacacccgtgatggcattcgcctcgtcttcgaggtggagccgaaccaagacttccatgggctggtatgcgagggtgccaacttgctaccgtccaagttcctggaagatgcattttgtgttcgccatggtaaacatgaaaaattattaacattaggcatctggatcaagtgatcaagtccgtcaatggatggtatcaggagcgtggcctaactgggttggtctcatatgctgagatactttctggagggattctgaggctggaggtttcagaagctgaggttaataacattagcattcgctttctagacaggaagactggtgaaccaacacttggaaaaacacagccggaaaccatccttcggcagcttaccaccaggaaagggcaggcttacaatagggcacaagtgaaaagggatgtagaaacaatacttactatgggaataatggaggatgttacgataattccacaaccagttggagattctagtaaagtggaccttgtcatgaatcttgttgaacgcccttcgggtggtttctctgctggtggcggaatttcaagtgggataacaaatggacccctttctggacttattggcagctttgcgtattcacatcggaatgtttttgggaggaacaagaaattaaatctctctttggaaagggggcaaatcgattcaatatttagattgaactttactgacccttggattgatggtgacaacaagagaacctccagaactgttatggttcagaactctaggactcctggaacacttgtccatggtggtgatcatcctgaccatgggcctataacaattggacgtgttactgctggcttggaatatagtcgaccattcagacccaagtggagtgggacacttggcttaatttttcagcatgctggcgctcgtgatgataaagggaatcccgccatcagggatttctataacagccaattaactgccagtggacatgattatgatgatacattgctagctaaatttgaaagtatctacacagattctggggaccatagctctgcaatgtttgttttcagcgttgagcaaggtctccctgttcttcctgagtggctaagcttcaacagagtgacaacacgtttgaggcagggctatgaaattggtcctgctaggcttcttctaagtgcctctggaggtcacgtggagggaaattttccacctcatgaagcatttgcaattggtgggacaaatagtgtaaggggatacgaagaaggtgctgttggctctgggcgttcttatgctgtaggtagtggtgaagtgtcatgccgcatgtttgggccactggaaggcgtggtctttggcgactatggtagcgatcttggttctggtcctaaagttcctggtgacccagccggagctcgtggaaagccaggtagtggctatggctacggtgttggcgtccgcgtggactcccctctgggacctctgcggcttgagtacgccttcaatgataggcaagcaaggagatttcactttggtgttggctacagaaattgacatgtatattgattacattcagattcagccttgttcttcttagcattttgggctggtagaagatagtgccatgccttccaatttttggcgtttatcaaagcaaattttgtttagatcagatttctttttttctgtaacatatagtttccttctccacttctgtcgagtgttctccagctagagaaattagatggccccctgtaacgccctgaatttggggtaagattttttcttcttttctctcaccaaattcgggtgttactctcttttctctttccccgtttgctccttctccccaatttcaaactagtatagcgacaggtgtccg

SEQ ID NO: 42014 - DNA, 2839 bp, Zea Mays
gtcagccacgttctgatttcgaagaggggcaaaaaagtccaagcagatgatcttttctctgttgatgtatcgaatagctcttcaatggcattttgtctgtaaacagcgtgtgagaatggcgaactagcgaagaccttgtacataatggcatttgggcgaaacccaagtttcataatggcatgattccaaatttctcctctccgcgacgggcgcccatggccatggcagacgaaacccttgcgccctcgtcgtcgtcggcaaagccctaaactttagtccacctccatttcggaaccttagccgggcgttcctgcgccgctgccatgggctgcagtcgccatgtccgttttgtctcctccggcgtcaagctaccgtccgcgtccgcgccatccccgttcccggcgcccgctcccgcgctcctctctgcggcgctcccgttcgcgcacatcggccgcgccatcgacgccgccgcgcgccgcctgggcgcatgcctgccccgcgtcccggttgcacgggccgacacggctccgcccccgccgcggaggcacgggaaggacggcggaggggccgaggagcgggtgctgatcagcgaggttgcggtgcggggaaaggacggggagccactggagcggcccgagctggaggccgaggccgcggcggcgctgcgcgcgtgccgccccaatgccgcgctcaccgtgcgggaggtgcaggaggacgtgcaccgcatcgtcgagagcggactcttccgatcgtgtatgcccgtcgctgtcgacacccgtgatggcattcgcctcgtcttcgaggtggagccgaaccaagacttccatgggctggtatgcgagggtgccaacttgctaccgtccaagttcctggaagatgcattttgtgttcgccatggaaaaattattaacattaggcatctggatcaagtgatcaagtccgtcaatggatggtatcaggagcgtggcctaactgggttggtaggtgatctgattttatatttctatctcacatagttgtttgtgctagctcctaggatacctcatacgtataccacacagaaacgaagatgaaacagaaacaattggtaccatggagcaggaaactaaggtgataaggacagaaagaagggaacaatgggaaagcagacatgcctagtgagcgcggatgttaacatacaaaataggaacgaaggtctcatatgctgagatactttctggagggattctgaggctggaggtttcagaagctgaggttaataacattagcattcgctttctagacaggaagactggtgaaccaacacttggaaaaacacagccggaaaccatccttcggcagcttaccaccaggaaagggcaggcttacaatagggcacaagtgaaaagggatgtagaaacaatacttactatgggaataatggaggatgttacgataattccacaaccagttggagattctagtaaagtggaccttgtcatgaatcttgttgaacgcccttcgggtggtttctctgctggtggcggaatttcaagtgggataacaaatggacccctttctggacttattggcagctttgcgtattcacatcggaatgtttttgggaggaacaagaaattaaatctctctttggaaagggggcaaatcgattcaatatttagattgaactttactgacccttggattgatggtgacaacaagagaacctccagaactgttatggttcagaactctaggactcctggaacacttgtccatggtggtgatcatcctgaccatgggcctataacaattggacgtgttactgctggcttggaatatagtcgaccattcagacccaagtggagtgggacacttggcttaatttttcagcatgctggcgctcgtgatgataaagggaatcccgccatcagggatttctataacagccaattaactgccagtggacatgattatgatgatacattgctagctaaatttgaaagtatctacacagattctggggaccatagctctgcaatgtttgttttcagcgttgagcaaggtctccctgttcttcctgagtggctaagcttcaacagagtgacaacacgtttgaggcagggctatgaaattggtcctgctaggcttcttctaagtgcctctggaggtcacgtggagggaaattttccacctcatgaagcatttgcaattggtgggacaaatagtgtaaggggatacgaagaaggtgctgttggctctgggcgttcttatgctgtaggtagtggtgaagtgtcatgccgcatgtttgggccactggaaggcgtggtctttggcgactatggtagcgatcttggttctggtcctaaagttcctggtgacccagccggagctcgtggaaagccaggtagtggctatggctacggtgttggcgtccgcgtggactcccctctgggacctctgcggcttgagtacgccttcaatgataggcaagcaaggagatttcactttggtgttggctacagaaattgacatgtatattgattacattcagattcagccttgttcttcttagcattttgggctggtagaagatagtgccatgccttccaatttttggcgtttatcaaagcaaattttgtttagatcagatttctttttttctgtaacatatagtttccttctccacttctgtcgagtgttctccagctagagaaattagatggccccctgtaacgccctgaatttggggtaagattttttcttcttttctctcaccaaattcgggtgttactctcttttctctttccccgtttgctccttctccccaatttcaaactagtatagcgacaggtgtccg

SEQ ID NO: 42015 - DNA, 3908 bp, Zea Mays
gtcagccacgttctgatttcgaagaggggcaaaaaagtccaagcagatgatcttttctctgttgatgtatcgaatagctcttcaatggcattttgtctgtaaacagcgtgtgagaatggcgaactagcgaagaccttgtacataatggcatttgggcgaaacccaagtttcataatggcatgattccaaatttctcctctccgcgacgggcgcccatggccatggcagacgaaacccttgcgccctcgtcgtcgtcggcaaagccctaaactttagtccacctccatttcggaaccttagccgggcgttcctgcgccgctgccatgggctgcagtcgccatgtccgttttgtctcctccggcgtcaagctaccgtccgcgtccgcgccatccccgttcccggcgcccgctcccgcgctcctctctgcggcgctcccgttcgcgcacatcggccgcgccatcgacgccgccgcgcgccgcctgggcgcatgcctgccccgcgtcccggttgcacgggccgacacggctccgcccccgccgcggaggcacgggaaggacggcggaggggccgaggagcgggtgctgatcagcgaggttgcggtgcggggaaaggacggggagccactggagcggcccgagctggaggccgaggccgcggcggcgctgcgcgcgtgccgccccaatgccgcgctcaccgtgcgggaggtgcaggaggacgtgcaccgcatcgtcgagagcggactcttccgatcgtgtatgcccgtcgctgtcgacacccgtgatggcattcgcctcgtcttcgaggtggagccgaaccaagacttccatgggctggtatgcgagggtgccaacttgctaccgtccaagttcctggaagatgcattttgtgttcgccatggaaaaattattaacattaggcatctggatcaagtgatcaagtccgtcaatggatggtatcaggagcgtggcctaactgggttgaaacgaagatgaaacagaaacaattggtaccatggagcaggaaactaaggtgataaggacagaaagaagggaacaatgggaaagcagacatgcctagtgagcgcggatgttaacatacaaaataggaacgaaggtctcatatgctgagatactttctggagggattctgaggctggaggtttcagaagctgaggttaataacattagcattcgctttctagacaggaagactggtgaaccaacacttggaaaaacacagccggaaaccatccttcggcagcttaccaccaggaaagggcaggtcagagcgcattttcaggagtacctttctcaatctgtctatgttttatatacctcaggaggactattgatgatatgctaaaatgcaaatagcatctttcagtcatgttcttctagatgtcgcatgaaatgctaacccttccaacttcacatttttttggatttcatgttctgttttgcattattcaagcactgaaatttctatgcaaaggctaataccagaatcaccagcattgataacaatataggcgtatcagtttggttggcgacttccgacttggagcccacataaccaagtccctcttttcttttattatgattgtgtatattctgtcattttcacagtaatatttggactcagactgggtgctttggacttaacattatgaaaataagcactgcagcattctgaaccaaaataatattatcaaccatctaaaaactatcacgtcgcaatagtatataaattttaacgttttatccatgtcctgttgtcttatgctctaacattaatattgcctgttaaaacttcaaattagtcgtgtctatttaaaattaagcaggcttacaatagggcacaagtgaaaagggatgtagaaacaatacttactatgggaataatggaggatgttacgataattccacaaccagttggagattctagtaaagtggaccttgtcatgaatcttgttgaacgcccttcgggtggtttctctgctggtggcggaatttcaagtgggataacaaatggacccctttctggacttattggcagctttgcgtattcacatcggaatgtttttgggaggaacaagaaattaaatctctctttggaaagggggcaaatcgattcaatatttagattgaactttactgacccttggattgatggtgacaacaagagaacctccagaactgttatggttcagaactctaggactcctggaacacttgtccatggtggtgatcatcctgaccatgggcctataacaattggacgtgttactgctggcttggaatatagtcgaccattcagacccaagtggagtgggacacttggcttaatttttcagcatgctggcgctcgtgatgataaagggaatcccgccatcagggatttctataacagccaattaactgccagtggacatgattatgatgatacattgctagctaaatttgaaagtatctacacagattctggggaccatagctctgcaatgtttgttttcagcgttgagcaaggtctccctgttcttcctgagtggctaagcttcaacagagtgacaacacgtttgaggcagggctatgaaattggtcctgctaggcttcttctaagtgcctctggaggtcacgtggagggaaattttccacctcatgaagcatttgcaattggtgggacaaatagtgtaaggggatacgaagaaggtgctgttggctctgggcgttcttatgctgtaggtagtggtgaagtgtcatgccgcatggtaaacttctttctcctcccaaccttactggcattttgtagttgtcaaatgggctccacgtggaagtatgccaaaatccagacacaattgtatggtaatttacctcagaatgctgtattggcaacaagggtatacatatctacataattcattataactggtactatcttagtatgatttgcaatttaagtaaaatttctttctcagatttagtttaatatatagctaactcagaaaggaaataaacaggtgggcatcctgtcacactgttcaagactcgaatacagattagatatggagcattttgtgcgtgtgtgtgcgtgcacccacactttttttatctgtatgcatgtatggaaccttctactgataggcgcctgacccagaagtaggaccccaaattaaaacacaatagagcagaccagtgctggaggcttccacatgagtgggatggggtcagtcttggaatgtgaatatctagcaatgaatattttagcaaaagcaagatgaatattcaacgtggggtggggtcagtcttggaatgtgaggctgccatttgattacttaatgttcttgttctgaatgcagtttgggccactggaaggcgtggtctttggcgactatggtagcgatcttggttctggtcctaaagttcctggtgacccagccggagctcgtggaaagccaggtagtggctatggctacggtgttggcgtccgcgtggactcccctctgggacctctgcggcttgagtacgccttcaatgataggcaagcaaggagatttcactttggtgttggctacagaaattgacatgtatattgattacattcagattcagccttgttcttcttagcattttgggctggtagaagatagtgccatgccttccaatttttggcgtttatcaaagcaaattttgtttagatcagatttctttttttctgtaacatatagtttccttctccacttctgtcgagtgttctccagctagagaaattagatggccccctgtaacgccctgaatttggggtaagattttttcttcttttctctcaccaaattcgggtgttactctcttttctctttccccgtttgctccttctccccaatttcaaactagtatagcgacaggtgtccg

SEQ ID NO: 42016 - DNA, 1653 bp, Zea Mays
gatgttaacatacaaaataggaacgaaggtctcatatgctgagatactttctggagggattctgaggctggaggtttcagaagctgaggttaataacattagcattcgctttctagacaggaagactggtgaaccaacacttggaaaaacacagccggaaaccatccttcggcagcttaccaccaggaaagggcaggcttacaatagggcacaagtgaaaagggatgtagaaacaatacttactatgggaataatggaggatgttacgataattccacaaccagttggagattctagtaaagtggaccttgtcatgaatcttgttgaacgcccttcgggtggtttctctgctggtggcggaatttcaagtgggataacaaatggacccctttctggacttattggcagctttgcgtattcacatcggaatgtttttgggaggaacaagaaattaaatctctctttggaaagggggcaaatcgattcaatatttagattgaactttactgacccttggattgatggtgacaacaagagaacctccagaactgttatggttcagaactctaggactcctggaacacttgtccatggtggtgatcatcctgaccatgggcctataacaattggacgtgttactgctggcttggaatatagtcgaccattcagacccaagtggagtgggacacttggcttaatttttcagcatgctggcgctcgtgatgataaagggaatcccgccatcagggatttctataacagccaattaactgccagtggacatgattatgatgatacattgctagctaaatttgaaagtatctacacagattctggggaccatagctctgcaatgtttgttttcagcgttgagcaaggtctccctgttcttcctgagtggctaagcttcaacagagtgacaacacgtttgaggcagggctatgaaattggtcctgctaggcttcttctaagtgcctctggaggtcacgtggagggaaattttccacctcatgaagcatttgcaattggtgggacaaatagtgtaaggggatacgaagaaggtgctgttggctctgggcgttcttatgctgtaggtagtgtttgggccactggaaggcgtggtctttggcgactatggtagcgatcttggttctggtcctaaagttcctggtgacccagccggagctcgtggaaagccaggtagtggctatggctacggtgttggcgtccgcgtggactcccctctgggacctctgcggcttgagtacgccttcaatgataggcaagcaaggagatttcactttggtgttggctacagaaattgacatgtatattgattacattcagattcagccttgttcttcttagcattttgggctggtagaagatagtgccatgccttccaatttttggcgtttatcaaagcaaattttgtttagatcagatttctttttttctgtaacatatagtttccttctccacttctgtcgagtgttctccagctagagaaattagatggccccctgtaacgccctgaatttggggtaagattttttcttcttttctctcaccaaattcgggtgttactctcttttctctttccccgtttgctccttctccccaatttcaaactagtatagcgacaggtgtccg

SEQ ID NO: 42017 - DNA, 1214 bp, Zea Mays
ccaatccacgcacgccatctccgactccgcgtccgcctcgcgcaggacatatattcagtgatggaacacaaggaggccggctgccagcagccggagggcccaatcctatgcatcaataactgtggtttctttggaagcgctgccaccatgaacatgtgctccaagtgccacaaggagatgataatgaagcaggagcaggcccagttggctgcctcctccatcgatagcattgtcaatggcggtgataatgggaaaggacctgcaattgctgcaactgtaggtgtggcagttcctcaagtcgaggagaagactatcgccgtgcagcctatgcatgtcgctgaaaccagcgaggctgctgctgttatcgcgaaggccaaggaaggcccaaaccggtgcgcaacctgtaggaagcgtgttgggttgacgggttttaactgccgatgcgggaacacgtactgttcgatgcaccgctactccgacaaacacgactgccagttcgactatcgaactgcagctagggacgctatcgccaaggccaatccagtggtgaaggcggagaagcttgacaagatctgaggcgggggcattgggtaacgaaaaatggttgcgatctgcaagaattcagcatgtctctttgctgctttatcattgaacttcccattcttgtcttgctgtcacgtcccctggggttcaatactatgatgcgcacagcatcctggcagctgcaagaattcatccccagtcgagtcacgaaaatggtttgcgtgttgactatgtcgtgtaagcttattcagttattcttggtggtttgggtcggtatcgtgtcattccccgtttaggtagctctgtaatctactattctcaatttctcatgtgtgttgccttccaatcagtaatagtaatcagcaattgtctgccatatctcctacaagtatattttccagttctattgttttctcttgatgttccagcaacatatcacattcaggtaatcgctctgcatttcaattcatgtgtacctgttatttcaattcagaggaccagaggttgagagggggccatagtggtttcaggccacttctctactatcgaccaatcagaggttatattcaagtaattgttcatatgtggaactattgaccaatcagcagatcttgctcctcgttctctgaggaagggtgcaatgaagtgggattcttgctgtcgaacactta

SEQ ID NO: 42018 - DNA, 1470 bp, Zea Mays
gacccgcatcgcagatctcccccttccctccacgcctctcgcgtcgccgcgatggccgacgaggccctggaccagccgccggacgcgaccccttctccgactccggcgacgccgccggtacccgccaccccgtcccccacggtgctgctccgcccgcggcgggaggcattcgagcacgggctcttgcccatccccaagctcatcttcccggagggtacgctggcgcagaccctcgcccagctcaaggagaagctcgctgcctcggccccggacggacgcgtgcgcgccgcggccctggcggaggcgttgcagatcccgcaggagcaggcggcgctcgccctcgccacgctcgcggctgtgctcccggcagaggaccccgcgctcggcgacggcgccgtggatggttctgccgcggacatccgcgacatgctgctcttcctctacatccagtcttacaaacgtctcgtcccgcggagtgcgcacaaggactcgcccgtcgtggcggacgtctggccgtccacctccgcgttcgatgggtacctctccgcactctccccgatccagcttgttcgcagtaacagccgtcgttttatgccttctcaagctgatgaagaaattcatcagttgtcctatctgcaaaagcatatggcgaatattcttactctcttggcagattctgttgagggtgatggtgatgattcactggtgttgacaatggagacttttgagcaccttggatttctagttcaattctcagaaggaacttctttaagccaggctgctacattttttgcatgctcagatccagacatgcctgatgtgcctgtccctgctgctcaggttcttgattggatgtcacagaaaatagctttttcactggaatattctgctgagaggtccgcagcaaaggaaagcaaccagcaaaccatgtctgatcttgatgtgaccatggctgaggccaatacaagtcacccacggaacagtacaccaagtgccaatcctgcatactacagaaatgtaacatttgtggagggcttttccaaaacctctgttgtcaagcatgcatctgatgtcaaagggaattctataaaggttttgaactgccatgattctgttatctacatattagcaccgctgaagtatgctactgtgtacggttgttctgatgctacagttgttcttggtgctgttggtaaggtagtaaaagtggagcattgtgaaagagtgcatatcattgcagctgcaaaacggatttgtattgccaactgccgggaatgcatcttctacataggagtaaatcaccaacctcttgtgttgggggacaaccataaattacaaattcctagttggtttggggatgaaaggcaagggactacaaaccgcaatcctttcccactgcctgaaatttatgggacatcccaaagcaaaaagctagttcatatttcaccatgctgtattactaaaggtcag

SEQ ID NO: 42019 - DNA, 2327 bp, Zea Mays
gacccgcatcgcagatctcccccttccctccacgcctctcgcgtcgccgcgatggccgacgaggccctggaccagccgccggacgcgaccccttctccgactccggcgacgccgccggtacccgccaccccgtcccccacggtgctgctccgcccgcggcgggaggcattcgagcacgggctcttgcccatccccaagctcatcttcccggagggtacgctggcgcagaccctcgcccagctcaaggagaagctcgctgcctcggccccggacggacgcgtgcgcgccgcggccctggcggaggcgttgcagatcccgcaggagcaggcggcgctcgccctcgccacgctcgcggctgtgctcccggcagaggaccccgcgctcggcgacggcgccgtggatggttctgccgcggacatccgcgacatgctgctcttcctctacatccagtcttacaaacgtctcgtcccgcggagtgcgcacaaggactcgcccgtcgtggcggacgtctggccgtccacctccgcgttcgatgggtacctctccgcactctccccgatccagcttgttcgcagtaacagccgtcgttttatgccttctcaagctgatgaagaaattcatcagttgtcctatctgcaaaagcatatggcgaatattcttactctcttggcagattctgttgagggtgatggtgatgattcactggtgttgacaatggagacttttgagcaccttggatttctagttcaattctcagaaggaacttctttaagccaggctgctacattttttgcatgctcagatccagacatgcctgatgtgcctgtccctgctgctcaggttcttgattggatgtcacagaaaatagctttttcactggaatattctgctgagaggtccgcagcaaaggaaagcaaccagcaaaccatgtctgatcttgatgtgaccatggctgaggccaatacaagtcacccacggaacagtacaccaagtgccaatcctgcatactacagaaatgtaacatttgtggagggcttttccaaaacctctgttgtcaagcatgcatctgatgtcaaagggaattctataaaggttttgaactgccatgattctgttatctacatattagcaccgctgaagtatgctactgtgtacggttgttctgatgctacagttgttcttggtgctgttggtaaggtagtaaaagtggagcattgtgaaagagtgcatatcattgcagctgcaaaacggatttgtattgccaactgccgggaatgcatcttctacataggagtaaatcaccaacctcttgtgttgggggacaaccataaattacaagttgctccattcaatacgtgctacccacaactgcatgaacatatgatacaagtggctgtcgatcccagtgtcaacaaatgggaccaaccttttgtgttgggagttgttgatccacatgattcattatcccatcctgctggagtttcagatgttaaagctgaatcagcaacatgtctggatcctgatctattcaccaattttttgattcctagttggtttggggatgaaaggcaagggactacaaaccgcaatcctttcccactgcctgaaatttatgggacatcccaaagcaaaaagctagttcatatttcaccatgctgtattactaaaggtcagatgttcctaagtacattgtattcttatcagcgttctgctctggaagatatccaaaagatgattcgggagctgcagcttgatgagaaccggaaaagggaattggcaactgcccttcacgttcagttcaaggattggttatacgcttcaggcaatatccgccagctctactgtctacagggcgattaacgatgggatttgcaagactgactacccttttgccgactcctactccaaaacattcgacaattgtcgaaagctgaccttcctttccctgggagagaggattcccacccgcgcagaaggatgtgaagatgtactgttacctacttttttacagattcatttgggtatattccctttgctgcgagttggaggtactaattaggatgtaatctccaagcctactcattttttttggcccttgataacgtccacgagtatgtaatagggactggtgaatcatacgttgtaaacatttcttcatcccgttttgctaaatggctcgtcatgtcaaccctctattggatcaactgtattgtgctcatccttatagacatgcttgtttgcaacttttttcgttggtcaaggttttgccactctcaggacgattattgtcagaatttatttgcaacatgttttggcccagttgttat

SEQ ID NO: 42020 - DNA, 2516 bp, Zea Mays
gacccgcatcgcagatctcccccttccctccacgcctctcgcgtcgccgcgatggccgacgaggccctggaccagccgccggacgcgaccccttctccgactccggcgacgccgccggtacccgccaccccgtcccccacggtgctgctccgcccgcggcgggaggcattcgagcacgggctcttgcccatccccaagctcatcttcccggagggtacgctggcgcagaccctcgcccagctcaaggagaagctcgctgcctcggccccggacggacgcgtgcgcgccgcggccctggcggaggcgttgcagatcccgcaggagcaggcggcgctcgccctcgccacgctcgcggctgtgctcccggcagaggaccccgcgctcggcgacggcgccgtggatggttctgccgcggacatccgcgacatgctgctcttcctctacatccagtcttacaaacgtctcgtcccgcggagtgcgcacaaggactcgcccgtcgtggcggacgtctggccgtccacctccgcgttcgatgggtacctctccgcactctccccgatccagcttgttcgcagtaacagccgtcgttttatgccttctcaagctgatgaagaaattcatcagttgtcctatctgcaaaagcatatggcgaatattcttactctcttggcagattctgttgagggtgatggtgatgattcactggtgttgacaatggagacttttgagcaccttggatttctagttcaattctcagaaggaacttctttaagccaggctgctacattttttgcatgctcagatccagacatgcctgatgtgcctgtccctgctgctcaggttcttgattggatgtcacagaaaatagctttttcactggaatattctgctgagaggtccgcagcaaaggaaagcaaccagcaaaccatgtctgatcttgatgtgaccatggctgaggccaatacaagtcacccacggaacagtacaccaagtgccaatcctgcatactacagaaatgtaacatttgtggagggcttttccaaaacctctgttgtcaagcatgcatctgatgtcaaagggaattctataaaggttttgaactgccatgattctgttatctacatattagcaccgctgaagtatgctactgtgtacggttgttctgatgctacagttgttcttggtgctgttggtaagagtacatgccttgctataagagttgaagacctgtatcaatgagaaacactggtgaaattgaatcctgaacccatctctactgtttgtcctcctgtagctctcctctgatcccccactccctcctatttcagtatcttccaagtccgtcccagtagttagttgcattggcaaaactttaacaagtcatagtaaattagtaacgttttttatttattgtgaaattttttacaagtctactttgaatttttatgctgtcaggtagtaaaagtggagcattgtgaaagagtgcatatcattgcagctgcaaaacggatttgtattgccaactgccgggaatgcatcttctacataggagtaaatcaccaacctcttgtgttgggggacaaccataaattacaagttgctccattcaatacgtgctacccacaactgcatgaacatatgatacaagtggctgtcgatcccagtgtcaacaaatgggaccaaccttttgtgttgggagttgttgatccacatgattcattatcccatcctgctggagtttcagatgttaaagctgaatcagcaacatgtctggatcctgatctattcaccaattttttgattcctagttggtttggggatgaaaggcaagggactacaaaccgcaatcctttcccactgcctgaaatttatgggacatcccaaagcaaaaagcgttctgctctggaagatatccaaaagatgattcgggagctgcagcttgatgagaaccggaaaagggaattggcaactgcccttcacgttcagttcaaggattggttatacgcttcaggcaatatccgccagctctactgtctacagggcgattaacgatgggatttgcaagactgactacccttttgccgactcctactccaaaacattcgacaattgtcgaaagctgaccttcctttccctgggagagaggattcccacccgcgcagaaggatgtgaagatgtactgttacctacttttttacagattcatttgggtatattccctttgctgcgagttggaggtactaattaggatgtaatctccaagcctactcattttttttggcccttgataacgtccacgagtatgtaatagggactggtgaatcatacgttgtaaacatttcttcatcccgttttgctaaatggctcgtcatgtcaaccctctattggatcaactgtattgtgctcatccttatagacatgcttgtttgcaacttttttcgttggtcaaggttttgccactctcaggacgattattgtcagaatttatttgcaacatgttttggcccagttgttat

SEQ ID NO: 42021 - DNA, 2054 bp, Zea Mays
gacccgcatcgcagatctcccccttccctccacgcctctcgcgtcgccgcgatggccgacgaggccctggaccagccgccggacgcgaccccttctccgactccggcgacgccgccggtacccgccaccccgtcccccacggtgctgctccgcccgcggcgggaggcattcgagcacgggctcttgcccatccccaagctcatcttcccggagggtacgctggcgcagaccctcgcccagctcaaggagaagctcgctgcctcggccccggacggacgcgtgcgcgccgcggccctggcggaggcgttgcagatcccgcaggagcaggcggcgctcgccctcgccacgctcgcggctgtgctcccggcagaggaccccgcgctcggcgacggcgccgtggatggttctgccgcggacatccgcgacatgctgctcttcctctacatccagtcttacaaacgtctcgtcccgcggagtgcgcacaaggactcgcccgtcgtggcggacgtctggccgtccacctccgcgttcgatgggtacctctccgcactctccccgatccagcttgttcgcagtaacagccgtcgttttatgccttctcaagctgatgaagaaattcatcagttgtcctatctgcaaaagcatatggcgaatattcttactctcttggcagattctgttgagggtgatggtgatgattcactggtgttgacaatggagacttttgagcaccttggatttctagttcaattctcagaaggaacttctttaagccaggctgctacattttttgcatgctcagatccagacatgcctgatgtgcctgtccctgctgctcaggttcttgattggatgtcacagaaaatagctttttcactggaatattctgctgagaggtccgcagcaaaggaaagcaaccagcaaaccatgtctgatcttgatgtgaccatggctgaggccaatacaagtcacccacggaacagtacaccaagtgccaatcctgcatactacagaaatgtaacatttgtggagggcttttccaaaacctctgttgtcaagcatgcatctgatgtcaaagggaattctataaaggttttgaactgccatgattctgttatctacatattagcaccgctgaagtatgctactgtgtacggttgttctgatgctacagttgttcttggtgctgttggtaaggtagtaaaagtggagcattgtgaaagagtgcatatcattgcagctgcaaaacggatttgtattgccaactgccgggaatgcatcttctacataggagtaaatcaccaacctcttgtgttgggggacaaccataaattacaaattcctagttggtttggggatgaaaggcaagggactacaaaccgcaatcctttcccactgcctgaaatttatgggacatcccaaagcaaaaagcgttctgctctggaagatatccaaaagatgattcgggagctgcagcttgatgagaaccggaaaagggaattggcaactgcccttcacgttcagttcaaggattggttatacgcttcaggcaatatccgccagctctactgtctacagggcgattaacgatgggatttgcaagactgactacccttttgccgactcctactccaaaacattcgacaattgtcgaaagctgaccttcctttccctgggagagaggattcccacccgcgcagaaggatgtgaagatgtactgttacctacttttttacagattcatttgggtatattccctttgctgcgagttggaggtactaattaggatgtaatctccaagcctactcattttttttggcccttgataacgtccacgagtatgtaatagggactggtgaatcatacgttgtaaacatttcttcatcccgttttgctaaatggctcgtcatgtcaaccctctattggatcaactgtattgtgctcatccttatagacatgcttgtttgcaacttttttcgttggtcaaggttttgccactctcaggacgattattgtcagaatttatttgcaacatgttttggcccagttgttat

SEQ ID NO: 42022 - DNA, 1568 bp, Zea Mays
ttggatttgattaaggtgttgacaatggagacttttgagcaccttggatttctagttcaattctcagaaggaacttctttaagccaggctgctacattttttgcatgctcagatccagacatgcctgatgtgcctgtccctgctgctcaggttcttgattggatgtcacagaaaatagctttttcactggaatattctgctgagaggtccgcagcaaaggaaagcaaccagcaaaccatgtctgatcttgatgtgaccatggctgaggccaatacaagtcacccacggaacagtacaccaagtgccaatcctgcatactacagaaatgtaacatttgtggagggcttttccaaaacctctgttgtcaagcatgcatctgatgtcaaagggaattctataaaggttttgaactgccatgattctgttatctacatattagcaccgctgaagtatgctactgtgtacggttgttctgatgctacagttgttcttggtgctgttggtaaggtagtaaaagtggagcattgtgaaagagtgcatatcattgcagctgcaaaacggatttgtattgccaactgccgggaatgcatcttctacataggagtaaatcaccaacctcttgtgttgggggacaaccataaattacaagttgctccattcaatacgtgctacccacaactgcatgaacatatgatacaagtggctgtcgatcccagtgtcaacaaatgggaccaaccttttgtgttgggagttgttgatccacatgattcattatcccatcctgctggagtttcagatgttaaagctgaatcagcaacatgtctggatcctgatctattcaccaattttttgattcctagttggtttggggatgaaaggcaagggactacaaaccgcaatcctttcccactgcctgaaatttatgggacatcccaaagcaaaaagcgttctgctctggaagatatccaaaagatgattcgggagctgcagcttgatgagaaccggaaaagggaattggcaactgcccttcacgttcagttcaaggattggttatacgcttcaggcaatatccgccagctctactgtctacagggcgattaacgatgggatttgcaagactgactacccttttgccgactcctactccaaaacattcgacaattgtcgaaagctgaccttcctttccctgggagagaggattcccacccgcgcagaaggatgtgaagatgtactgttacctacttttttacagattcatttgggtatattccctttgctgcgagttggaggtactaattaggatgtaatctccaagcctactcattttttttggcccttgataacgtccacgagtatgtaatagggactggtgaatcatacgttgtaaacatttcttcatcccgttttgctaaatggctcgtcatgtcaaccctctattggatcaactgtattgtgctcatccttatagacatgcttgtttgcaacttttttcgttggtcaaggttttgccactctcaggacgattattgtcagaatttatttgcaacatgttttggcccagttgttat

SEQ ID NO: 42023 - DNA, 1192 bp, Zea Mays
agaaaagagggttggcttatcctgaggttttgaactgccatgattctgttatctacatattagcaccgctgaagtatgctactgtgtacggttgttctgatgctacagttgttcttggtgctgttggtaaggtagtaaaagtggagcattgtgaaagagtgcatatcattgcagctgcaaaacggatttgtattgccaactgccgggaatgcatcttctacataggagtaaatcaccaacctcttgtgttgggggacaaccataaattacaagttgctccattcaatacgtgctacccacaactgcatgaacatatgatacaagtggctgtcgatcccagtgtcaacaaatgggaccaaccttttgtgttgggagttgttgatccacatgattcattatcccatcctgctggagtttcagatgttaaagctgaatcagcaacatgtctggatcctgatctattcaccaattttttgattcctagttggtttggggatgaaaggcaagggactacaaaccgcaatcctttcccactgcctgaaatttatgggacatcccaaagcaaaaagcgttctgctctggaagatatccaaaagatgattcgggagctgcagcttgatgagaaccggaaaagggaattggcaactgcccttcacgttcagttcaaggattggttatacgcttcaggcaatatccgccagctctactgtctacagggcgattaacgatgggatttgcaagactgactacccttttgccgactcctactccaaaacattcgacaattgtcgaaagctgaccttcctttccctgggagagaggattcccacccgcgcagaaggatgtgaagatgtactgttacctacttttttacagattcatttgggtatattccctttgctgcgagttggaggtactaattaggatgtaatctccaagcctactcattttttttggcccttgataacgtccacgagtatgtaatagggactggtgaatcatacgttgtaaacatttcttcatcccgttttgctaaatggctcgtcatgtcaaccctctattggatcaactgtattgtgctcatccttatagacatgcttgtttgcaacttttttcgttggtcaaggttttgccactctcaggacgattattgtcagaatttatttgcaacatgttttggcccagttgttat

SEQ ID NO: 42024 - DNA, 791 bp, Zea Mays
attttaagtgacgtgtcatttttttctcaaacaacgcatgagagctgtgtcatttcaccaaggaagaaaaaaaagattcctagttggtttggggatgaaaggcaagggactacaaaccgcaatcctttcccactgcctgaaatttatgggacatcccaaagcaaaaagcgttctgctctggaagatatccaaaagatgattcgggagctgcagcttgatgagaaccggaaaagggaattggcaactgcccttcacgttcagttcaaggattggttatacgcttcaggcaatatccgccagctctactgtctacagggcgattaacgatgggatttgcaagactgactacccttttgccgactcctactccaaaacattcgacaattgtcgaaagctgaccttcctttccctgggagagaggattcccacccgcgcagaaggatgtgaagatgtactgttacctacttttttacagattcatttgggtatattccctttgctgcgagttggaggtactaattaggatgtaatctccaagcctactcattttttttggcccttgataacgtccacgagtatgtaatagggactggtgaatcatacgttgtaaacatttcttcatcccgttttgctaaatggctcgtcatgtcaaccctctattggatcaactgtattgtgctcatccttatagacatgcttgtttgcaacttttttcgttggtcaaggttttgccactctcaggacgattattgtcagaatttatttgcaacatgttttggcccagttgttat

SEQ ID NO: 42025 - DNA, 1218 bp, Zea Mays
atggaaactaaaagcaacccacaaaatcaaattttttatggtatattcgtacatgagtgaacctcatcaaagataatttggctaaacaaaattggaaggaaagtaaagcatgtattttctatcaagacaacaaaacgatacattacatatttttttgaatgccattttgctcatctggtttagaacatgttttgggcgttcaaaatcccaaaaccaacatccacctcaaatatgttcgagaattcgctttaacactttgacaaaaaaattaaaaatatccctactagaagtagcaaccatctgtcagtctctgtggcctagtacaaacaatctgatttttcaaaaaaaaactttgtgactcctccgcatgttattttcactactacccactagttacaatcttggatcaagttgtagagacacgaacaacattctatggtgatggaggctttaaagcatttgaagcaaatggccatgacattcttatcccaagcacatgggtggcaatctagtcatacgattgagagtattaaaagtatgcatgtcatgtttctttttttctttttacttgctttcctcggttgtgtgcatcttgttattacataggtctagagatgttcgttatttcaaaagtattcattgtcctatagtttgtttgttttttgataaggaaatgcaataaaaatcttccttatccaaaaaaaacaaactacaggaagtgagatggggcaatgactgttgtgcaagtaagacataggtgagtgtgcaaacgacacatttagcatttacccccctccccccttaggtcactaatagtccagacatgtcactggtacgcactggtatggtgggggtttaaatgctaaaattagcaactacgattggatcacaatctaaaagccattgtctcaaggtaacgacggttacacaagcaaatcttaggtgcaagtatgtgagcctcctggattttaaatcatgatccaatcatccaaccaaagtcgtacgtacttaaacctcccatcataccagggcataccagtgtcatgtctggactaatagcgagctagtgaagggtttaagtgttaaatgtgtaactaaggttggtgagggtttaagtgctatatgtataactatggttggaatacgtgaagggccatgagacacgcacctaataaggcttgcttgctgcgtatatgaacaaaccagaaaagagcatcc

SEQ ID NO: 42026 - DNA, 1352 bp, Zea Mays
atcacacttataaaatataaagggactgaataggaggaattgttggagaggaggtcaaagaggaggaataaaagatatatttaaaaatgaatagaagatacaaatagcgggagatgagagggagacatttaaaaatgaaaagaaggcacaaatacggagagacgagaggggtaattgttgaaatcggtaactataggagcgggtcgccgcaatgcgcacggcagccctcttcctcgggaagatttcaaatccccgcggcctcttccatcttctgctcggcacggcactccggctgcccgaaaaatttcgcacatcccagattcccgcccgctctggttcgcgccctcgtctggttcccttgccaacccggtcattcaacgtcgcagccaccccgcgcggctagggctgggactcgaggcctagggtttggctgtaagtttggtaacacgatggcgggggccgcgggggagagcagcggcgagcggcaggggacggtggagcggcggatgctgcggtcgcggtaccacgccgtgaagaacatcatcagcgatgagcgggatgagatgtcgagggcggattcggacaggttcacagccatcatccagcaggtggattgcctacacgagctcgtgcagaggcctagggagcaaatagcggatgcagaagctctgcttggcattacaaacactttggtaacttcggtgaggtcccactcaagtgaaggaatcagcccttctgatttcataacagctttactcaagaagtttgggcagcaagggaatcatgatgatgagtctgtctcattacgatggggtgatcttgggctttctgtttcacatatcttcaggcctgtgcctggatgctgtaccatgcttggtcctatgaatactgaagtaaagcaacggaaagttgtagctgttggtaggaaacggactgcacggccaacagaaaatacctgtcctgaagagcttgctgagtcttcagaggaagtaaagacagacactgacaggaatgtcttagttatgtttgatatcctcaggcgaaagaagagcgcaaaattggaaaaccttgtgttgaataggctttcctttgcccaaacagttgaaaatgtttttgcactatctttcttagtgaaagatggtagggtggaaataactgtagatgatagcgggcatatagtacggccaaggaatgcacctgctgctagcgctatagcctcaggagaagtctcatacagtcattttgtttttagatttgacttcaaggactggaagcaccatgcctggagttggtctgtgagtaaagttttagggaatgcaactgaaaacagagcttaacatattcaactgctc

SEQ ID NO: 42027 - DNA, 1915 bp, Zea Mays
atcacacttataaaatataaagggactgaataggaggaattgttggagaggaggtcaaagaggaggaataaaagatatatttaaaaatgaatagaagatacaaatagcgggagatgagagggagacatttaaaaatgaaaagaaggcacaaatacggagagacgagaggggtaattgttgaaatcggtaactataggagcgggtcgccgcaatgcgcacggcagccctcttcctcgggaagatttcaaatccccgcggcctcttccatcttctgctcggcacggcactccggctgcccgaaaaatttcgcacatcccagattcccgcccgctctggttcgcgccctcgtctggttcccttgccaacccggtcattcaacgtcgcagccaccccgcgcggctagggctgggactcgaggcctagggtttggctgtaagtttggtaacacgatggcgggggccgcgggggagagcagcggcgagcggcaggggacggtggagcggcggatgctgcggtcgcggtaccacgccgtgaagaacatcatcagcgatgagcgggatgagatgtcgagggcggattcggacaggttcacagccatcatccagcaggtggattgcctacacgagctcgtgcagaggcctagggagcaaatagcggatgcagaagctctgcttggcattacaaacactttggtaacttcggtgaggtcccactcaagtgaaggaatcagcccttctgatttcataacagctttactcaagaagtttgggcagcaagggaatcatgatgatgagtctgtctcattacgatggggtgatcttgggctttctgtttcacatatcttcaggcctgtgcctggatgctgtaccatgcttggtcctatgaatactgaagtaaagcaacggaaagttgtagctgttggtaggaaacggactgcacggccaacagaaaatacctgtcctgaagagcttgctgagtcttcagaggaagtaaagacagacactgacaggaatgtcttagttatgtttgatatcctcaggcgaaagaagagcgcaaaattggaaaaccttgtgttgaataggctttcctttgcccaaacagttgaaaatgtttttgcactatctttcttagtgaaagatggtagggtggaaataactgtagatgatagcgggcatatagtacggccaaggaatgcacctgctgctagcgctatagcctcaggagaagtctcatacagtcattttgtttttagatttgacttcaaggactggaagagggagaagagctgttgccacacaggacttcccagagcaatctttgcaacgaagaaaacgaccaaccaaatctggaggcacgtgcgcaaataacgcccatcaggaaactcacccggaaccgaggattggtcttgcaggatcatgtagtcgaggaaactcctgaagagaaccaagcgtctaagcgcaggcgccttttcaggaatcaagattgacctagcaattgcttggcatgagtagtgtaggcaggcaacctggcttgtgttgtatgcaaaaaattgcctgagcctgagtaacgtgtctttcactaggtctgttgtgccatgctgtcttgttcttggcacagctcgtgcttatctgaacttccagttgtgccagcggagtagagctgtaattataaattgtttgaagttctggtcacatcttgcaactacagaatggtgtttgtagggctgagtgtaactagctagcttggctcggtctggtctgggtcattaactcatttattatcatggcaagatgtgcctcgggtcagcttgttaggctgtcatagcttactcatcctatctcttattttaaacttcattttgtaaatattacaacttacattgtaaaacaatattatggacgtccatatagatgat

SEQ ID NO: 42028 - DNA, 1858 bp, Zea Mays
cgcccccgccccgtatatatcccctgtccggagagcttgtcatgcagcaggctcccctcctcgcccgcccccgtacgtgtccatctctccactcctttcctttccttgttggtaagagcaaggcgagacgtaacgtaatccggccatggcgttcttccggggcctcaccgcggtctcgagactgcgatcccgcatggcgcaggaggccaccacgctgggtggtgtgagatggctgcagatgcagagcgcgtccgacctcgatcttaagtcccagctgcgggaactgattccggaacagcaggaccgcttaaagaagcttaaatcagagcatgggaaggttcagcttggaaacataactgtggatatggtccttggtggaatgagagggatcattggaatgctttgggagacatccctagtcgacccagaggagggtattcgttttaggggcctctcaattccagagtgccgaaaagtgctgccaacagcagttgagggtggtgaacctttgcctgagggtctcctctggcttcttttgacagggaaggtcccaaccaaagatcaagttgatgctctatcaaaagaattgcttgcgcgctcaactgtcccaggtaatagatgctctcccagtaactgcacatcctatgacacaatttaccgcaggaataatggctcttcaggttgagagcgaatttcaaaaagcttacggcaatggattgcccaaaatcaaagctttgggagcctacttatgaagactgcttaaatttgattgctcggcttccaccagtggcttcttatgtttaccggagaattttcaaggatgggaaatcaatagaagctgatgattctctggattatgcggcaaatttatcacatatgcttggttttgacgaccccaggatgctggagctgatgcggctccattgatcatgaaggcgggaatatcagttctcatactggtcatctggttggaagtgctctgtcagatccttatctttctttcgcatcatctgtgaatgggttagctgggccactacatggccttgcaaatcaggaagcgcttctatggctcaagtctataattcaggaaacagggagcgacgttacgacagaccaactcaaagactatgtctggaagacactgaagagtggaaaggttgttcatggatttggtcatggagttctgcgtaggacggacccacggtatctatgccaaagggagtttgccctgaagtatttgccagaggatccgcttttccaactgctgtccaagttatatgaggtcgtgcctccgatcctcactgagctgggaaaggtcaagaacccatggcccaatgttgacgctcacagtggactcttgctgaaccactttggactatctgaaacacggtatcacactgtcttgttcggtgtttcgagaagcatgggggtaggatcccagctcatctgggaccgtgcccttggcctgccactcgagaggcccaagagcgttaccatggagtggctggagaactactgcaagaacaaggctgcctgaagcttttcacaaatgctgctgctttttttccccccagccttggctgttaatgattaaacatgagttgtagaactattctttttccccccattggccgttgaataacgcaatagcagcgtgctctcgggcgctagaattctgtatctctccgtcacttggtggacgtccagatagacagttcatctgcggcaacactgtgcagaagagattaggacatttcacttggtgtatgccgacacttgagtttttgtttaacgttatgtttggcagagttaatcggtaattacagatttgggctatggcatgttatgttatcatgta

SEQ ID NO: 42029 - DNA, 2072 bp, Zea Mays
gagcttgtcatgcagcaggctcccctcctcgcccgcccccgtacgtgtccatctctccactcctttcctttccttgttggtaagagcaaggcgagacgtaacgtaatccggccatggcgttcttccggggcctcaccgcggtctcgagactgcgatcccgcatggcgcaggaggccaccacgctgggtggtgtgagatggctgcagatgcagagcgcgtccgacctcgatcttaagtcccagctgcgggaactgattccggaacagcaggaccgcttaaagaagcttaaatcagagcatgggaaggttcagcttggaaacataactgtggatatggtccttggtggaatgagagggatcattggaatgctttgggagacatccctagtcgacccagaggagggtattcgttttaggggcctctcaattccagagtgccgaaaagtgctgccaacagcagttgagggtggtgaacctttgcctgagggtctcctctggcttcttttgacagggaaggtcccaaccaaagatcaagttgatgctctatcaaaagaattgcttgcgcgctcaactgtcccaggtattttgatcacaccgctggctacttgtgttattgttttgaccaattaaatctacaaatcatctgaatgaactgatgctgatgtctccctgttctaaagttcaaaggtagtcacagattgatagagaggtctatatgattctgtcagtatgattgtgttaatgtttatatgctttatcttgctactctctagcggctcataattaatatccttgcagctcatgtctataaggtaatagatgctctcccagtaactgcacatcctatgacacaatttaccgcaggaataatggctcttcaggttgagagcgaatttcaaaaagcttacggcaatggattgcccaaaatcaaagctttgggagcctacttatgaagactgcttaaatttgattgctcggcttccaccagtggcttcttatgtttaccggagaattttcaaggatgggaaatcaatagaagctgatgattctctggattatgcggcaaatttatcacatatgcttggttttgacgaccccaggatgctggagctgatgcggctccatgtaacaattcacgctgatcatgaaggcgggaatatcagttctcatactggtcatctggttggaagtgctctgtcagatccttatctttctttcgcatcatctgtgaatgggttagctgggccactacatggccttgcaaatcaggaagcgcttctatggctcaagtctataattcaggaaacagggagcgacgttacgacagaccaactcaaagactatgtctggaagacactgaagagtggaaaggttgttcatggatttggtcatggagttctgcgtaggacggacccacggtatctatgccaaagggagtttgccctgaagtatttgccagaggatccgcttttccaactgctgtccaagttatatgaggtcgtgcctccgatcctcactgagctgggaaaggtcaagaacccatggcccaatgttgacgctcacagtggactcttgctgaaccactttggactatctgaaacacggtatcacactgtcttgttcggtgtttcgagaagcatgggggtaggatcccagctcatctgggaccgtgcccttggcctgccactcgagaggcccaagagcgttaccatggagtggctggagaactactgcaagaacaaggctgcctgaagcttttcacaaatgctgctgctttttttccccccagccttggctgttaatgattaaacatgagttgtagaactattctttttccccccattggccgttgaataacgcaatagcagcgtgctctcgggcgctagaattctgtatctctccgtcacttggtggacgtccagatagacagttcatctgcggcaacactgtgcagaagagattaggacatttcacttggtgtatgccgacacttgagtttttgtttaacgttatgtttggcagagttaatcggtaattacagatttgggctatggcatgttatgttatcatgta

SEQ ID NO: 42030 - DNA, 1664 bp, Zea Mays
gaaagtagctcctactgctacatcagaccgcttaaagaagcttaaatcagagcatgggaaggttcagcttggaaacataactgtggatatggtccttggtggaatgagagggatcattggaatgttcagcttggaaacataactgtggatatggtccttggtggaatgagagggatgattggaatgctttgggaaacatccctacttgacccagaggagggtattcgttttaggggtctctcgattccagagtgccaaaaagtgctgccaacagcagttaagggtggtgaacctttgcctgagggtctcctttggcttcttttgacagggaaggtcccaaccaaagagcaagttgatgcactatcaaaggaattgcttgcgcgctcaactgtcccagctcatgtctataaggcaatagatgctctcccagtaactgcacatcctatgacacagtttaccacgggagtaatggctcttcaggttgagagcgaatttcaaaaagcttatgacaatggattgccaaaatcaaagttttgggagcctacttatgaagactgcttaaacatgattgctcggcttccaccagtggcttcttatgtttaccggagaattttcaagggtgggaaatcaatagaaactgacaattctctggattatgcggcaaatttctcacacatgcttggttttgatgaccctaaaatgctggagctgatgcggctctatgtaacaattcacactgatcatgaaggcgggaatgtcagtgctcatactggtcatctggttggaagtgctctgtcagatccttatctttctttcgcagcggctctaaatgggttagctgggccactacatggccttgcaaatcaggaagtgcttctatggatcaaatctgtaattcaggaaactgggagtgatgttacaacggatcaactcaaagagtatgtctggaagacactaaagagtggaaaggttgttcctggatttggtcatggagttctgcgtaagacagacccacggtattcatgtcaaagggagtttgccctgaagcatttgcccgaggatccacttttccaactggtgtccaagttatatgaagtcgtacctccgatcctcactgagctaggaaaggtcaagaacccgtggccgaatgttgatgctcacagtggagttttgctgaaccactttggactatctgaagcacggtattacactgtcttgttcggtgtttcgagaagcatggggataggatcccagctcatctgggaccgtgcccttggcctgccacttgagaggccgaagagtgttaccatggagtggctggagaactactgcaataacaaggctgcctgaagattttaacagttgctgttttttcccaaccatggctgataataattaaacatgcgttatagagttttttcccccttttgactgttggataatacaagagcaacatgctctagaattttgtatcttccatcacttagtcggcatccagattgttgatctgcggcaacactgcagaagagattaggacatgctgattaatctttgcagagttaattggtaattacagaattgggcttttgcatgtatcatgtatgccaattatctcgttgtggcagttctgttttaagttgatccgcgacatggctggattgctg

SEQ ID NO: 42031 - DNA, 1605 bp, Zea Mays
tactcgtagaccttctgtgacgaaccttgatcgcctaaagaagcttaaatcagagcatgggaaggttcagcttggaaacataactgtggatatggtccttggtggaatgagagggatgattggaatgctttgggaaacatccctacttgacccagaggagggtattcgttttaggggtctctcgattccagagtgccaaaaagtgctgccaacagcagttaagggtggtgaacctttgcctgagggtctcctttggcttcttttgacagggaaggtcccaaccaaagagcaagttgatgcactatcaaaggaattgcttgcgcgctcaactgtcccagctcatgtctataaggcaatagatgctctcccagtaactgcacatcctatgacacagtttaccacgggagtaatggctcttcaggttgagagcgaatttcaaaaagcttatgacaatggattgccaaaatcaaagttttgggagcctacttatgaagactgcttaaacatgattgctcggcttccaccagtggcttcttatgtttaccggagaattttcaagggtgggaaatcaatagaaactgacaattctctggattatgcggcaaatttctcacacatgcttggttttgatgaccctaaaatgctggagctgatgcggctctatgtaacaattcacactgatcatgaaggcgggaatgtcagtgctcatactggtcatctggttggaagtgctctgtcagatccttatctttctttcgcagcggctctaaatgggttagctgggccactacatggccttgcaaatcaggaagtgcttctatggatcaaatctgtaattcaggaaactgggagtgatgttacaacggatcaactcaaagagtatgtctggaagacactaaagagtggaaaggttgttcctggatttggtcatggagttctgcgtaagacagacccacggtattcatgtcaaagggagtttgccctgaagcatttgcccgaggatccacttttccaactggtgtccaagttatatgaagtcgtacctccgatcctcactgagctaggaaaggtcaagaacccgtggccgaatgttgatgctcacagtggagttttgctgaaccactttggactatctgaagcacggtattacactgtcttgttcggtgtttcgagaagcatggggataggatcccagctcatctgggaccgtgcccttggcctgccacttgagaggccgaagagtgttaccatggagtggctggagaactactgcaataacaaggctgcctgaagattttaacagttgctgttttttcccaaccatggctgataataattaaacatgcgttatagagttttttcccccttttgactgttggataatacaagagcaacatgctctagaattttgtatcttccatcacttagtcggcatccagattgttgatctgcggcaacactgcagaagagattaggacatgctgattaatctttgcagagttaattggtaattacagaattgggcttttgcatgtatcatgtatgccaattatctcgttgtggcagttctgttttaagttgatccgcgacatggctggattgctg

SEQ ID NO: 42032 - DNA, 5960 bp, Zea Mays
atcctctgtttgagtgcgcacatgaaaagtcaaagttccagccctacccctcgctccctcgtcttcctcctccgctcaattcctccccacgcacccgtcacctctttccattccaatttcttccacctccctctctcagatctccacccctcccccaatgatgtgacggtcatcacgagggcgaaaaccaacgcacagaacccctcaccatggctacgtccacgatgccactcggcggggcgtctccgtcgggccgcgttctgggtccggcgctggaccggatcataaaaaacgccgcatggcggaagcactcagcgctcgtggccgcggcaaaggcggcactcgacctcctctcttcatcgccggcatacccgtcttcggaccctatctcgccgcaatcctcgctgctgctcggcctgccctccgccgccgccgacgcggccctccacgcgctgctgctcgctctcgagtcagcttcgcccaaggtcgtcgaccccgctctcgattgcgtcaccaaacttctttaccaccgcctcctctttggcgacctcggctgcgccggggacgatgcctcttcccccacctccaggctcttcaccgccgtccttacctgtggcgctctctctgatgatgcaatggagcttgccaccctccgtgttatcatcgccgccgcgcggtgccccactgtcgccatccgcggggagggcctcggccaggtgctcaagacctgctacaacatatacctcagcagcaacagtggggccaatcagctctgcgccaagcttgcgctggcgcaggtcctgctgattgtgtttgcacgcgtggaggtggattcgatggacgtgcgcattcggacggtgtcgatcacggagatgatggacgtgtctgatcgcaacctgaacgactccagcatcgtgcaggtggctcaggggtttataaacgagacaatggaggggagtgttgcaccagagccagggtcacatttggagccaaccgaggtggatggaaaggaggatactgggatgagcaagattagagaggatgggcttgcactcttgaagaacctgtgtaagctgtcaatgaagttctcgacgccagataaccctgaggatcagatgttgctgcgcggcaaggtgttgtcacttgagttgctgaaaatggttatcgacaatgctggccctttctggagaacaaatgaaaagtacattggagcaatcaagcagtatctttgtttgtccttattgaagaacagtgctttgtcagcaatgagtattttccagttgttgtgctccatatttgtgggcttactgtcaaggtttagatctggactgaaagaggaaattggaatattctttccaatgcttgttctaagggttcttgagaatgtccatcaacctagctttctacaaaaaatgacagttctaaacttgttggagaagatctgtaaagaatctcaggttcttattgatatctttgtgaactatgattgtgatgtagatgcaccaaatatttttgaaagggttgtcaatggacttctaaagactgctttaggtgttcctccaggatctacaacaacattaactatagcccaagaccaaacatttcgtattgagtcagtgaagtgccttgcaaccataatcaagtcaatgggttcatggatggaccaacagctgagaattggtgatttttcaccaaaaatatctgaagcttctttaagttctttaagttcaatagataaccccaacatccttattggagaagatggtagtggaattgattatgaactgcaatctgactctggtagcccagatgtatctggtgctccctcccttgagcagcgtcgtgcttttaaaatagaacttcagaaaggaatatccttgtttaaccgaaaaccttccaagggaattaattttctcgttaaaagcaagaagatagggcatacaccagaagatgttgcttgtttcttgagaaatactgctggtttaaatgcaacaatgattggagactatttgggtgaaagagatgaattccctatcaaagttatgcatgcatatgttgatgcactaaactttgaaggtatggacttcggtgaagctattaggtattatttgcgaggcttcaggttgcctggggaagcacagaaaattgatcggatcatggaaaagtttgctgaacgatactgcaaatgcaatccaaactcctttaccagtgcagatactgcatatgttcttgcttattctgtaatcatgctcaacactgatgctcacaatactatggtcaaggataagatgtctaaatctgacttcattcgcaataaccgaggaatagatgatggaaaggatttgccagaaacttatctgggtacactatatgaccaaattgtcaaaaatgagatcaaaatgagtgctggttcatcagttccacaaaacaagcaacctagtagtgtgatgaagctactaggattggacaatattattagctttgttaactggaaacaggctgatgacagggtagttggagcaaacgacctgctcatcaaaaccatacaagagaaatttaaactaaagagtggaaagtcggagtctgtgttttctgttatcactgatacaacaattttaagattcatgatggaggtttgttgggcccctatgatggctgcattcagtgtgacacttgatcagagtgatgataaggcggccacgtcgcagtgtttgcagggattcagatctgctgtgcatgttacctctgttatgtgcatggagacacagagagatgcctttgtgacatctgtagccaaattcacatatctgcattgtgctgctgacatgaaacaaaagaatgtggatgctgtgaaggctattatatccattgcaatcgaagatggtgattatttgcaggaagcttgggagcatgtactaacatgcctttcacggtttgagcatttacaccttcttggagagggggcacctactgatgcttcatttctcacagtaccactggttgactcagaagaaaaaacacagaagtctacctctatgtcatcaaagagaactaatgcacttcagaatccagctgtaatggctgctgttagaggaggttcttatgacagcacaacagcaaaaaataaagcatcaccgttggttactcctgaacagattaataatttcatatcaaacataaacctgctagaccagattggcatttttgagttaaatcacatatttgctcatagcccaagattaaatagtgatgctattgttgcttttgtgaaagctctttgcaaagtttcaatgacagagttgcagtctcctacagatcctcgtattttctgcctaacaaagattgttgagattgcgcattacaatatgaaccgcattcgtttggtttggtcccgtatttggaaagttctgtcagatttttttgtttctgttgggttgtcagagaacctttcagttgcaatatttgttatggactctttaaggcagctagctatgaagtttctggaaagagaagaactggcaaattataatttccaaaatgaattcctgcaaccttttgcggttgttatgcagaagagcaatgcttcagaagttcgtgaacttatagttcgatgtgtctcccaaatggttctgagtcgtgtcaacaatataaaatctggttggaaaagtgtttttacggtttttactgcagctgctgctgatgatcgaaaaaatattgttttgttggcatttgaaaccatggaaaagattgttcgggactatttcccttacataactgaaactgaaacaacaacgtttactgattgtgttaaatgccttatcacattcacaagtagtaaattcagcagtgatgccagtcttaatgccattgcatttcttcggttttgtgctgtcaaactcgctgaggaaggatttattagtcatgagaaggatactgaacagcaaccaagtaaaatagattcatcagatgggaacagcatggtgcataaggacgatcatgtttacttctgggttcctttgcttgctggtctagctagattgacaacggactcaagaccaactatcagaaaaggttctgcagaagtgctctttgacatcttggcagatcatgggcacctcttttctcagtccttctgggctaatatcttcgaatcagttatctatcctctttttagcagtgaaagttttgcaccaaatggccagatctcaagtgtaaatagtactgaggatgattcttggaattttgaaactaaaacggtggctctaaaatgtttagcagatttgtatattatgttttttgaagtgatgcgtccagaactttctagagttacttctgttattacgaatttcatcagaagcccttataaacaatcagctagcacgggtatatcagtttttcagcgtttaacagaaggactcgcgagcaagctctccaatgatgagtggggaacggtcctgttgtgcttcaaagaatcagcatcacatacatttgttgtgtttgacaaaatagttaaaatgatgaaagtcattgaaattccagatagaaatgaatcttactctgaagctgagcaatattcagatcatgacatatacaatgatgaagaagaggaagccaatatggaaacggcgtcttatgctattgtcagaatgaagaatcatatggctttgcaactcttaatcgttgagggcatcatcaaattgtatgaggttcacaggagctttcttggtgctgagcatatagtcataatgttggagattctatctgccattgcatcacatgcaagtgaagtgaactctgaatctaacttgcacaggaaactacataaagcatgctctattttggaggtacctgagccagcggttatccatttcgagagcgagtcctaccagagctacctcaaacttctccaagctcttcttcatgataacccatctttgtcagaaactatgaatgtggagtcacaaattatgctcgtctgtgagaaaatactgcgaatgtatctgacctgcgcagagcatgaactgtctaatggtgtttctggtaggggtccagctttacaacggatgcctctgggtacttctaaaaaggaggagctgggtgctagaactccatttgtccttcatgtgatggggttattgggcagtttagagaagaactgctttaggagaaacttgccccgctttttccccttattagctaatcttattcgctgcgagcataactctggagaagttcaagttgcactgtatgatatcttccaatcatcaataggccccataatatcagcatagcgtatattgtttcctcgccagttgtacaattttgtcagattgtggtataagaaaagggtacagctttacagtactgtaaatgattcatggttgaggcatttctggtgttgaagctacatggaacatcgacccagatgtctaaacaaggtttttgctgcgcacatttgccattcttttttctaacattcactgggtaatcattgacacgttaaagaggatggacattggaataagtccctaattcctgttttggtgtcatttcccccctttcatcttggctctgtatagtgtcgtctcccgaacctcagctaccagtgaagagggacttctgtcatatgttactgttcaacatattcgtctgtcgaataccattttaacagtatctacattgtagttagtatatatatactttcattctaacagcaatggatatcccaatggatgtctattaaagaaaggtgagcaatatagttcaataccttttctcacgtcccattgccatcaggatcacgacttggtactctaatcagaataccttccccctccctaagaatcttcaattatatgagcactttccgtcagataggctacggtcagcagattgtacatatagttgtgcaaaatactgttctaaacactgtagattcatagagtgaagtttgaattgag

SEQ ID NO: 42033 - DNA, 5863 bp, Zea Mays
ctcgtcttcctcctccgctcaattcctccccacgcacccgtcacctctttccattccaatttcttccacctccctctctcagatctccacccctcccccaatgatgtgacggtcatcacgagggcgaaaaccaacgcacagaacccctcaccatggctacgtccacgatgccactcggcggggcgtctccgtcgggccgcgttctgggtccggcgctggaccggatcataaaaaacgccgcatggcggaagcactcagcgctcgtggccgcggcaaaggcggcactcgacctcctctcttcatcgccggcatacccgtcttcggaccctatctcgccgcaatcctcgctgctgctcggcctgccctccgccgccgccgacgcggccctccacgcgctgctgctcgctctcgagtcagcttcgcccaaggtcgtcgaccccgctctcgattgcgtcaccaaacttctttaccaccgcctcctctttggcgacctcggctgcgccggggacgatgcctcttcccccacctccaggctcttcaccgccgtccttacctgtggcgctctctctgatgatgcaatggagcttgccaccctccgtgttatcatcgccgccgcgcggtgccccactgtcgccatccgcggggagggcctcggccaggtgctcaagacctgctacaacatatacctcagcagcaacagtggggccaatcagctctgcgccaagcttgcgctggcgcaggtcctgctgattgtgtttgcacgcgtggaggtggattcgatggacgtgcgcattcggacggtgtcgatcacggagatgatggacgtgtctgatcgcaacctgaacgactccagcatcgtgcaggtggctcaggggtttataaacgagacaatggaggggagtgttgcaccagagccagggtcacatttggagccaaccgaggtggatggaaaggaggatactgggatgagcaagattagagaggatgggcttgcactcttgaagaacctgtgtaagctgtcaatgaagttctcgacgccagataaccctgaggatcagatgttgctgcgcggcaaggtgttgtcacttgagttgctgaaaatggttatcgacaatgctggccctttctggagaacaaatgaaaagtacattggagcaatcaagcagtatctttgtttgtccttattgaagaacagtgctttgtcagcaatgagtattttccagttgttgtgctccatatttgtgggcttactgtcaaggtttagatctggactgaaagaggaaattggaatattctttccaatgcttgttctaagggttcttgagaatgtccatcaacctagctttctacaaaaaatgacagttctaaacttgttggagaagatctgtaaagaatctcaggttcttattgatatctttgtgaactatgattgtgatgtagatgcaccaaatatttttgaaagggttgtcaatggacttctaaagactgctttaggtgttcctccaggatctacaacaacattaactatagcccaagaccaaacatttcgtattgagtcagtgaagtgccttgcaaccataatcaagtcaatgggttcatggatggaccaacagctgagaattggtgatttttcaccaaaaatatctgaagcttctttaagttctttaagttcaatagataaccccaacatccttattggagaagatggtagtggaattgattatgaactgcaatctgactctggtagcccagatgtatctggtgctccctcccttgagcagcgtcgtgcttttaaaatagaacttcagaaaggaatatccttgtttaaccgaaaaccttccaagggaattaattttctcgttaaaagcaagaagatagggcatacaccagaagatgttgcttgtttcttgagaaatactgctggtttaaatgcaacaatgattggagactatttgggtgaaagagatgaattccctatcaaagttatgcatgcatatgttgatgcactaaactttgaaggtatggacttcggtgaagctattaggtattatttgcgaggcttcaggttgcctggggaagcacagaaaattgatcggatcatggaaaagtttgctgaacgatactgcaaatgcaatccaaactcctttaccagtgcagatactgcatatgttcttgcttattctgtaatcatgctcaacactgatgctcacaatactatggtcaaggataagatgatggaaaggatttgccagaaacttatctgggtacactatatgaccaaattgtcaaaaatgagatcaaaatgagtgctggttcatcagttccacaaaacaagcaacctagtagtgtgatgaagctactaggattggacaatattattagctttgttaactggaaacaggctgatgacagggtagttggagcaaacgacctgctcatcaaaaccatacaagagaaatttaaactaaagagtggaaagtcggagtctgtgttttctgttatcactgatacaacaattttaagattcatgatggaggtttgttgggcccctatgatggctgcattcagtgtgacacttgatcagagtgatgataaggcggccacgtcgcagtgtttgcagggattcagatctgctgtgcatgttacctctgttatgtgcatggagacacagagagatgcctttgtgacatctgtagccaaattcacatatctgcattgtgctgctgacatgaaacaaaagaatgtggatgctgtgaaggctattatatccattgcaatcgaagatggtgattatttgcaggaagcttgggagcatgtactaacatgcctttcacggtttgagcatttacaccttcttggagagggggcacctactgatgcttcatttctcacagtaccactggttgactcagaagaaaaaacacagaagtctacctctatgtcatcaaagagaactaatgcacttcagaatccagctgtaatggctgctgttagaggaggttcttatgacagcacaacagcaaaaaataaagcatcaccgttggttactcctgaacagattaataatttcatatcaaacataaacctgctagaccagattggcatttttgagttaaatcacatatttgctcatagcccaagattaaatagtgatgctattgttgcttttgtgaaagctctttgcaaagtttcaatgacagagttgcagtctcctacagatcctcgtattttctgcctaacaaagattgttgagattgcgcattacaatatgaaccgcattcgtttggtttggtcccgtatttggaaagttctgtcagatttttttgtttctgttgggttgtcagagaacctttcagttgcaatatttgttatggactctttaaggcagctagctatgaagtttctggaaagagaagaactggcaaattataatttccaaaatgaattcctgcaaccttttgcggttgttatgcagaagagcaatgcttcagaagttcgtgaacttatagttcgatgtgtctcccaaatggttctgagtcgtgtcaacaatataaaatctggttggaaaagtgtttttacggtttttactgcagctgctgctgatgatcgaaaaaatattgttttgttggcatttgaaaccatggaaaagattgttcgggactatttcccttacataactgaaactgaaacaacaacgtttactgattgtgttaaatgccttatcacattcacaagtagtaaattcagcagtgatgccagtcttaatgccattgcatttcttcggttttgtgctgtcaaactcgctgaggaaggatttattagtcatgagaaggatactgaacagcaaccaagtaaaatagattcatcagatgggaacagcatggtgcataaggacgatcatgtttacttctgggttcctttgcttgctggtctagctagattgacaacggactcaagaccaactatcagaaaaggttctgcagaagtgctctttgacatcttggcagatcatgggcacctcttttctcagtccttctgggctaatatcttcgaatcagttatctatcctctttttagcagtgaaagttttgcaccaaatggccagatctcaagtgtaaatagtactgaggatgattcttggaattttgaaactaaaacggtggctctaaaatgtttagcagatttgtatattatgttttttgaagtgatgcgtccagaactttctagagttacttctgttattacgaatttcatcagaagcccttataaacaatcagctagcacgggtatatcagtttttcagcgtttaacagaaggactcgcgagcaagctctccaatgatgagtggggaacggtcctgttgtgcttcaaagaatcagcatcacatacatttgttgtgtttgacaaaatagttaaaatgatgaaagtcattgaaattccagatagaaatgaatcttactctgaagctgagcaatattcagatcatgacatatacaatgatgaagaagaggaagccaatatggaaacggcgtcttatgctattgtcagaatgaagaatcatatggctttgcaactcttaatcgttgagggcatcatcaaattgtatgaggttcacaggagctttcttggtgctgagcatatagtcataatgttggagattctatctgccattgcatcacatgcaagtgaagtgaactctgaatctaacttgcacaggaaactacataaagcatgctctattttggaggtacctgagccagcggttatccatttcgagagcgagtcctaccagagctacctcaaacttctccaagctcttcttcatgataacccatctttgtcagaaactatgaatgtggagtcacaaattatgctcgtctgtgagaaaatactgcgaatgtatctgacctgcgcagagcatgaactgtctaatggtgtttctggtaggggtccagctttacaacggatgcctctgggtacttctaaaaaggaggagctgggtgctagaactccatttgtccttcatgtgatggggttattgggcagtttagagaagaactgctttaggagaaacttgccccgctttttccccttattagctaatcttattcgctgcgagcataactctggagaagttcaagttgcactgtatgatatcttccaatcatcaataggccccataatatcagcatagcgtatattgtttcctcgccagttgtacaattttgtcagattgtggtataagaaaagggtacagctttacagtactgtaaatgattcatggttgaggcatttctggtgttgaagctacatggaacatcgacccagatgtctaaacaaggtttttgctgcgcacatttgccattcttttttctaacattcactgggtaatcattgacacgttaaagaggatggacattggaataagtccctaattcctgttttggtgtcatttcccccctttcatcttggctctgtatagtgtcgtctcccgaacctcagctaccagtgaagagggacttctgtcatatgttactgttcaacatattcgtctgtcgaataccattttaacagtatctacattgtagttagtatatatatactttcattctaacagcaatggatatcccaatggatgtctattaaagaaaggtgagcaatatagttcaataccttttctcacgtcccattgccatcaggatcacgacttggtactctaatcagaataccttccccctccctaagaatcttcaattatatgagcactttccgtcagataggctacggtcagcagattgtacatatagttgtgcaaaatactgttctaaacactgtagattcatagagtgaagtttgaattgag

SEQ ID NO: 42034 - DNA, 5747 bp, Zea Mays
atggctacgtccacgatgccactcggcggggcgtctccgtcgggccgcgttctgggtccggcgctggaccggatcataaaaaacgccgcatggcggaagcactcagcgctcgtggccgcggcaaaggcggcactcgacctcctctcttcatcgccggcatacccgtcttcggaccctatctcgccgcaatcctcgctgctgctcggcctgccctccgccgccgccgacgcggccctccacgcgctgctgctcgctctcgagtcagcttcgcccaaggtcgtcgaccccgctctcgattgcgtcaccaaacttctttaccaccgcctcctctttggcgacctcggctgcgccggggacgatgcctcttcccccacctccaggctcttcaccgccgtccttacctgtggcgctctctctgatgatgcaatggagcttgccaccctccgtgttatcatcgccgccgcgcggtgccccactgtcgccatccgcggggagggcctcggccaggtgctcaagacctgctacaacatatacctcagcagcaacagtggggccaatcagctctgcgccaagcttgcgctggcgcaggtcctgctgattgtgtttgcacgcgtggaggtggattcgatggacgtgcgcattcggacggtgtcgatcacggagatgatggacgtgtctgatcgcaacctgaacgactccagcatcgtgcaggtggctcaggggtttataaacgagacaatggaggggagtgttgcaccagagccagggtcacatttggagccaaccgaggtggatggaaaggaggatactgggatgagcaagattagagaggatgggcttgcactcttgaagaacctgtgtaagctgtcaatgaagttctcgacgccagataaccctgaggatcagatgttgctgcgcggcaaggtgttgtcacttgagttgctgaaaatggttatcgacaatgctggccctttctggagaacaaatgaaaagtacattggagcaatcaagcagtatctttgtttgtccttattgaagaacagtgctttgtcagcaatgagtattttccagttgttgtgctccatatttgtgggcttactgtcaaggtttagatctggactgaaagaggaaattggaatattctttccaatgcttgttctaagggttcttgagaatgtccatcaacctagctttctacaaaaaatgacagttctaaacttgttggagaagatctgtaaagaatctcaggttcttattgatatctttgtgaactatgattgtgatgtagatgcaccaaatatttttgaaagggttgtcaatggacttctaaagactgctttaggtgttcctccaggatctacaacaacattaactatagcccaagaccaaacatttcgtattgagtcagtgaagtgccttgcaaccataatcaagtcaatgggttcatggatggaccaacagctgagaattggtgatttttcaccaaaaatatctgaagcttctttaagttctttaagttcaatagataaccccaacatccttattggagaagatggtagtggaattgattatgaactgcaatctgactctggtagcccagatgtatctggtgctccctcccttgagcagcgtcgtgcttttaaaatagaacttcaggaatatccttgtttaaccgaaaaccttccaagggaattaattttctcgttaaaagcaagaagatagggcatacaccagaagatgttgcttgtttcttgagaaatactgctggtttaaatgcaacaatgattggagactatttgggtgaaagagatgaattccctatcaaagttatgcatgcatatgttgatgcactaaactttgaaggtatggacttcggtgaagctattaggtattatttgcgaggcttcaggttgcctggggaagcacagaaaattgatcggatcatggaaaagtttgctgaacgatactgcaaatgcaatccaaactcctttaccagtgcagatactgcatatgttcttgcttattctgtaatcatgctcaacactgatgctcacaatactatggtcaaggataagatgtctaaatctgacttcattcgcaataaccgaggaatagatgatggaaaggatttgccagaaacttatctgggtacactatatgaccaaattgtcaaaaatgagatcaaaatgagtgctggttcatcagttccacaaaacaagcaacctagtagtgtgatgaagctactaggattggacaatattattagctttgttaactggaaacaggctgatgacagggtagttggagcaaacgacctgctcatcaaaaccatacaagagaaatttaaactaaagagtggaaagtcggagtctgtgttttctgttatcactgatacaacaattttaagattcatgatggaggtttgttgggcccctatgatggctgcattcagtgtgacacttgatcagagtgatgataaggcggccacgtcgcagtgtttgcagggattcagatctgctgtgcatgttacctctgttatgtgcatggagacacagagagatgcctttgtgacatctgtagccaaattcacatatctgcattgtgctgctgacatgaaacaaaagaatgtggatgctgtgaaggctattatatccattgcaatcgaagatggtgattatttgcaggaagcttgggagcatgtactaacatgcctttcacggtttgagcatttacaccttcttggagagggggcacctactgatgcttcatttctcacagtaccactggttgactcagaagaaaaaacacagaagtctacctctatgtcatcaaagagaactaatgcacttcagaatccagctgtaatggctgctgttagaggaggttcttatgacagcacaacagcaaaaaataaagcatcaccgttggttactcctgaacagattaataatttcatatcaaacataaacctgctagaccagattggcatttttgagttaaatcacatatttgctcatagcccaagattaaatagtgatgctattgttgcttttgtgaaagctctttgcaaagtttcaatgacagagttgcagtctcctacagatcctcgtattttctgcctaacaaagattgttgagattgcgcattacaatatgaaccgcattcgtttggtttggtcccgtatttggaaagttctgtcagatttttttgtttctgttgggttgtcagagaacctttcagttgcaatatttgttatggactctttaaggcagctagctatgaagtttctggaaagagaagaactggcaaattataatttccaaaatgaattcctgcaaccttttgcggttgttatgcagaagagcaatgcttcagaagttcgtgaacttatagttcgatgtgtctcccaaatggttctgagtcgtgtcaacaatataaaatctggttggaaaagtgtttttacggtttttactgcagctgctgctgatgatcgaaaaaatattgttttgttggcatttgaaaccatggaaaagattgttcgggactatttcccttacataactgaaactgaaacaacaacgtttactgattgtgttaaatgccttatcacattcacaagtagtaaattcagcagtgatgccagtcttaatgccattgcatttcttcggttttgtgctgtcaaactcgctgaggaaggatttattagtcatgagaaggatactgaacagcaaccaagtaaaatagattcatcagatgggaacagcatggtgcataaggacgatcatgtttacttctgggttcctttgcttgctggtctagctagattgacaacggactcaagaccaactatcagaaaaggttctgcagaagtgctctttgacatcttggcagatcatgggcacctcttttctcagtccttctgggctaatatcttcgaatcagttatctatcctctttttagcagtgaaagttttgcaccaaatggccagatctcaagtgtaaatagtactgaggatgattcttggaattttgaaactaaaacggtggctctaaaatgtttagcagatttgtatattatgttttttgaagtgatgcgtccagaactttctagagttacttctgttattacgaatttcatcagaagcccttataaacaatcagctagcacgggtatatcagtttttcagcgtttaacagaaggactcgcgagcaagctctccaatgatgagtggggaacggtcctgttgtgcttcaaagaatcagcatcacatacatttgttgtgtttgacaaaatagttaaaatgatgaaagtcattgaaattccagatagaaatgaatcttactctgaagctgagcaatattcagatcatgacatatacaatgatgaagaagaggaagccaatatggaaacggcgtcttatgctattgtcagaatgaagaatcatatggctttgcaactcttaatcgttgagggcatcatcaaattgtatgaggttcacaggagctttcttggtgctgagcatatagtcataatgttggagattctatctgccattgcatcacatgcaagtgaagtgaactctgaatctaacttgcacaggaaactacataaagcatgctctattttggaggtacctgagccagcggttatccatttcgagagcgagtcctaccagagctacctcaaacttctccaagctcttcttcatgataacccatctttgtcagaaactatgaatgtggagtcacaaattatgctcgtctgtgagaaaatactgcgaatgtatctgacctgcgcagagcatgaactgtctaatggtgtttctggtaggggtccagctttacaacggatgcctctgggtacttctaaaaaggaggagctgggtgctagaactccatttgtccttcatgtgatggggttattgggcagtttagagaagaactgctttaggagaaacttgccccgctttttccccttattagctaatcttattcgctgcgagcataactctggagaagttcaagttgcactgtatgatatcttccaatcatcaataggccccataatatcagcatagcgtatattgtttcctcgccagttgtacaattttgtcagattgtggtataagaaaagggtacagctttacagtactgtaaatgattcatggttgaggcatttctggtgttgaagctacatggaacatcgacccagatgtctaaacaaggtttttgctgcgcacatttgccattcttttttctaacattcactgggtaatcattgacacgttaaagaggatggacattggaataagtccctaattcctgttttggtgtcatttcccccctttcatcttggctctgtatagtgtcgtctcccgaacctcagctaccagtgaagagggacttctgtcatatgttactgttcaacatattcgtctgtcgaataccattttaacagtatctacattgtagttagtatatatatactttcattctaacagcaatggatatcccaatggatgtctattaaagaaaggtgagcaatatagttcaataccttttctcacgtcccattgccatcaggatcacgacttggtactctaatcagaataccttccccctccctaagaatcttcaattatatgagcactttccgtcagataggctacggtcagcagattgtacatatagttgtgcaaaatactgttctaaacactgtagattcatagagtgaagtttgaattgag

SEQ ID NO: 42035 - DNA, 2991 bp, Zea Mays
atctcacgcggccatccgacgaccagcttctttcactttggaaccctcgtgtgaggccaccatccccttctctctcccttctttcatctcccctccccatttggatcctccgccaccggttccccattgctgcctccaccgcccccgctcctcgccggttccccattgctgcctccactgccctcgctccgaggagggccacgacggccagatcctggactcattgtcgcgtacctggatccaggggaaatggcggaacacggcgaacgcgagcgtgacggcggggttcatgtgcgcgcccgagatgtggccgacggcgtagatcatgacggtgacgatgagcccgccggcgaccgactgccccagctgcgagatgcggtccttgtcgctaccgtagatccctgccgccccgcacatgacgaacaccagcaggaacgtggacaccacctccgagaccacctgtcgatcgataaccatgggaggagcaccaccaccacaaagcactctcatgcatcagtcgatctccggccgccggtacttgattctgaataacaaataatttccactactgggactgaaacttagtatccatctactgcttgattaggacatggcttagaaaatgtcatctttcacttgagtagtctttggtcattcaagcaccacttggcattcagttacgtcatggcagttttggtgtggcccaaatacctttaccccttgcttctgtgagttcaaaggatacctctgatacttgtattgaagatggtgaactctgtgatactttgtcaatgaagaaaaggacagacgaagtggcaggagcaaatgggttggaaggggtctcgatagagtgtgctaatttgttgaataatggcattgatgttttcatgaagcagttaattggatcttgcattgaattagttagagcaaggtctcgacatggcaaactaaggcatgagacattgaagcagcagctgtgccgaaagctaataaatggtgtatcagtgcataaccatgttcctgggcagagttctgttatacctccagagacaaattccatctccatgcaggacttaaaggcagtaatagagttaaacccttgtttgcttgggattaatgcatcactgctacacgaaaagatcaattcatatgactagtaggatggagctagttgtattcatctcgtcacaagatcctatgatcttgatggtctgtcttgtttcatggctgttgtaatcaagccataagtttactgatgggtggcggtgaaggcaagcacattctgtgcagtaccctgattgttttgcatgtcatctccagtgcaatcttccagaatgaacaaaaaactgtgtatctgctgggtgcagtactaaaataattcatttcatccacctaaggagtaaggactacgatgggcgaaagtgctccagagataactatgttgctggactccagacaaattgaggaaccatatcaaagatttatctccaaatgaaagcctgtatgagcagaagcccgaagaaacagctcttgtcctgccatcatcggtgattgcaagtactacagctaggagcaaaccccatacttcccgatttgaatatgtagaaaatgcacctgctcctaagactgggagcagcttagaaggcaatctcatgagtggacatgttgcacccctaaagtcatcgaacttctttgttgaatttgggatggacagtggatatcacaaaaaatatacatccagttcatccaaagtgcaggttgtgctgtggttgttgatgaacaaacctagttgttgccagaatatcctgtttctctgcactgggttgcggcttgtggtactggtcgactatggtggcacaatgcctcaactacaagaaaatctttgtggcctgctatatcttgcccgacaggtaatttcacaactttgatgtatcaaatattaggattatctgtaccagttcaacacagaatcaggtattgcatatggatcatttttctccactgctaattgtcatccgactgacaataaacgaccggaaataatactgccatttgtagtgttactcccttgcaacttgcaagcgcatcggaatgatgtggttctggtcactgtttaaatttcacccacgtgagcattgtatgccctttccccttcactcacctggcaaacccctattctatggaaggatccttgtgccaaaagacataagttttttgatcttgatagtgactagaagtttgggactgaacctgctctgccgtttaatccattggctgctagagcagccacaataagtctatcagcatttggaccatttggttttggcttcttcaatggcaagggaaaaaggcagaacaagaaacccaacaatctagatcagtcccaccagaagcctatattgcattgtacttggccttgaaaatagttatattatattttacttgaatttatgtttatcttttttatctgtttggacagatctctattaaatgtcatgtgctacaatcgttaggtctattaataaatgttgctctgtctatctatccatttacatcgctggaaattcccatgccctttcatggtacgccttgtgaaatgctcactgcttttctattggtttgtgtgcagttcaaactttgcaaggtgaggtctgttcagtttggccagaaaggcatcccctacctgaacacctacgacggccgcaccatccgctaccccgaccctctcatcaaggccaacgacaccatcaagatcgatctggagaccaacaagatcatggacttcatcaagttgtatttgccctttcatggacttcatcaagttatatacttagttaggctcaatgttagcacaaacagttgatgagcaagtttaaatttagagtacacttatgtatgagttatttgacaatgcttatttatgagatattgaatgttatttatctatattatattaattatagtgttattaaatatatgtgtatgtatttt

SEQ ID NO: 42036 - DNA, 2383 bp, Zea Mays
atctcacgcggccatccgacgaccagcttctttcactttggaaccctcgtgtgaggccaccatccccttctctctcccttctttcatctcccctccccatttggatcctccgccaccggttccccattgctgcctccaccgcccccgctcctcgccggttccccattgctgcctccactgccctcgctccgaggagggccacgacggccagatcctggactcattgtcgcgtacctggatccaggggaaatggcggaacacggcgaacgcgagcgtgacggcggggttcatgtgcgcgcccgagatgtggccgacggcgtagatcatgacggtgacgatgagcccgccggcgaccgactgccccagctgcgagatgcggtccttgtcgctaccgtagatccctgccgccccgcacatgacgaacaccagcaggaacgtggacaccacctccgagaccacctgtcgatcgataaccatgggaggagcaccaccaccacaaagcactctcatgcatcagtcgatctccggccgccggtacttgattctgaataacaaataatttccactactgggactgaaacttagtatccatctactgcttgattaggacatggcttagaaaatgtcatctttcacttgagtagtctttggtcattcaagcaccacttggcattcagttacgtcatggcagttttggtgtggcccaaatacctttaccccttgcttctgtgagttcaaaggatacctctgatacttgtattgaagatggtgaactctgtgatactttgtcaatgaagaaaaggacagacgaagtggcaggagcaaatgggttggaaggggtctcgatagagtgtgctaatttgttgaataatggcattgatgttttcatgaagcagttaattggatcttgcattgaattagttagagcaaggtctcgacatggcaaactaaggcatgagacattgaagcagcagctgtgccgaaagctaataaatggtgtatcagtgcataaccatgttcctgggcagagttctgttatacctccagagacaaattccatctccatgcaggacttaaaggcagtaatagagttaaacccttgtttgcttgggattaatgcatcactgctacacgaaaagatcaattcatatgactagtaggatggagctagttgtattcatctcgtcacaagatcctatgatcttgatggtctgtcttgtttcatggctgttgtaatcaagccataagtttactgatgggtggcggtgaaggcaagcacattctgtgcagtaccctgattgttttgcatgtcatctccagtgcaatcttccagaatgaacaaaaaactgtgtatctgctgggtgcagtactaaaataattcatttcatccacctaaggagtaaggactacgatgggcgaaagtgctccagagataactatgttgctggactccagacaaattgaggaaccatatcaaagatttatctccaaatgaaagcctgtatgagcagaagcccgaagaaacagctcttgtcctgccatcatcggtgattgcaagtactacagctaggagcaaaccccatacttcccgatttgaatatgtagaaaatgcacctgctcctaagactgggagcagcttagaaggcaatctcatgagtggacatgttgcacccctaaagtcatcgaacttctttgttgaatttgggatggacagtggatatcacaaaaaatatacatccagttcatccaaagtgcagagatggcagcggcggcggggccgtacaaagagatgctggaagtggtgaacgcgtgcgcggcccggatccggtggcgcctccgtccagcttccaagcgccgcctcctcaacagttgtgctgtggttgttgatgaacaaacctagttgttgccagaatatcctgtttctctgcactgggttgcggcttgtggtactggtcgactatggtggcacaatgcctcaactacaagaaaatctttgtggcctgctatatcttgcccgacagttcaaactttgcaaggtgaggtctgttcagtttggccagaaaggcatcccctacctgaacacctacgacggccgcaccatccgctaccccgaccctctcatcaaggccaacgacaccatcaagatcgatctggagaccaacaagatcatggacttcatcaagttgtatttgccctttcatggacttcatcaagttatatacttagttaggctcaatgttagcacaaacagttgatgagcaagtttaaatttagagtacacttatgtatgagttatttgacaatgcttatttatgagatattgaatgttatttatctatattatattaattatagtgttattaaatatatgtgtatgtatttt

SEQ ID NO: 42037 - DNA, 3019 bp, Zea Mays
atctcacgcggccatccgacgaccagcttctttcactttggaaccctcgtgtgaggccaccatccccttctctctcccttctttcatctcccctccccatttggatcctccgccaccggttccccattgctgcctccaccgcccccgctcctcgccggttccccattgctgcctccactgccctcgctccgaggagggccacgacggccagatcctggactcattgtcgcgtacctggatccaggggaaatggcggaacacggcgaacgcgagcgtgacggcggggttcatgtgcgcgcccgagatgtggccgacggcgtagatcatgacggtgacgatgagcccgccggcgaccgactgccccagctgcgagatgcggtccttgtcgctaccgtagatccctgccgccccgcacatgacgaacaccagcaggaacgtggacaccacctccgagaccacctgtcgatcgataaccatgggaggagcaccaccaccacaaagcactctcatgcatcagtcgatctccggccgccggtacttgattctgaataacaaataatttccactactgggactgaaacttagtatccatctactgcttgattaggacatggcttagaaaatgtcatctttcacttgagtagtctttggtcattcaagcaccacttggcattcagttacgtcatggcagttttggtgtggcccaaatacctttaccccttgcttctgtgagttcaaaggatacctctgatacttgtattgaagatggtgaactctgtgatactttgtcaatgaagaaaaggacagacgaagtggcaggagcaaatgggttggaaggggtctcgatagagtgtgctaatttgttgaataatggcattgatgttttcatgaagcagttaattggatcttgcattgaattagttagagcaaggtctcgacatggcaaactaaggcatgagacattgaagcagcagctgtgccgaaagctaataaatggtgtatcagtgcataaccatgttcctgggcagagttctgttatacctccagagacaaattccatctccatgcaggacttaaaggcagtaatagagttaaacccttgtttgcttgggattaatgcatcactgctacacgaaaagatcaattcatatgactagtaggatggagctagttgtattcatctcgtcacaagatcctatgatcttgatggtctgtcttgtttcatggctgttgtaatcaagccataagtttactgatgggtggcggtgaaggcaagcacattctgtgcagtaccctgattgttttgcatgtcatctccagtgcaatcttccagaatgaacaaaaaactgtgtatctgctgggtgcagtactaaaataattcatttcatccacctaaggagtaaggactacgatgggcgaaagtgctccagagataactatgttgctggactccagacaaattgaggaaccatatcaaagatttatctccaaatgaaagcctgtatgagcagaagcccgaagaaacagctcttgtcctgccatcatcggtgattgcaagtactacagctaggagcaaaccccatacttcccgatttgaatatgtagaaaatgcacctgctcctaagactgggagcagcttagaaggcaatctcatgagtggacatgttgcacccctaaagtcatcgaacttctttgttgaatttgggatggacagtggatatcacaaaaaatatacatccagttcatccaaagtgcaggtaactgttttattcagacatatatgattaatcatcatccatcaatatgtgaactccattgagcaagtatattgtaaagtcagaactaaaaagaggaacatttggttccaccatttcaccttattttgtgctaaggggaagtatttagagattgaattgatggcaattacttcagtctttaaacctgttattagtgttgataatgttgattctattctgtcgcacattgttgtgaacagcttggaaataccttgcgaggtttccttaagctgttcctagtttggcatcaagtttgtctgtgttctctgctcctcctcccctcctgttaagactgcagcttagtattccgtttgaaattagtcatctcatttcaccaagactcgctcttaaaagaagacttgccattatatgtcctactcagttagggaggaaaagaaggggaatgctggggccaactgccaagctagttatgcacttgtatctaatatattgatttgaatatgatgacctctatattgtcagtttctgaatttttgcaacacagatgagcctctcccatgtgcttatgaaagtttttaccttttcttcaatatgaagtctgaatgtgtggtgtggcctgtctgatctatctagcagagatggcagcggcggcggggccgtacaaagagatgctggaagtggtgaacgcgtgcgcggcccggatccggtggcgcctccgtccagcttccaagcgccgcctcctcaacagttgtgctgtggttgttgatgaacaaacctagttgttgccagaatatcctgtttctctgcactgggttgcggcttgtggtactggtcgactatggtggcacaatgcctcaactacaagaaaatctttgtggcctgctatatcttgcccgacagttcaaactttgcaaggtgaggtctgttcagtttggccagaaaggcatcccctacctgaacacctacgacggccgcaccatccgctaccccgaccctctcatcaaggccaacgacaccatcaagatcgatctggagaccaacaagatcatggacttcatcaagttgtatttgccctttcatggacttcatcaagttatatacttagttaggctcaatgttagcacaaacagttgatgagcaagtttaaatttagagtacacttatgtatgagttatttgacaatgcttatttatgagatattgaatgttatttatctatattatattaattatagtgttattaaatatatgtgtatgtatttt

SEQ ID NO: 42038 - DNA, 1693 bp, Zea Mays
tgacacttgtagaagaagcgggagatggtgcggatggagtgcgagcggtgggctcggaaggggatcaacataacgtaccagatccgggaggaccgcaaggggtacaaggccggcgcgctgcgggcggggatgaggcacgcgtacgtgcgcgactgcgagtacgtggccatcttcgacgccgacttccagcccgacccggactacctcaagcgcaccatcccctacctcgtccacaacccggagatcgccctcgtccaggcgcgctggagattcgtgaacgcggacgagtgcctgatgacgaggatgcaggagatgtccctggactaccacttcaccgtggagcaggaagtgagctcctccgtctgcgccttctttggattcaacggcaccgccggcgtgtggcgcatctccgcggtgaacgaggctggggggtggaaggaccggaccacggtggaggacatggatctggccatccgggccagcctcaagggctggaagttcgtctacctcggtgacgtccaggtgaaaagcgagctgccgagtaccttcaaggccttccggttccagcagcacaggtggtcgtgcggcccggcgaacctgttcaggaagatgctcatggagattgtgacgaacaagaaagtgacgatctggaagaagatccacgtcatctacaacttcttcctgatacgcaagatcatcgcgcacatcatcaccttctcgttctactgcgtcatcatcccggcaaccatcttcgtccccgaggtccgcatacccaagtggggctgcgtctacatcccctcggccatcaccctcctcaactctgtcggcactcccaggtctttccacctgcttttcttctgggtcgccttcgagaacgtcatgtccctgcacagaacaaaggccacgctgatcggcttgctggaggccggcagggccaacgagtgggtggtgacggcgaagctcggcagcgccatgaagatgaaatcggctaacaaagcggggctcaggaagcagttcatgaggatatgggagaggctgcacgtcacggagctcggggtggcagccttcctcttctcctgcggctggtacgatcttgcgtacgggagggaccatttcttcatctacctcttcttccagtctgtcgcgtttttcatcgtcggcgtcggctacgtcggcaccatcgtcccgcagtcgtagcggaagcgtgtccagatcatccgcttctctctggttttcgcattgtgtcttgggtaagtttcgtagtggatgaccggtttgaggtaaagatcatgcatgcggtcctctcttccatcgtctttttttggggaccggccgtgtgtgcttcgtcgaccttcggctgcatgcgcggtgttttactgtaaaataggaaagcagtgttgcaagatcgctgcaggagaatttagagattggtgccacatgggcaggagatgtcctggtgtttctgcttatatgctatatcaactatgtgatgtgttttaagggggggtgcaggatggctgcttccaatgtactagtaacatacagagaaacaggttcagacatgtgttcagaaaaaaaagagtcaactattcagccttcttgtagcatgctacattttacatgcgttctcctgttatgtgggcgtattaattagtatgaagcagtagcctctattgagtagagatgagtagat

SEQ ID NO: 42039 - DNA, 1470 bp, Zea Mays
ctcgtgccgcgccagatgcagatgcggaggcagaggcagagggacgaggagtgaacgcggacgagtgcctgatgacgaggatgcaggagatgtccctggactaccacttcaccgtggagcaggaagtgagctcctccgtctgcgccttctttggattcaacggcaccgccggcgtgtggcgcatctccgcggtgaacgaggctggggggtggaaggaccggaccacggtggaggacatggatctggccatccgggccagcctcaagggctggaagttcgtctacctcggtgacgtccaggtgaaaagcgagctgccgagtaccttcaaggccttccggttccagcagcacaggtggtcgtgcggcccggcgaacctgttcaggaagatgctcatggagattgtgacgaacaagaaagtgacgatctggaagaagatccacgtcatctacaacttcttcctgatacgcaagatcatcgcgcacatcatcaccttctcgttctactgcgtcatcatcccggcaaccatcttcgtccccgaggtccgcatacccaagtggggctgcgtctacatcccctcggccatcaccctcctcaactctgtcggcactcccaggtctttccacctgcttttcttctgggtcgccttcgagaacgtcatgtccctgcacagaacaaaggccacgctgatcggcttgctggaggccggcagggccaacgagtgggtggtgacggcgaagctcggcagcgccatgaagatgaaatcggctaacaaagcggggctcaggaagcagttcatgaggatatgggagaggctgcacgtcacggagctcggggtggcagccttcctcttctcctgcggctggtacgatcttgcgtacgggagggaccatttcttcatctacctcttcttccagtctgtcgcgtttttcatcgtcggcgtcggctacgtcggcaccatcgtcccgcagtcgtagcggaagcgtgtccagatcatccgcttctctctggttttcgcattgtgtcttgggtaagtttcgtagtggatgaccggtttgaggtaaagatcatgcatgcggtcctctcttccatcgtctttttttggggaccggccgtgtgtgcttcgtcgaccttcggctgcatgcgcggtgttttactgtaaaataggaaagcagtgttgcaagatcgctgcaggagaatttagagattggtgccacatgggcaggagatgtcctggtgtttctgcttatatgctatatcaactatgtgatgtgttttaagggggggtgcaggatggctgcttccaatgtactagtaacatacagagaaacaggttcagacatgtgttcagaaaaaaaagagtcaactattcagccttcttgtagcatgctacattttacatgcgttctcctgttatgtgggcgtattaattagtatgaagcagtagcctctattgagtagagatgagtagat

SEQ ID NO: 42040 - DNA, 1474 bp, Zea Mays
attgtttgtctgctcagctgaggccctgaccctgaggggaacaataatacacatgtgaacgcggacgagtgcctgatgacgaggatgcaggagatgtccctggactaccacttcaccgtggagcaggaagtgagctcctccgtctgcgccttctttggattcaacggcaccgccggcgtgtggcgcatctccgcggtgaacgaggctggggggtggaaggaccggaccacggtggaggacatggatctggccatccgggccagcctcaagggctggaagttcgtctacctcggtgacgtccaggtgaaaagcgagctgccgagtaccttcaaggccttccggttccagcagcacaggtggtcgtgcggcccggcgaacctgttcaggaagatgctcatggagattgtgacgaacaagaaagtgacgatctggaagaagatccacgtcatctacaacttcttcctgatacgcaagatcatcgcgcacatcatcaccttctcgttctactgcgtcatcatcccggcaaccatcttcgtccccgaggtccgcatacccaagtggggctgcgtctacatcccctcggccatcaccctcctcaactctgtcggcactcccaggtctttccacctgcttttcttctgggtcgccttcgagaacgtcatgtccctgcacagaacaaaggccacgctgatcggcttgctggaggccggcagggccaacgagtgggtggtgacggcgaagctcggcagcgccatgaagatgaaatcggctaacaaagcggggctcaggaagcagttcatgaggatatgggagaggctgcacgtcacggagctcggggtggcagccttcctcttctcctgcggctggtacgatcttgcgtacgggagggaccatttcttcatctacctcttcttccagtctgtcgcgtttttcatcgtcggcgtcggctacgtcggcaccatcgtcccgcagtcgtagcggaagcgtgtccagatcatccgcttctctctggttttcgcattgtgtcttgggtaagtttcgtagtggatgaccggtttgaggtaaagatcatgcatgcggtcctctcttccatcgtctttttttggggaccggccgtgtgtgcttcgtcgaccttcggctgcatgcgcggtgttttactgtaaaataggaaagcagtgttgcaagatcgctgcaggagaatttagagattggtgccacatgggcaggagatgtcctggtgtttctgcttatatgctatatcaactatgtgatgtgttttaagggggggtgcaggatggctgcttccaatgtactagtaacatacagagaaacaggttcagacatgtgttcagaaaaaaaagagtcaactattcagccttcttgtagcatgctacattttacatgcgttctcctgttatgtgggcgtattaattagtatgaagcagtagcctctattgagtagagatgagtagat

SEQ ID NO: 42041 - DNA, 2459 bp, Zea Mays
cttcattctccctctgctggaagtagagcctaacattatccgaaccaggataaaccgattgcgtcaactcacacatcatctagattctgggcacgcgacatcattttacttggttaataccgtttgtccgaacattgacaccatgtgacgagtacctagtataaaaacttagtcaataaacttgttttttgttaagaaaaaaacattttttaactagtctaaatacttgacagaagaaattcccgttttcgcttgactattcttcttcgtccctgatttttatccccaaactcaccgccggggcacaacaatccagttctcctttcgccggaatctgtccctcctccccctcctccccgcctctgcgggtactggaccaccgtggagcgggcattcatccaggctaggtccattccttcctttgctcgttctcttctccatcgcggaagctccacccgagttgacgccagaagagaatcggtgccctagggtgttctcgcagaattattttccagaagatttgcagatcgagtcgaaccctatgccccacgttaagcctgccgccggcctgcccccttaccaccaccgggcgctccctggccccgggcagggtccagttcccacgggacatgggatgatgcaccgggaggtccgtgatcagtacgggccgctggggccgaggatgcacctaccaccgctggggcacgggcccgctccgttcccctacgacatgctgcctccgctgcccccaccggaggtcctggagcagaagcttgtggcacagcacggggagatgcagaagctggttatagagaacggccggcttgctgcaagccacgcctcgctgaggaaagagctagccgcggcgcagcaggagctgcagaggctgcaggcgcagggggaggccgcgaaagccgctgaggaggaggagatgaggggcctccttgacaaggttgggaagatggaggccgacctgaaggcccgtgagtccgtgaaggtggagctgcagcaggctcatgctgaggcgcagagccttgtggccatgaggcagaacatggtggcagacgtgcagaagctgagcaaggacctgcagaggaacctcggtgaggcacagcagctccccgcgctcttggctgaacgggatgttgcaaggcaagaaaatcagcatctcaggagtacttatgattacgaaaggaaactcagggtggatcactctgaatctttgcagacgatgaagaggaattatgactccatggttacggagcttgaaaaacttcgtgctgagttgagggacacatctaatcttgacaaaagtggttttttctacaatagcaccacccaaaaggccgatggtatatctagccatctttctgttggacaaattgcttatgatactggctatggaagtacacaggcaagggcaactcctaccggtctggcagacttaagtggagtccctggaggcgctggccttcgttctggattcgacccatcaagaggcaatgcatacgatggctctcatgttgccaatttcagctcttcaaaaactgggacccatgatgcatcaaggggtgccactggctttgactctctcaagggttctgggtatgatgcttcaaaggcgcatgtaactggacaggcgtcagctacagcggctcatgggggcattgctggttactacgggtccaatcaggcagcacatgcgtggggacaatctgcatcgccctacggatctgtacaggtgccaccatcctacgcatctgggtcaaacacatcctatggcgcagcagcagcagcagcagtgcgtccctatggttcagctcaggcgcaaccatcatatggacaaacgcaggcaccatctgcgtatgggcacacacagctaccatcatcctacagtctagcacaggcgcagtctcccttcaccgctgcgcaggggtcctcgccctatgggttggctgcgcagcctccagcctatggatctgggcgagcaggctccaatgctggcagttacgaagctcctcaaggacgtaaataagttcgcgccaaatttgcatacttggccacttgcgaaagagagctttgttacaccgagtccaaatcctttctgttgctacttaaaccttgtttaactgtgatgtcagaggaacctgttacagccgataaaacgattctctgtaaacgtattatcgtgaccgatgatgccgatgcatttttttgttcagtagagtaggccatttgggaacgcagatttgagttgtgcgatattggttctatatctggcttcactggttggttcattcataacgttaaattatgtttgtttaagttcaaccgtaatcagataccacactaaaaattgctaacagcgtattcgatctttttattgctgatacatctttttattgtcgatactcgagtgtaaatcattatcatttaagttaccaaacagtatccaagtt

SEQ ID NO: 42042 - DNA, 2200 bp, Zea Mays
attttttaactagtctaaatacttgacagaagaaattcccgttttcgcttgactattcttcttcgtccctgatttttatccccaaactcaccgccggggcacaacaatccagttctcctttcgccggaatctgtccctcctccccctcctccccgcctctgcgggtactggaccaccgtggagcgggcattcatccaggctaggtccattccttcctttgctcgttctcttctccatcgcggaagctccacccgagttgacgccagaagagaatcggtgccctagggtgttctcgcagaattattttccagaagatttgcagatcgagtcgaaccctatgccccacgttaagcctgccgccggcctgcccccttaccaccaccgggcgctccctggccccgggcagggtccagttcccacgggacatgggatgatgcaccgggaggtccgtgatcagtacgggccgctggggccgaggatgcacctaccaccgctggggcacgggcccgctccgttcccctacgacatgctgcctccgctgcccccaccggaggtcctggagcagaagcttgtggcacagcacggggagatgcagaagctggttatagagaacggccggcttgctgcaagccacgcctcgctgaggaaagagctagccgcggcgcagcaggagctgcagaggctgcaggcgcagggggaggccgcgaaagccgctgaggaggaggagatgaggggcctccttgacaaggttgggaagatggaggccgacctgaaggcccgtgagtccgtgaaggtggagctgcagcaggctcatgctgaggcgcagagccttgtggccatgaggcagaacatggtggcagacgtgcagaagctgagcaaggacctgcagaggaacctcggtgaggcacagcagctccccgcgctcttggctgaacgggatgttgcaaggcaagaaaatcagcatctcagacgatgaagaggaattatgactccatggttacggagcttgaaaaacttcgtgctgagttgagggacacatctaatcttgacaaaagtggttttttctacaatagcaccacccaaaaggccgatggtatatctagccatctttctgttggacaaattgcttatgatactggctatggaagtacacaggcaagggcaactcctaccggtctggcagacttaagtggagtccctggaggcgctggccttcgttctggattcgacccatcaagaggcaatgcatacgatggctctcatgttgccaatttcagctcttcaaaaactgggacccatgatgcatcaaggggtgccactggctttgactctctcaagggttctgggtatgatgcttcaaaggcgcatgtaactggacaggcgtcagctacagcggctcatgggggcattgctggttactacgggtccaatcaggcagcacatgcgtggggacaatctgcatcgccctacggatctgtacaggtgccaccatcctacgcatctgggtcaaacacatcctatggcgcagcagcagcagcagcagtgcgtccctatggttcagctcaggcgcaaccatcatatggacaaacgcaggcaccatctgcgtatgggcacacacagctaccatcatcctacagtctagcacaggcgcagtctcccttcaccgctgcgcaggggtcctcgccctatgggttggctgcgcagcctccagcctatggatctgggcgagcaggctccaatgctggcagttacgaagctcctcaaggacgtaaataagttcgcgccaaatttgcatacttggccacttgcgaaagagagctttgttacaccgagtccaaatcctttctgttgctacttaaaccttgtttaactgtgatgtcagaggaacctgttacagccgataaaacgattctctgtaaacgtattatcgtgaccgatgatgccgatgcatttttttgttcagtagagtaggccatttgggaacgcagatttgagttgtgcgatattggttctatatctggcttcactggttggttcattcataacgttaaattatgtttgtttaagttcaaccgtaatcagataccacactaaaaattgctaacagcgtattcgatctttttattgctgatacatctttttattgtcgatactcgagtgtaaatcattatcatttaagttaccaaacagtatccaagtt

SEQ ID NO: 42043 - DNA, 3948 bp, Zea Mays
ttgccacgcaggcgatgatggatcggacggtgcagacagcctcgagatccgtggatccagcgggtaactagccttcccctgtccccgccaccgcgcggcgccacgtccacgcccacgcgctcggcctcgccttccgtttccaaccaggcacctcgccacctcctcgtgggatcgcgcgcaggagcggatcgccgccgcaggagagcgttccgagtccgaatacgtacgggatggtggaggcgccggccggtctgagcgcggcggcgcaggtgagcgcgctgccgctgcaggtggatctcctgcagctgccgccggaggtgcccgcgccaggggatcccgccctgcgcggcgtcctcgacagcctcttcgcgcattggctctcgctaccgaacaccgccgtgctgctcgccagcctcgtgcacaaggccaaggccagcggcggcggcgccgcggcggcgggggctgggatgctgccctccatgttgctgcaggggggagccgccgtgccgcctctctccccgaggtccccgcgcctctcgcggaggcccagcagcctcggcgttgccccacccaaccacgccgcgtcgccgctccgcccgccagccgcgcgccccgccaaggaggtcataccgcagttttattttcgagatggccggccaccgccgtacgaggtgaggaggcaatgcatatcgacagttgatcagctcttcgccggccactcaaatggtctccgggctccagaatttcggatggttaccagggaactctgcaaattaccgacattctttactactgttcttttcgataagatagacaaggagagcacgggattcgtgacaagggaggccttcattgatttctgggtgaataacaatctgatgagtatggatagtgcaacccaagtgttcacaattctgaagcaacagaatcacaattacctcacaaaggaggattttaaaccgattctgaaagaccttttggacaaccatcctggtctggagtttttaaagagcacacctgaatttcaagaaagatatgctgagactgtcatatatagaatattctattgcttgaatcgaattgggagtggacatctaacacttagggagctgaagcgtggaaatctactcaacgcactcaggcatgctgatgatgaagaggacatcaataaagttttaagatacttctcatatgagcatttctatgtgatatattgcaagttctgggaactggacacagaccacgacttctttattgacaaagaaaatcttattaagtatggaaaccatgcattgacatataggattgtagatagaatcttttcagaggttcctagaaaatttaccagtaaggttgaagggaaaatgggctatgaagatttcgtccattttgtattgtctgaagaggacaaatcatcagcgccaagccaagaatattggtattttgcttggtttaatgcctttactaaaatggatcaattcttcatcttcagtgtactatagtgtttacgtttactgcacttctatcatgagcaattgtgcatcactttcacctcagctcaattaatggatagcaaatttcagtatttcacttagcttggtttctgttttcggtgtcccgtattttatttacttccatttttgtctcttaattcacctccgccctccgcttttgtatacttgtaatttgggctgttctccacagccccattttcttttgttttattcccactaagggttctgcttctcctgttatttttcaaaaaaaaatttgttaccatttcaatgtatattcttatcatgcaatgatgggaaccatctttgtgtaacatttctaaaacatccttttttattttcttgatggggggcaaaaccccacctgatattgagcttttgaagcctgggaacacaaccatagagagggcaaggagattacagacgtgtgagggcgagggagagacacccatgccaagcaatagcttgggtggattcataaggtttaagcctacaagcccacaggcgggatggtgcttttattaattagaactagctatctttgttcaaacaatatttgggaaaaatgctaagtgatgagctcattataagacattaaacttgtcaacacagaaaaagggcagtggcatgaaaagtcttttgaacagagcaattttgattgaaataaatgtcacaactatactggttgttggtctcatctcatcttggtagaattcttcattaatgatccttcaagcagaggtttccttttgcacgaattgaattaagaaatgaatgtttggttttggagacattcattgaattttggtagagccttggtctacttgaccccctattaacactaagaagtgagaaaataaagaaagtatgaaaattcattcctgactaggagatcctctctaaaagtacatgcggaagatgagaggagcgtagaaggaagaaatgccattggccggggatgagcacgtccctccgatttctgatgataaagttgtccccgaatataagggaaatattcccttccggggacaactccatatttggtgtccccgaactaaacaccgggccgaagtgggatgtccctccttgtcctgtcccaaaccaaacactatcttagggcagtgtttgatcctcaacctaaaacacatcaatctaaattgtcatgtcagatttgcttgcccttttggaaaggggcaattgcattgttgccactactctaggaatacatggaaacttcaaaaaacaggggaaaaaactaagtcgcatcctcgaacagggcgagcatgcaacagccctttttggaatgacagttataggatccaatttaagcttcaactaaatcctaaaggttcatattgatcattccttatcttacaagcatgcctgtaacttcaaaagttctcatatttttgcttggtgacatcacctcttcaggttcacatgtatagatttggatggcaatggcatacttacacacattgaaatacaattctttttcgaggagcaacttcatcgcatggagtgcatggcccaagaacctgttctatttgaggacatcttgtgtcagctcatcgatatgattggacctgagaatgatagctatttgacactgaaagacttccgaaggtgcaaattgtctgggcatttcttcaacattctctttaatctgaacaaattcatggcatttgaagctagggacccattcctcatccgccaaatgcgtgaagagccatcattgacagactgggatcgttttgcacggagagagtacgtaaggttggcgatggaagaagatggtgaagatgcttccaatgcaagtggagatgtttgggacgagtcactcgaatctcctttctagatttttttttatcaaaaaaaaaaacactgggaagacataacagatgttcacatgcagccctaataatcaagtcaaaatcatgatcctggctaagcatgaaaagttatttggtatcttatatctacagaaactatagttgaggcagctgcatgcttgctggcaccggccatccaaattttgacatgggagtacgtccacccagtttcctggtgacagtgagatttttggccatggcttccatgatatgctctagttttgctgttaaacttcaactgattgttctatggcagcaacaagagaacagcaccttgtgattgttccggaggcacatcatgggtcgttgcagcggatgcaatcatcatatggtggatagtggatagtgaatagttggcgtcacaatttttgttcccatagtcacgattagccatctgtcaaagtactctctctctctctcttcgttgaataaggtcatcaagaaggccggtcatttacttgtgtattctgtactttatttagtttgtagtcacatgaacaatgagctgaaatactatatcacaggtctattgtcatttttat

SEQ ID NO: 42044 - DNA, 3098 bp, Zea Mays
ttgccacgcaggcgatgatggatcggacggtgcagacagcctcgagatccgtggatccagcgggtaactagccttcccctgtccccgccaccgcgcggcgccacgtccacgcccacgcgctcggcctcgccttccgtttccaaccaggcacctcgccacctcctcgtgggatcgcgcgcaggagcggatcgccgccgcaggagagcgttccgagtccgaatacgtacgggatggtggaggcgccggccggtctgagcgcggcggcgcaggtgagcgcgctgccgctgcaggtggatctcctgcagctgccgccggaggtgcccgcgccaggggatcccgccctgcgcggcgtcctcgacagcctcttcgcgcattggctctcgctaccgaacaccgccgtgctgctcgccagcctcgtgcacaaggccaaggccagcggcggcggcgccgcggcggcgggggctgggatgctgccctccatgttgctgcaggggggagccgccgtgccgcctctctccccgaggtccccgcgcctctcgcggaggcccagcagcctcggcgttgccccacccaaccacgccgcgtcgccgctccgcccgccagccgcgcgccccgccaaggaggtcataccgcagttttattttcgagatggccggccaccgccgtacgaggtgaggaggcaatgcatatcgacagttgatcagctcttcgccggccactcaaatggtctccgggctccagaatttcggatggttaccagggaactctgcaaattaccgacattctttactactgttcttttcgataagatagacaaggagagcacgggattcgtgacaagggaggccttcattgatttctgggtgaataacaatctgatgagtatggatagtgcaacccaagtgttcacaattctgaagcaacagaatcacaattacctcacaaaggaggattttaaaccgattctgaaagaccttttggacaaccatcctggtctggagtttttaaagagcacacctgaatttcaagaaagatatgctgagactgtcatatatagaatattctattgcttgaatcgaattgggagtggacatctaacacttagggagctgaagcgtggaaatctactcaacgcactcaggcatgctgatgatgaagaggacatcaataaagttttaagatacttctcatatgagcatttctatgtgatatattgcaagttctgggaactggacacagaccacgacttctttattgacaaagaaaatcttattaagtatggaaaccatgcattgacatataggattgtagatagaatcttttcagaggttcctagaaaatttaccagtaaggttgaagggaaaatgggctatgaagatttcgtccattttgtattgtctgaagaggacaaatcatcagcgccaagccaagaatattggttcacatgtatagatttggatggcaatggcatacttacacacattgaaatacaattctttttcgaggagcaacttcatcgcatggagtgcatggcccaagaacctgttctatttgaggacatcttgtgtcagctcatcgatatgattggacctgagaatgatagctatttgacactgaaagacttccgaaggtgcaaattgtctgggcatttcttcaacattctctttaatctgaacaaattcatggcatttgaagctagggacccattcctcatccgccaaatgcgtgaagagccatcattgacagactgggatcgttttgcacggagagagtacgtaaggttggcgatggaagaagatggtgaagatgcttccaatgcaagtggagatgtttgggacgagtcactcgaatctcctttctagatttttttttatcaaaaaaaaaaacactgggaagacataacagatgttcacatgcagccctaataatcaagtcaaaatcatgatcctggctaagcatgaaaagttatttggtatcttatatctacagaaactatagttgaggcagctgcatgcttgctggcaccggccatccaaattttgacatgggagtacgtccacccagtttcctggtgacagtgagatttttggccatggcttccatgatatgctctagttttgctgttaaacttcaactgattgttctatggcagcaacaagagaacagcaccttgtgattgttccggaggcacatcatgggtcgttgcagcggatgcaatcatcatatggtggatagtggatagtgaatagttggcgtcacaatttttgttcccatagtcacgattagccatctgtcaaagtactctctctctctctcttcgttgaataaggtcatcaagaaggccggtcatttacttgtgtattctgtactttatttagtttgtagtcacatgaacaatgagctgaaatactatatcacaggtctattgtcatttttatcacacactgctgtatttagatgaataatacacaagcatttgaggattcaaatagaccaatcctgtgcaaatgttcgtactctgagatattagcaccagagtgtaacatctgagaccaacgcaactccaggccatcttctcagctgaaaggatgtaggaagatggaactccaaccaaaagtgcaggaactctctgacagtctaggccaaagcaatgctacacccagcactgcagtaggcaaatcgaccgggagaaggacgccaggcgatctcataggctgggctacctgcaaagatcatgccttttgctttggttgctccaccaatgattgcctcccggcggaaacgaacatcaaaggaagagctagcatactgtcctcctggccttctttctaagcaaaatgggattatacaactaggcaccctctatgctctagctaggttgatgagccatggatatcgaaatactgcctgctgagatggagcaacacgctgatgagcatcaaggtatacgatatgcttcgagtgatgtgagcaatgtgtgcaacataacataacatcttcttgcacactgagctgagtgtcgctcatgtgttttattcttgatatacaaatgttagcaaataatataaatatggatcggacacgagacacggaatttt

SEQ ID NO: 42045 - DNA, 462 bp, Zea Mays
cgttcctagaggggtactgctgggcgcgcacggcggagcggcaggcgtcgcggatgcgggagcggtacctgcgggcggtgctccggcaggacgtggagtacttcgacctcaaggtggggtcgacgtcggaggtgatcaccagcgtctccaacgacagcctggtggtgcaggacgtgctgagcgagaaggtgcccaacttcgtgatgaactgctccatgttcctgggcagctacgccgtcgggttcgcgctgctgtggcacctcacgctggtggcgctgccgtccgtgctgctgctcatcatcccgggcttcatgtacggccgcatcctcatcggcctcgcgcgccggatcagggagcagtacacgcggccgggcgccatcgccgagcaggccgtctcgtccgtgcgcaccgtgtactcgttcgtggccgagcgcagcaccatggcgcagttctccgccgcgc

SEQ ID NO: 42046 - DNA, 2272 bp, Zea Mays
gagaagaagggtcaaggtagaaaaggaaaagaaaagaaaaggattgagaagaaaaagacaagccgggcaaggatggtggtgtccggtgtggtgggaggcgagccgcgagttggtggggaaggggtgggcggtggcagcgcaaacaagcaactccttcccaccttcccttcccctccccttctcatcctttctccgattgcctccaattacgattctccgatccccattcctgccccacaccctcgcgttcggctaatccggcggcatgcggcgcggcggcgtggctgcggcggcggcggacggtgatgtggagtcgcgtttccgcggggtgcggaagaggccgtggggccggtacgccgcggagatccgcgacccggcgaagaaggcgcgcgtctggctcggcacattcgactccgccgaggacgccgcccgcgcctacgacgccgcagcgcggatgctgcgcggacccaaggccaggaccaacttcccgcaccccgccgcccaccaccaccacctcctccacatgcccgccgccgccgcagcaccatacacgactcccactgccacaggcgtctcgacgccgccggtccctaggccggcttgcagcagccttagctccaccgtggaatccttcagcggcgcgcgcccgcggcccgtgctcccgccgcggcccccgccgccaccgatcaccgacgtcgactgccgcagcgactgcggttcctcggcctcggtcgtggacgatgactgcacggatgcggccgcctctccgtcatgcccgtccccgctcccgttcgaccttaacctgccccccagcggcggcggctgcggagccggcgtcgggtcttacgctgatgaggagggcgagctcaggctcacggcattgcggctgtgacgtcgagctcaatcgagccgttgcctagagaaagatgaaaaggagaaaaatatttggttcttctcttctctcgttgccgacacgaactctccctccactacgatgttgttgtttacctgatatgatgatgattactatttgcctgaatcctggccaacttatctgcctgcttgttttcgggcgattggggtttatcgccaaatcttgcagcagctgttgtactgtaatatagcaacatttacttccttcctcttgtgagggaagagacagacaaagtaacttatttcaacctttagctacagtttcccttcttgtttttactttttactcttcatgtataacttgtttgggatcgatgaactggaaaaaaatcctttaaatgttgagatcaaagttgtgttaactgttaagtaaatgaagttcaaccacatttcagcttctatatttcttcattctcaaataccatgaacaaatttaccctgcttttctttgaagaccataacctttactattctaaattcctggtgcatgtgctactgacttgtcgttttcaacgatccacaatttcagtttgtattactactaatgcattgtagcagttccccataatagtgtataatccatgtttttttctgtttaggttgatgtttctatttgtgtcattgaaagtaaatttagtggctaacttttgatttcttagtctataaacaacattagctacagatagtgggtcttctggaaactggaactggaacattttgcatcaacgatttggagtatggttacacattaagcattagctgaaaacataagaagtcacgctgaaagtagaagactctacttggatcaactactgcaactatcaaagcaatgctaatagcatcaagtggggtggcatagcataaaaagtggaaggttagatttgttttgtcatttgtacattggagaatggtgccgcaatagtagtcatattctgtctcttatggtttggttgcaggaacaaatgttgtgacccgtctagatattgtttggttaccttgtcatgcaatagtatatttgcttggagtatcattttaattgcaaagactgaagctctgtttggaagtgatctttatatgcttgcctcatctacaaaaaaatatggcttaaatttttcttgatacacaaacatttgtagtcttcagctggtagtaatattatcttgatctgatcttcacttatactgggataagacaaaaccacacagtcttctttctactgccactgttccaaaattataagcacttcaactatgtcctaagtcaaacttctctaactttgataacttctttttggaaaaaagcaccaacacatctacaaaattaaattagtaccattaaa

SEQ ID NO: 42047 - DNA, 2354 bp, Zea Mays
gagaagaagggtcaaggtagaaaaggaaaagaaaagaaaaggattgagaagaaaaagacaagccgggcaaggatggtggtgtccggtgtggtgggaggcgagccgcgagttggtggggaaggggtgggcggtggcagcgcaaacaagcaactccttcccaccttcccttcccctccccttctcatcctttctccgattgcctccaattacgattctccgatccccattcctgccccacaccctcgcgttcggctaatccggcggcatgcggcgcggcggcgtggctgcggcggcggcggacggtgatgtggagtcgcgtttccgcggggtgcggaagaggccgtggggccggtacgccgcggagatccgcgacccggcgaagaaggcgcgcgtctggctcggcacattcgactccgccgaggacgccgcccgcgcctacgacgccgcagcgcggatgctgcgcggacccaaggccaggaccaacttcccgcaccccgccgcccaccaccaccacctcctccacatgcccgccgccgccgcagcaccatacacgactcccactgccacaggcgtctcgacgccgccggtccctaggccggcttgcagcagccttagctccaccgtggaatccttcagcggcgcgcgcccgcggcccgtgctcccgccgcggcccccgccgccaccgatcaccgacgtcgactgccgcagcgactgcggttcctcggcctcggtcgtggacgatgactgcacggatgcggccgcctctccgtcatgcccgtccccgctcccgttcgaccttaacctgccccccagcggcggcggctgcggagccggcgtcgggtcttacgctgatgaggagggcgagctcaggctcacggcattgcggctgtgacgtcgagctcaatcgagccgttgcctagagaaagatgaaaaggagaaaaatatttggttcttctcttctctcgttgccgacacgaactctccctccactacgatgttgttgtttacctgatatgatgatgattactatttgcctgaatcctggccaacttatctgcctgcttgttttcgggcgattggggtttatcgccaaatcttgcagcagctgttgtactgtaatatagcaacatttacttccttcctcttgtgagggaagagacagacaaagtaacttatttcaacctttagctacagtttcccttcttgtttttactttttactcttcatgtataacttgtttgggatcgatgaactggaaaaaaatcctttaaatgttgagatcaaagttgtgttaactgttaagtaaatgaagttcaaccacatttcagcttctatatttcttcattctcaaataccatgaacaaatttaccctgcttttctttgaagaccataacctttactattctaaattcctggtgcatgtgctactgacttgtcgttttcaacgatccacaatttcagtttgtattactactaatgcattgtagcagttccccataatagtgtataatccatgtttttttctgtttaggttgatgtttctatttgtgtcattgaaagtaaatttagtggctaacttttgatttcttagtctataaacaacattagctacagatagtgggtcttctggaaactggaactggaacattttgcatcaacgatttggagtatggttacacattaagcattagctgaaaacataagaagtcacgctgaaagtagaagactctacttggtgctgtaacttcaaccttaatgcttcatggcacatgtgacactttcatatgaaacgtcaagacgataagttatttgcaggatcaactactgcaactatcaaagcaatgctaatagcatcaagtggggtggcatagcataaaaagtggaaggtgttagatttgttttgtcatttgtacattggagaatggtgccgcaatagtagtcatattctgtctcttatggtttggttgcaggaacaaatgttgtgacccgtctagatattgtttggttaccttgtcatgcaatagtatatttgcttggagtatcattttaattgcaaagactgaagctctgtttggaagtgatctttatatgcttgcctcatctacaaaaaaatatggcttaaatttttcttgatacacaaacatttgtagtcttcagctggtagtaatattatcttgatctgatcttcacttatactgggataagacaaaaccacacagtcttctttctactgccactgttccaaaattataagcacttcaactatgtcctaagtcaaacttctctaactttgataacttctttttggaaaaaagcaccaacacatctacaaaattaaattagtaccattaaa

SEQ ID NO: 42048 - DNA, 1304 bp, Zea Mays
ttttggcgaagccacactttagcgtgtgcatttttttccaaatattaaaaaaaaacgccggctgcaactgcaatcggcgacggtgaaccatagagcagccggcagcgtcgccgtcgcgccgctcccgcactgctcccctgccccggccgccgccgccgtcgtcgtccgcccgctcaccgctgatcgatgaccgcccgctctggcgctcggccttcgccccgtttctgccctcgcccctcagccgcctcggcgcctgtccgagaccgacgtcctctctccatccagtcagttgaccagctcgactgctctagctcgtgctctccgtcgcggatttgatttcttcctttcagcccaacccagcccaaagccgccagatcgcggcactccgtccaaccctcggcgccaccgatccccttctccaccccctctcctcctcgtcgtcggtgaagatgattccccagagccagagcagctccctgcagcgccttcaacacgtcgagaagcggatagtgcgggtgctggagcttgcgggagcggtgatggaggagctgggatactctcagggccctcgcaccgatgcagtcggcgcgcactgccgcgagttcatgatggctatgaaggaaattcaaacgacactgcgtgaggaaatcaaaagtgcttgcgaataccgtccatttgaaaagtgtgattacagcgcaaggattgctaatgagatatgttgcaagaagctggagtatgtactcgagaagttggatacaatgcaacaaaaccttgaacagagcactgataatgtttagcgagctggctacatattagttgggaatacaacagatatctgatcgatcagtatgcagaaggaatgtagaagcattctatcaactcatgattggaggaactctgggattgtaacttgtgattccatgttctgtggcagagttattagttttggctgcctgctgatgtccagtagcatagcaatgggtccttgggcttgaagtcgtgggattttgagtgaccgctgttctgattttattgctgatgctggcccgacatccattgcattagaagctcatcaggttttatcggctgcaaatgttgtatgactgtttagtctagcaatctagtttagagagcaagtaagacataaatgagccatttatctgtcactaaccttgaagtctatgacttgtataaaatggctgggtatgccgacaatatcaacctcttcggacatctgattttcggtgtatcttcggatcttcctagtatctttcctgtttgcagacttgttctttaaagggtgg

SEQ ID NO: 42049 - DNA, 2548 bp, Zea Mays
ctcctcacttaattttcttcttggagtttcatgtaagggtgctcctcctggccaaatgggagcaagctatcctcgcatgtttctggtcctcctgctgcttcatggagccagtgctgctttgaatcctccaacagcagggccaaaatggcagactctgagcggtcgtccccctcaagtcgtagctcgaggaggattctctggtttgtttcctgactcgagccagatggcctaccagcttgccttgtctaccagcttgcctgacgtcgttctgttatgtgatctacaattctcaagcgaccgcataggcttctgtaagacagggctgacccttgataactcgacgactgtcgctgagatcttccccaagatggacaggacgtacaagctgcagggagaggatgtccatggctggttctccctagatttcaccgcggagcagctggttcagaacgtcactttgatccagaacatcttttctcgcccgagcacattcgatgcctcctttgggatgtacacgctcgatgatgtcgttgaactccacccccctcaaatatggctgaatgtagagtacaattcattctttatggagcacaagttaagcagcgaggactacatactagagctaccaaaagattttagcctcacgtacatctcctcgccggagattgggttcctgaaaagcttgagtgggaagctcaggaacgccaagacaaagctcatcttccggttcctcaacgaagacgtcgaggagccttcgaccaagaaaacgtacggggagctcctgaaagatctgaagtccatcaaggagtttgcagctggcgtccttgtgcccaagacgtacatctggccactgaaaaaggaccagtacttggcgccatccaccagcttggtcaaggatgctcatgccctcggcctggaagtgtacgcctccgggtttgccaacgatatcatcttgagctacaactacagctacgatcccactgccgagtacttgcagttcatcgacaatccagacttctctgtcgacggtgtgatcacggacttcccgcccaccgcatcaggagctgttgcttgcttggctcattccaagggcaatcctctaccacctcctggaaaggacaccaggccgttgatcatcacccacaacggcgcgagcggcatgttcgccggcagcaccgaccttgcctaccagcaggcgatcaaagatgccgccgacgtcatagactgcacggttcagatgtcaaaagacgggacggccttctgcatgcagtccgctgacatgtccagctccacgaccgcgtccaccgctttcgcgtccaaggcctccactgtccatgagatccagaacaagtccggcatcttctcgttcgacctgtcatggagtgagatcgcgaccttgaagcccgacctcatctccccgtttgctcaggcaggcatgaaaagaaatcctcaagcgaagaatgccggcaagctgatgactgtgccccaattcttggacttggccaaggccagcaacatcaccggtatactgatcgaaatagagcatgcttcgtacctggccaagagagggatcggcgtggtggaggcggtgtccagcgcgctgaccaaggcgggctacgacaaggagaccaagcagcaggtgttcatccagtccgacgactcgtcggtgctcgcggcgttcaagaagttcacgacgttcaggagggtgctcaacatcgaggccaagatcagcggcgcctccaagccgtcggtggatgacatcaagaagttcgcggacacggtgaggatcaaccggaactcggtggcgcaggtcaccgggtacttcatgacgcacttcaccgacacggtcagtagcctgcaggacgccaacctcaccgtcttcctcggcgtgctcaagaacgagttcatgaacctcggcttcgacttcttcgctgacccgacgatcgagatcgttacctactcgtgggcggtgctggccgacgggctcgtcacggactaccctgccaccgcggcttcgtacttcagaagtccatgcagtgacatgaacctgaacctgagctactcgatcctgcctgcacaacctggcgctctggtgaacctggcagcccccgggacgctggctccggcgggagcaccggcaccattgctccaaccctccgacgttgtggacccgccgctgcctccagttaaagctgtgatcaccgccgacgcgccagcgccagaggcggctgacaatacctcctcggcgtccagctccaacgcggggaatggcctcttgtgggctgccatcgttgccctcttgtccctgagctttctgcgctgatcccttcctcgatggcttccattgtactcccgcatgtccccctcccccctacatcctcgaatgtgctgtaacataatgttccttaaatagatataacctgtcattaacctgcacataaatacaggtcagaaaaagtttaccctgcaccaattcatgattggatagtggatactacagacagccgttttttaaagtgcaaattactatcctaaacctaaggtttgg

SEQ ID NO: 42050 - DNA, 4049 bp, Zea Mays
ctcggccacatcaacatgctggcgctgaggaagatggcgcgggaggagctcgttcgtggactgccatccatcgagcaggtggaccaactttgtgaggagaaaattggaattctgccattatcaaatctaggattcgctcgaatgccattatgagaacgtgcttcgttaatacgccattctcaaacactagcttacagacaaaatgtcatttagggggttatttgacaaaatatcaattgatcggactattttacccctaaaccaaaactgttgcaacgctccaccacggcgagctccaccgccgtcagggcctccgcgagggggacgtcgtgctcctcgctctgccgaactccatcgctagggttcgggacaccagccccgccctcgtgttcgccacgcccgacaacgtcgagaagctatcgccgttgcgcgtcccggtcgtcctcgtccccgacgccttccacctcgtgggcgacggcgcccccgagttcgcgcccttccccgagttgctgctgctcgattccgagccactgtcgggcccttcggtacgccaggacgacgcggccgccatcctctactcgtcggggacgggcggccagagcaagggcgtcgtgctcacgcaccgcaacctcatcgccacggtcgagctctttgtgcgcttcgaggcctcgcagtacgccgcacctgcttgtgacaatgtctacctggcggcgctgcccatgttccacgtctacggactctcgctcttcgccgtgggacttctctcgctcggttccatggtggtcgtcatgaagaggttcaacgcaggcgaagccgttaaggccattcgcagattcaaagtcacgcacttcccgatcgttccgcccatcatggcggcgctggtgcacaccaccaagccagcggcaatgccgttggaatgcttggtgcaagtgtcaaccggtgcagcgccgtccagccgcaggctcatcgacgatttcgtcaaggctttccctcacgtcgatctcattcaggtgtcgaaatcagtggtacaacgtacaaggtgcccgtatggggtgtttgaggagccgtggggagccggccaacaccatggtggagctcgtcgtgggctcgccgtccagagagcagagaggaggagacagagaacgagcgagaggagacagaataagaaaaggaggatgcagagatgagatagagaacgcacaaaacaaaattgattgcaatagttttggtttaggggtaaaacagtccgatcaatttatattttgtcaaacaaccccctaaatggcattttgtctgtaagccagtgtttgagaatggcgtattaacgaagcgtgttcttataatggcattcaagcgaatcctaagtttgataatggcagaattccaattttctcactttgtgaggcgtgtctcgccggcaagcagcgacggacggcgttccctgaccagacacaatggcgggcggaccgcgcactggagctggtacacggggacttatgtggacccgtgacaccggcgacaccgagcgggaacacctacttcctgcttctcgtcgacgatcggagccgcttcatgtggctgacgctgctgcggtccaaggatcgagcggcggctgccatcaaggagttccagggtgctcctcctggccaaatgggagcaagctatcctcgcatgtttctggtcctcctgctgcttcatggagccagtgctgctttgaatcctccaacagcagggccaaaatggcagactctgagcggtcgtccccctcaagtcgtagctcgaggaggattctctgcgaccgcataggcttctgtaagacagggctgacccttgataactcgacgactgtcgctgagatcttccccaagatggacaggacgtacaagctgcagggagaggatgtccatggctggttctccctagatttcaccgcggagcagctggttcagaacgtcactttgatccagaacatcttttctcgcccgagcacattcgatgcctcctttgggatgtacacgctcgatgatgtcgttgaactccacccccctcaaatatggctgaatgtagagtacaattcattctttatggagcacaagttaagcagcgaggactacatactagagctaccaaaagattttagcctcacgtacatctcctcgccggagattgggttcctgaaaagcttgagtgggaagctcaggaacgccaagacaaagctcatcttccggttcctcaacgaagacgtcgaggagccttcgaccaagaaaacgtacggggagctcctgaaagatctgaagtccatcaaggagtttgcagctggcgtccttgtgcccaagacgtacatctggccactgaaaaaggaccagtacttggcgccatccaccagcttggtcaaggatgctcatgccctcggcctggaagtgtacgcctccgggtttgccaacgatatcatcttgagctacaactacagctacgatcccactgccgagtacttgcagttcatcgacaatccagacttctctgtcgacggtgtgatcacggacttcccgcccaccgcatcaggagctgttgcttgcttggctcattccaagggcaatcctctaccacctcctggaaaggacaccaggccgttgatcatcacccacaacggcgcgagcggcatgttcgccggcagcaccgaccttgcctaccagcaggcgatcaaagatgccgccgacgtcatagactgcacggttcagatgtcaaaagacgggacggccttctgcatgcagtccgctgacatgtccagctccacgaccgcgtccaccgctttcgcgtccaaggcctccactgtccatgagatccagaacaagtccggcatcttctcgttcgacctgtcatggagtgagatcgcgaccttgaagcccgacctcatctccccgtttgctcaggcaggcatgaaaagaaatcctcaagcgaagaatgccggcaagctgatgactgtgccccaattcttggacttggccaaggccagcaacatcaccggtatactgatcgaaatagagcatgcttcgtacctggccaagagagggatcggcgtggtggaggcggtgtccagcgcgctgaccaaggcgggctacgacaaggagaccaagcagcaggtgttcatccagtccgacgactcgtcggtgctcgcggcgttcaagaagttcacgacgttcaggagggtgctcaacatcgaggccaagatcagcggcgcctccaagccgtcggtggatgacatcaagaagttcgcggacacggtgaggatcaaccggaactcggtggcgcaggtcaccgggtacttcatgacgcacttcaccgacacggtcagtagcctgcaggacgccaacctcaccgtcttcctcggcgtgctcaagaacgagttcatgaacctcggcttcgacttcttcgctgacccgacgatcgagatcgttacctactcgtgggcggtgctggccgacgggctcgtcacggactaccctgccaccgcggcttcgtacttcagaagtccatgcagtgacatgaacctgaacctgagctactcgatcctgcctgcacaacctggcgctctggtgaacctggcagcccccgggacgctggctccggcgggagcaccggcaccattgctccaaccctccgacgttgtggacccgccgctgcctccagttaaagctgtgatcaccgccgacgcgccagcgccagaggcggctgacaatacctcctcggcgtccagctccaacgcggggaatggcctcttgtgggctgccatcgttgccctcttgtccctgagctttctgcgctgatcccttcctcgatggcttccattgtactcccgcatgtccccctcccccctacatcctcgaatgtgctgtaacataatgttccttaaatagatataacctgtcattaacctgcacataaatacaggtcagaaaaagtttaccctgcaccaattcatgattggatagtggatactacagacagccgttttttaaagtgcaaattactatcctaaacctaaggtttgg

SEQ ID NO: 42051 - DNA, 2551 bp, Zea Mays
catcaacatgctggcgctgaggaagatggcgcgggaggagctcgttcgtggactgccatccatcgagcagggtgctcctcctggccaaatgggagcaagctatcctcgcatgtttctggtcctcctgctgcttcatggagccagtgctgctttgaatcctccaacagcagggccaaaatggcagactctgagcggtcgtccccctcaagtcgtagctcgaggaggattctctggtttgtttcctgactcgagccagatggcctaccagcttgccttgtctaccagcttgcctgacgtcgttctgttatgtgatctacaattctcaagcgaccgcataggcttctgtaagacagggctgacccttgataactcgacgactgtcgctgagatcttccccaagatggacaggacgtacaagctgcagggagaggatgtccatggctggttctccctagatttcaccgcggagcagctggttcagaacgtcactttgatccagaacatcttttctcgcccgagcacattcgatgcctcctttgggatgtacacgctcgatgatgtcgttgaactccacccccctcaaatatggctgaatgtagagtacaattcattctttatggagcacaagttaagcagcgaggactacatactagagctaccaaaagattttagcctcacgtacatctcctcgccggagattgggttcctgaaaagcttgagtgggaagctcaggaacgccaagacaaagctcatcttccggttcctcaacgaagacgtcgaggagccttcgaccaagaaaacgtacggggagctcctgaaagatctgaagtccatcaaggagtttgcagctggcgtccttgtgcccaagacgtacatctggccactgaaaaaggaccagtacttggcgccatccaccagcttggtcaaggatgctcatgccctcggcctggaagtgtacgcctccgggtttgccaacgatatcatcttgagctacaactacagctacgatcccactgccgagtacttgcagttcatcgacaatccagacttctctgtcgacggtgtgatcacggacttcccgcccaccgcatcaggagctgttgcttgcttggctcattccaagggcaatcctctaccacctcctggaaaggacaccaggccgttgatcatcacccacaacggcgcgagcggcatgttcgccggcagcaccgaccttgcctaccagcaggcgatcaaagatgccgccgacgtcatagactgcacggttcagatgtcaaaagacgggacggccttctgcatgcagtccgctgacatgtccagctccacgaccgcgtccaccgctttcgcgtccaaggcctccactgtccatgagatccagaacaagtccggcatcttctcgttcgacctgtcatggagtgagatcgcgaccttgaagcgcatgaaaagaaatcctcaagcgaagaatgccggcaagctgatgactgtgccccaattcttggacttggccaaggccagcaacatcaccggtatactgatcgaaatagagcatgcttcgtacctggccaagagagggatcggcgtggtggaggcggtgtccagcgcgctgaccaaggcgggctacgacaaggagaccaagcagcaggtgttcatccagtccgacgactcgtcggtgctcgcggcgttcaagaagttcacgacgttcaggagggtgctcaacatcgaggccaagatcagcggcgcctccaagccgtcggtggatgacatcaagaagttcgcggacacggtgaggatcaaccggaactcggtggcgcaggtcaccgggtacttcatgacgcacttcaccgacacggtcagtagcctgcaggacgccaacctcaccgtcttcctcggcgtgctcaagaacgagttcatgaacctcggcttcgacttcttcgctgacccgacgatcgagatcgttacctactcgtgggcggtgctggccgacgggctcgtcacggactaccctgccaccgcggcttcgtacttcagaagtccatgcagtgacatgaacctgaacctgagctactcgatcctgcctgcacaacctggcgctctggtgaacctggcagcccccgggacgctggctccggcgggagcaccggcaccattgctccaaccctccgacgttgtggacccgccgctgcctccagttaaagctgtgatcaccgccgacgcgccagcgccagaggcggctgacaatacctcctcggcgtccagctccaacgcggggaatggcctcttgtgggctgccatcgttgccctcttgtccctgagctttctgcgctgatcccttcctcgatggcttccattgtactcccgcatgtccccctcccccctacatcctcgaatgtgctgtaacataatgttccttaaatagatataacctgtcattaacctgcacataaatacaggtcagaaaaagtttaccctgcaccaattcatgattggatagtggatactacagacagccgttttttaaagtgcaaattactatcctaaacctaaggtttgg

SEQ ID NO: 42052 - DNA, 2487 bp, Zea Mays
catcaacatgctggcgctgaggaagatggcgcgggaggagctcgttcgtggactgccatccatcgagcagggtgctcctcctggccaaatgggagcaagctatcctcgcatgtttctggtcctcctgctgcttcatggagccagtgctgctttgaatcctccaacagcagggccaaaatggcagactctgagcggtcgtccccctcaagtcgtagctcgaggaggattctctgcgaccgcataggcttctgtaagacagggctgacccttgataactcgacgactgtcgctgagatcttccccaagatggacaggacgtacaagctgcagggagaggatgtccatggctggttctccctagatttcaccgcggagcagctggttcagaacgtcactttgatccagaacatcttttctcgcccgagcacattcgatgcctcctttgggatgtacacgctcgatgatgtcgttgaactccacccccctcaaatatggctgaatgtagagtacaattcattctttatggagcacaagttaagcagcgaggactacatactagagctaccaaaagattttagcctcacgtacatctcctcgccggagattgggttcctgaaaagcttgagtgggaagctcaggaacgccaagacaaagctcatcttccggttcctcaacgaagacgtcgaggagccttcgaccaagaaaacgtacggggagctcctgaaagatctgaagtccatcaaggagtttgcagctggcgtccttgtgcccaagacgtacatctggccactgaaaaaggaccagtacttggcgccatccaccagcttggtcaaggatgctcatgccctcggcctggaagtgtacgcctccgggtttgccaacgatatcatcttgagctacaactacagctacgatcccactgccgagtacttgcagttcatcgacaatccagacttctctgtcgacggtgtgatcacggacttcccgcccaccgcatcaggagctgttgcttgcttggctcattccaagggcaatcctctaccacctcctggaaaggacaccaggccgttgatcatcacccacaacggcgcgagcggcatgttcgccggcagcaccgaccttgcctaccagcaggcgatcaaagatgccgccgacgtcatagactgcacggttcagatgtcaaaagacgggacggccttctgcatgcagtccgctgacatgtccagctccacgaccgcgtccaccgctttcgcgtccaaggcctccactgtccatgagatccagaacaagtccggcatcttctcgttcgacctgtcatggagtgagatcgcgaccttgaagcccgacctcatctccccgtttgctcaggcaggcatgaaaagaaatcctcaagcgaagaatgccggcaagctgatgactgtgccccaattcttggacttggccaaggccagcaacatcaccggtatactgatcgaaatagagcatgcttcgtacctggccaagagagggatcggcgtggtggaggcggtgtccagcgcgctgaccaaggcgggctacgacaaggagaccaagcagcaggtgttcatccagtccgacgactcgtcggtgctcgcggcgttcaagaagttcacgacgttcaggagggtgctcaacatcgaggccaagatcagcggcgcctccaagccgtcggtggatgacatcaagaagttcgcggacacggtgaggatcaaccggaactcggtggcgcaggtcaccgggtacttcatgacgcacttcaccgacacggtcagtagcctgcaggacgccaacctcaccgtcttcctcggcgtgctcaagaacgagttcatgaacctcggcttcgacttcttcgctgacccgacgatcgagatcgttacctactcgtgggcggtgctggccgacgggctcgtcacggactaccctgccaccgcggcttcgtacttcagaagtccatgcagtgacatgaacctgaacctgagctactcgatcctgcctgcacaacctggcgctctggtgaacctggcagcccccgggacgctggctccggcgggagcaccggcaccattgctccaaccctccgacgttgtggacccgccgctgcctccagttaaagctgtgatcaccgccgacgcgccagcgccagaggcggctgacaatacctcctcggcgtccagctccaacgcggggaatggcctcttgtgggctgccatcgttgccctcttgtccctgagctttctgcgctgatcccttcctcgatggcttccattgtactcccgcatgtccccctcccccctacatcctcgaatgtgctgtaacataatgttccttaaatagatataacctgtcattaacctgcacataaatacaggtcagaaaaagtttaccctgcaccaattcatgattggatagtggatactacagacagccgttttttaaagtgcaaattactatcctaaacctaaggtttgg

SEQ ID NO: 42053 - DNA, 2555 bp, Zea Mays
catcaacatgctggcgctgaggaagatggcgcgggaggagctcgttcgtggactgccatccatcgagcagggtgctcctcctggccaaatgggagcaagctatcctcgcatgtttctggtcctcctgctgcttcatggagccagtgctgctttgaatcctccaacagcagggccaaaatggcagactctgagcggtcgtccccctcaagtcgtagctcgaggaggattctctggtttgtttcctgactcgagccagatggcctaccagcttgccttgtctaccagcttgcctgacgtcgttctgttatgtgatctacaattctcaagcgaccgcataggcttctgtaagacagggctgacccttgataactcgacgactgtcgctgagatcttccccaagatggacaggacgtacaagctgcagggagaggatgtccatggctggttctccctagatttcaccgcggagcagctggttcagaacgtcactttgatccagaacatcttttctcgcccgagcacattcgatgcctcctttgggatgtacacgctcgatgatgtcgttgaactccacccccctcaaatatggctgaatgtagagtacaattcattctttatggagcacaagttaagcagcgaggactacatactagagctaccaaaagattttagcctcacgtacatctcctcgccggagattgggttcctgaaaagcttgagtgggaagctcaggaacgccaagacaaagctcatcttccggttcctcaacgaagacgtcgaggagccttcgaccaagaaaacgtacggggagctcctgaaagatctgaagtccatcaaggagtttgcagctggcgtccttgtgcccaagacgtacatctggccactgaaaaaggaccagtacttggcgccatccaccagcttggtcaaggatgctcatgccctcggcctggaagtgtacgcctccgggtttgccaacgatatcatcttgagctacaactacagctacgatcccactgccgagtacttgcagttcatcgacaatccagacttctctgtcgacggtgtgatcacggacttcccgcccaccgcatcaggagctgttgcttgcttggctcattccaagggcaatcctctaccacctcctggaaaggacaccaggccgttgatcatcacccacaacggcgcgagcggcatgttcgccggcagcaccgaccttgcctaccagcaggcgatcaaagatgccgccgacgtcatagactgcacggttcagatgtcaaaagacgggacggccttctgcatgcagtccgctgacatgtccagctccacgaccgcgtccaccgctttcgcgtccaaggcctccactgtccatgagatccagaacaagtccggcatcttctcgttcgacctgtcatggagtgagatcgcgaccttgaagcgcaggcatgaaaagaaatcctcaagcgaagaatgccggcaagctgatgactgtgccccaattcttggacttggccaaggccagcaacatcaccggtatactgatcgaaatagagcatgcttcgtacctggccaagagagggatcggcgtggtggaggcggtgtccagcgcgctgaccaaggcgggctacgacaaggagaccaagcagcaggtgttcatccagtccgacgactcgtcggtgctcgcggcgttcaagaagttcacgacgttcaggagggtgctcaacatcgaggccaagatcagcggcgcctccaagccgtcggtggatgacatcaagaagttcgcggacacggtgaggatcaaccggaactcggtggcgcaggtcaccgggtacttcatgacgcacttcaccgacacggtcagtagcctgcaggacgccaacctcaccgtcttcctcggcgtgctcaagaacgagttcatgaacctcggcttcgacttcttcgctgacccgacgatcgagatcgttacctactcgtgggcggtgctggccgacgggctcgtcacggactaccctgccaccgcggcttcgtacttcagaagtccatgcagtgacatgaacctgaacctgagctactcgatcctgcctgcacaacctggcgctctggtgaacctggcagcccccgggacgctggctccggcgggagcaccggcaccattgctccaaccctccgacgttgtggacccgccgctgcctccagttaaagctgtgatcaccgccgacgcgccagcgccagaggcggctgacaatacctcctcggcgtccagctccaacgcggggaatggcctcttgtgggctgccatcgttgccctcttgtccctgagctttctgcgctgatcccttcctcgatggcttccattgtactcccgcatgtccccctcccccctacatcctcgaatgtgctgtaacataatgttccttaaatagatataacctgtcattaacctgcacataaatacaggtcagaaaaagtttaccctgcaccaattcatgattggatagtggatactacagacagccgttttttaaagtgcaaattactatcctaaacctaaggtttgg

SEQ ID NO: 42054 - DNA, 3805 bp, Zea Mays
gaactacgcgccatagaggacaaccacacctggacactcactgagttgccatctgggcagcgagccattgggctcaagtgggtattcaaagtcaagaaggatgaacacggtgctgtggtacggcacaaagcacggctcgtcgcaaaaggctacgctcagcgccaaggaatcgactacgacgaggtgtttgcaccggtcgctcgcttggaagcggtacggctgctgctggcgttggcggcgcaggagggatggcaagtccatcacatggacgtcaagacagcgttcttgaacggtgacctccaggaggaggtgtatgtgcagcaagcgcctgggtttgctcaacctggacaggaacacaaggtatatcgactgcacaaagctctttatggtttgcatcaagctccccgtgcatggaataaaaaactggatgaacaactgggtgttctgggatttgtgagatgtccatctgaggctgctatctactgccgtggaagagatgcggagagactggttgtaggtgtctatgttgacgatctggtgatcacaggcactagcagcagcagcatcaggaagttcaagacagaaatgactaagatttttaagatgagtgaccttgggttgctatcttattacctgggtattgaagtgaggcaggaagaagctgggatcaggttgtctcaaggaagctatgcaagaaaaattctggagaagtgtggtctagaggactgcaatccctgcaccgtgccgatgcagcctaagctgaagttgagtagggaaagtgatagttcaaaaatcaatgtgactgaatacagaagcttggtagggagcctgagataccttgtgaatactcgacctgacttggcatattcagttggatatgtgagtagatttatggaggagccccatatggatcatcttgcagctgtgaagcagatcctgaggtacatagcagggacaagagattggggcctgttctattcaaggagaaatggagggagtgatgagctcttgggctatagtgacagtgatatggctggcgacttggatggcagaaagagcacatctgggatccttttctttcttgggaggagtccaatcagctggcaatcaactaagcagaaggtggtggcgctatcaagttgtgaggcggagtacatcgctgctgctactgctgcatgtcaagctgtttggctggcacgactgcttgctgaaatcaggaactcagagacaagcagacctttgctaagggtggacaacaagtccactatctcgctgattaagaatccagtgcatcacgaccggtcaaagcatattgataccagatttcatttgattcgggagtatgaaaattcagggcaaatcaaggtgaagttcatcagtactgaagaacagctgggggatattctgaccaagccactcggcaaagtcaagttccaggaactctgcaccaagattggcctaagcctagtggtgctcctcctggccaaatgggagcaagctatcctcgcatgtttctggtcctcctgctgcttcatggagccagtgctgctttgaatcctccaacagcagggccaaaatggcagactctgagcggtcgtccccctcaagtcgtagctcgaggaggattctctgcgaccgcataggcttctgtaagacagggctgacccttgataactcgacgactgtcgctgagatcttccccaagatggacaggacgtacaagctgcagggagaggatgtccatggctggttctccctagatttcaccgcggagcagctggttcagaacgtcactttgatccagaacatcttttctcgcccgagcacattcgatgcctcctttgggatgtacacgctcgatgatgtcgttgaactccacccccctcaaatatggctgaatgtagagtacaattcattctttatggagcacaagttaagcagcgaggactacatactagagctaccaaaagattttagcctcacgtacatctcctcgccggagattgggttcctgaaaagcttgagtgggaagctcaggaacgccaagacaaagctcatcttccggttcctcaacgaagacgtcgaggagccttcgaccaagaaaacgtacggggagctcctgaaagatctgaagtccatcaaggagtttgcagctggcgtccttgtgcccaagacgtacatctggccactgaaaaaggaccagtacttggcgccatccaccagcttggtcaaggatgctcatgccctcggcctggaagtgtacgcctccgggtttgccaacgatatcatcttgagctacaactacagctacgatcccactgccgagtacttgcagttcatcgacaatccagacttctctgtcgacggtgtgatcacggacttcccgcccaccgcatcaggagctgttgcttgcttggctcattccaagggcaatcctctaccacctcctggaaaggacaccaggccgttgatcatcacccacaacggcgcgagcggcatgttcgccggcagcaccgaccttgcctaccagcaggcgatcaaagatgccgccgacgtcatagactgcacggttcagatgtcaaaagacgggacggccttctgcatgcagtccgctgacatgtccagctccacgaccgcgtccaccgctttcgcgtccaaggcctccactgtccatgagatccagaacaagtccggcatcttctcgttcgacctgtcatggagtgagatcgcgaccttgaagcccgacctcatctccccgtttgctcaggcaggcatgaaaagaaatcctcaagcgaagaatgccggcaagctgatgactgtgccccaattcttggacttggccaaggccagcaacatcaccggtatactgatcgaaatagagcatgcttcgtacctggccaagagagggatcggcgtggtggaggcggtgtccagcgcgctgaccaaggcgggctacgacaaggagaccaagcagcaggtgttcatccagtccgacgactcgtcggtgctcgcggcgttcaagaagttcacgacgttcaggagggtgctcaacatcgaggccaagatcagcggcgcctccaagccgtcggtggatgacatcaagaagttcgcggacacggacgccaacctcaccgtcttcctcggcgtgctcaagaacgagttcatgaacctcggcttcgacttcttcgctgacccgacgatcgagatcgttacctactcgtgggcggtgctggccgacgggctcgtcacggactaccctgccaccgcggcttcgtacttcagaagtccatgcagtgacatgaacctgaacctgagctactcgatcctgcctgcacaacctggcgctctggtgaacctggcagcccccgggacgctggctccggcgggagcaccggcaccattgctccaaccctccgacgttgtggacccgccgctgcctccagttaaagctgtgatcaccgccgacgcgccagcgccagaggcggctgacaatacctcctcggcgtccagctccaacgcggggaatggcctcttgtgggctgccatcgttgccctcttgtccctgagctttctgcgctgatcccttcctcgatggcttccattgtactcccgcatgtccccctcccccctacatcctcgaatgtgctgtaacataatgttccttaaatagatataacctgtcattaacctgcacataaatacaggtcagaaaaagtttaccctgcaccaattcatgattggatagtggatactacagacagccgttttttaaagtgcaaattactatcctaaacctaaggtttgg

SEQ ID NO: 42055 - DNA, 3788 bp, Zea Mays
tgggctcaagtgggtattcaaagtcaagaaggatgaacacggtgctgtggtacggcacaaagcacggctcgtcgcaaaaggctacgctcagcgccaaggaatcgactacgacgaggtgtttgcaccggtcgctcgcttggaagcggtacggctgctgctggcgttggcggcgcaggagggatggcaagtccatcacatggacgtcaagacagcgttcttgaacggtgacctccaggaggaggtgtatgtgcagcaagcgcctgggtttgctcaacctggacaggaacacaaggtatatcgactgcacaaagctctttatggtttgcatcaagctccccgtgcatggaataaaaaactggatgaacaactgggtgttctgggatttgtgagatgtccatctgaggctgctatctactgccgtggaagagatgcggagagactggttgtaggtgtctatgttgacgatctggtgatcacaggcactagcagcagcagcatcaggaagttcaagacagaaatgactaagatttttaagatgagtgaccttgggttgctatcttattacctgggtattgaagtgaggcaggaagaagctgggatcaggttgtctcaaggaagctatgcaagaaaaattctggagaagtgtggtctagaggactgcaatccctgcaccgtgccgatgcagcctaagctgaagttgagtagggaaagtgatagttcaaaaatcaatgtgactgaatacagaagcttggtagggagcctgagataccttgtgaatactcgacctgacttggcatattcagttggatatgtgagtagatttatggaggagccccatatggatcatcttgcagctgtgaagcagatcctgaggtacatagcagggacaagagattggggcctgttctattcaaggagaaatggagggagtgatgagctcttgggctatagtgacagtgatatggctggcgacttggatggcagaaagagcacatctgggatccttttctttcttgggaggagtccaatcagctggcaatcaactaagcagaaggtggtggcgctatcaagttgtgaggcggagtacatcgctgctgctactgctgcatgtcaagctgtttggctggcacgactgcttgctgaaatcaggaactcagagacaagcagacctttgctaagggtggacaacaagtccactatctcgctgattaagaatccagtgcatcacgaccggtcaaagcatattgataccagatttcatttgattcgggagtatgaaaattcagggcaaatcaaggtgaagttcatcagtactgaagaacagctgggggatattctgaccaagccactcggcaaagtcaagttccaggaactctgcaccaagattggcctaagcctagtggtgctcctcctggccaaatgggagcaagctatcctcgcatgtttctggtcctcctgctgcttcatggagccagtgctgctttgaatcctccaacagcagggccaaaatggcagactctgagcggtcgtccccctcaagtcgtagctcgaggaggattctctgcgaccgcataggcttctgtaagacagggctgacccttgataactcgacgactgtcgctgagatcttccccaagatggacaggacgtacaagctgcagggagaggatgtccatggctggttctccctagatttcaccgcggagcagctggttcagaacgtcactttgatccagaacatcttttctcgcccgagcacattcgatgcctcctttgggatgtacacgctcgatgatgtcgttgaactccacccccctcaaatatggctgaatgtagagtacaattcattctttatggagcacaagttaagcagcgaggactacatactagagctaccaaaagattttagcctcacgtacatctcctcgccggagattgggttcctgaaaagcttgagtgggaagctcaggaacgccaagacaaagctcatcttccggttcctcaacgaagacgtcgaggagccttcgaccaagaaaacgtacggggagctcctgaaagatctgaagtccatcaaggagtttgcagctggcgtccttgtgcccaagacgtacatctggccactgaaaaaggaccagtacttggcgccatccaccagcttggtcaaggatgctcatgccctcggcctggaagtgtacgcctccgggtttgccaacgatatcatcttgagctacaactacagctacgatcccactgccgagtacttgcagttcatcgacaatccagacttctctgtcgacggtgtgatcacggacttcccgcccaccgcatcaggagctgttgcttgcttggctcattccaagggcaatcctctaccacctcctggaaaggacaccaggccgttgatcatcacccacaacggcgcgagcggcatgttcgccggcagcaccgaccttgcctaccagcaggcgatcaaagatgccgccgacgtcatagactgcacggttcagatgtcaaaagacgggacggccttctgcatgcagtccgctgacatgtccagctccacgaccgcgtccaccgctttcgcgtccaaggcctccactgtccatgagatccagaacaagtccggcatcttctcgttcgacctgtcatggagtgagatcgcgaccttgaagcgcatgaaaagaaatcctcaagcgaagaatgccggcaagctgatgactgtgccccaattcttggacttggccaaggccagcaacatcaccggtatactgatcgaaatagagcatgcttcgtacctggccaagagagggatcggcgtggtggaggcggtgtccagcgcgctgaccaaggcgggctacgacaaggagaccaagcagcaggtgttcatccagtccgacgactcgtcggtgctcgcggcgttcaagaagttcacgacgttcaggagggtgctcaacatcgaggccaagatcagcggcgcctccaagccgtcggtggatgacatcaagaagttcgcggacacggtgaggatcaaccggaactcggtggcgcaggtcaccgggtacttcatgacgcacttcaccgacacggtcagtagcctgcaggacgccaacctcaccgtcttcctcggcgtgctcaagaacgagttcatgaacctcggcttcgacttcttcgctgacccgacgatcgagatcgttacctactcgtgggcggtgctggccgacgggctcgtcacggactaccctgccaccgcggcttcgtacttcagaagtccatgcagtgacatgaacctgaacctgagctactcgatcctgcctgcacaacctggcgctctggtgaacctggcagcccccgggacgctggctccggcgggagcaccggcaccattgctccaaccctccgacgttgtggacccgccgctgcctccagttaaagctgtgatcaccgccgacgcgccagcgccagaggcggctgacaatacctcctcggcgtccagctccaacgcggggaatggcctcttgtgggctgccatcgttgccctcttgtccctgagctttctgcgctgatcccttcctcgatggcttccattgtactcccgcatgtccccctcccccctacatcctcgaatgtgctgtaacataatgttccttaaatagatataacctgtcattaacctgcacataaatacaggtcagaaaaagtttaccctgcaccaattcatgattggatagtggatactacagacagccgttttttaaagtgcaaattactatcctaaacctaaggtttgg

SEQ ID NO: 42056 - DNA, 4475 bp, Zea Mays
tgggctcaagtgggtattcaaagtcaagaaggatgaacacggtgctgtggtacggcacaaagcacggctcgtcgcaaaaggctacgctcagcgccaaggaatcgactacgacgaggtgtttgcaccggtcgctcgcttggaagcggtacggctgctgctggcgttggcggcgcaggagggatggcaagtccatcacatggacgtcaagacagcgttcttgaacggtgacctccaggaggaggtgtatgtgcagcaagcgcctgggtttgctcaacctggacaggaacacaaggtatatcgactgcacaaagctctttatggtttgcatcaagctccccgtgcatggaataaaaaactggatgaacaactgggtgttctgggatttgtgagatgtccatctgaggctgctatctactgccgtggaagagatgcggagagactggttgtaggtgtctatgttgacgatctggtgatcacaggcactagcagcagcagcatcaggaagttcaagacagaaatgactaagatttttaagatgagtgaccttgggttgctatcttattacctgggtattgaagtgaggcaggaagaagctgggatcaggttgtctcaaggaagctatgcaagaaaaattctggagaagtgtggtctagaggactgcaatccctgcaccgtgccgatgcagcctaagctgaagttgagtagggaaagtgatagttcaaaaatcaatgtgactgaatacagaagcttggtagggagcctgagataccttgtgaatactcgacctgacttggcatattcagttggatatgtgagtagatttatggaggagccccatatggatcatcttgcagctgtgaagcagatcctgaggtacatagcagggacaagagattggggcctgttctattcaaggagaaatggagggagtgatgagctcttgggctatagtgacagtgatatggctggcgacttggatggcagaaagagcacatctgggatccttttctttcttgggaggagtccaatcagctggcaatcaactaagcagaaggtggtggcgctatcaagttgtgaggcggagtacatcgctgctgctactgctgcatgtcaagctgtttggctggcacgactgcttgctgaaatcaggaactcagagacaagcagacctttgctaagggtggacaacaagtccactatctcgctgattaagaatccagtgcatcacgaccggtcaaagcatattgataccagatttcatttgattcgggagtatgaaaattcagggcaaatcaaggtgaagttcatcagtactgaagaacagctgggggatattctgaccaagccactcggcaaagtcaagttccaggaactctgcaccaagattggcctaagcctagtgtaagtagatgcacaagtcttaggaggagaattgttaaaataatccttgtgcttttagctggtgtttgttttattttctgttagctgaagtcagtcgcacggtctgttgttggctgtgcgtgtagtgggctcggacgtgcgcgttttgttcgcatggagagcgcgtactgcgccatgtatccaccaggcaaggcagttgggatggcagctgcccatgatggttatggggcgtcaggcagggtgttagtgccccgtttctaggaagtagtaggtcacgttctctattgagtcttttatattccagtgaatagagtctgaaaaagctgttcgttgttcacagcaccaaatcagagtgtctccacttgtgtttgtgtgtgtgcgcgattttctctgcaacctgcagggtgagctcgccggcaacaggaggttgtttctccggcgaggtctgacagtggtgttctgggtggccgacatgatagaggaggaggaagtggaggaagaagaatgcatattagggatttaggaaaatagccttggctctggtggcccagagcacggcagaggctctcttggggctgtattccaatatttatagatagaagattacatggatgcatgtgctacaatcacggaggcacagcctaaacaggaatcaagggtgctcctcctggccaaatgggagcaagctatcctcgcatgtttctggtcctcctgctgcttcatggagccagtgctgctttgaatcctccaacagcagggccaaaatggcagactctgagcggtcgtccccctcaagtcgtagctcgaggaggattctctgcgaccgcataggcttctgtaagacagggctgacccttgataactcgacgactgtcgctgagatcttccccaagatggacaggacgtacaagctgcagggagaggatgtccatggctggttctccctagatttcaccgcggagcagctggttcagaacgtcactttgatccagaacatcttttctcgcccgagcacattcgatgcctcctttgggatgtacacgctcgatgatgtcgttgaactccacccccctcaaatatggctgaatgtagagtacaattcattctttatggagcacaagttaagcagcgaggactacatactagagctaccaaaagattttagcctcacgtacatctcctcgccggagattgggttcctgaaaagcttgagtgggaagctcaggaacgccaagacaaagctcatcttccggttcctcaacgaagacgtcgaggagccttcgaccaagaaaacgtacggggagctcctgaaagatctgaagtccatcaaggagtttgcagctggcgtccttgtgcccaagacgtacatctggccactgaaaaaggaccagtacttggcgccatccaccagcttggtcaaggatgctcatgccctcggcctggaagtgtacgcctccgggtttgccaacgatatcatcttgagctacaactacagctacgatcccactgccgagtacttgcagttcatcgacaatccagacttctctgtcgacggtgtgatcacggacttcccgcccaccgcatcaggagctgttgcttgcttggctcattccaagggcaatcctctaccacctcctggaaaggacaccaggccgttgatcatcacccacaacggcgcgagcggcatgttcgccggcagcaccgaccttgcctaccagcaggcgatcaaagatgccgccgacgtcatagactgcacggttcagatgtcaaaagacgggacggccttctgcatgcagtccgctgacatgtccagctccacgaccgcgtccaccgctttcgcgtccaaggcctccactgtccatgagatccagaacaagtccggcatcttctcgttcgacctgtcatggagtgagatcgcgaccttgaagcccgacctcatctccccgtttgctcaggcaggcatgaaaagaaatcctcaagcgaagaatgccggcaagctgatgactgtgccccaattcttggacttggccaaggccagcaacatcaccggtatactgatcgaaatagagcatgcttcgtacctggccaagagagggatcggcgtggtggaggcggtgtccagcgcgctgaccaaggcgggctacgacaaggagaccaagcagcaggtgttcatccagtccgacgactcgtcggtgctcgcggcgttcaagaagttcacgacgttcaggagggtgctcaacatcgaggccaagatcagcggcgcctccaagccgtcggtggatgacatcaagaagttcgcggacacggtgaggatcaaccggaactcggtggcgcaggtcaccgggtacttcatgacgcacttcaccgacacggtcagtagcctgcaggacgccaacctcaccgtcttcctcggcgtgctcaagaacgagttcatgaacctcggcttcgacttcttcgctgacccgacgatcgagatcgttacctactcgtgggcggtgctggccgacgggctcgtcacggactaccctgccaccgcggcttcgtacttcagaagtccatgcagtgacatgaacctgaacctgagctactcgatcctgcctgcacaacctggcgctctggtgaacctggcagcccccgggacgctggctccggcgggagcaccggcaccattgctccaaccctccgacgttgtggacccgccgctgcctccagttaaagctgtgatcaccgccgacgcgccagcgccagaggcggctgacaatacctcctcggcgtccagctccaacgcggggaatggcctcttgtgggctgccatcgttgccctcttgtccctgagctttctgcgctgatcccttcctcgatggcttccattgtactcccgcatgtccccctcccccctacatcctcgaatgtgctgtaacataatgttccttaaatagatataacctgtcattaacctgcacataaatacaggtcagaaaaagtttaccctgcaccaattcatgattggatagtggatactacagacagccgttttttaaagtgcaaattactatcctaaacctaaggtttgg

SEQ ID NO: 42057 - DNA, 1397 bp, Zea Mays
cgggagcccgcgggtgagcggaccgcgccccggctgcctgtcgctgagcctggcttagtggctttgcttgcgtacgatagtggggaagcggtggtgcgctcgtcagccgatgagccgacacacacacagacacagcacaggacacacggcccccggtttctccccgttgctgctgtcccgccggcgtccagtctcggcggggctctagctggggacgcgccggctcgcgctgtgacctgggagctctggactctggaggcgctgcaggcggtcgggcgggcgatggggtgggcttcctgctgcaagcggtctgacggggctgaacctggcaggaggaggaggaagaagaaggacacggcgtggcggatcttctcactcaaggagctccagtcagcgacgaacaatttcaattacgacaacaagctcggcgagggcgggttcggcagtgtgtactggggccagctctgggacggatcacagatcgccgtgaagaggctcaagagctggagcaacaaggccgaaacggagttcgctgtcgaggtggaggttctggcacgcgtgcggcacaggagccttctaagcctgcgcgggtactgcgccgaaggccaggagcgcctgatagtctacgattacatgccgaacctgagcatacactctcagctccatgggcagcacgcggcggagtgcaacctcagctgggagaggaggatgaggatcgctgtggactccgcggaagggatcgcctacctgcaccacagcgcgacgccgcacatcatccacagagacgtgaaggcgagcaacgtgctcctggacgccgacttccaggcgcgggtcgccgacttcggcttcgccaagctggtcccggacggcgcgacgcacgtcaccaccaaggtgaaaggcacgctgggctacctggcgccggagtacgcgatgctcgggaaggcctccgagagctgcgacgtcttcagcttcggggtcacgctgctggagctggccagcgggaggaggcccgtggagaagctgagccccaccgccgccgcgaagcagaccgtgacggagtgggcgctcccgctggcccgcgccaggaggttcggcgagatcgccgaccccaagctcggcggcggattcgtcgaggaggagctcaagcgggtggtgctcgtcgggctcgtctgcgcccaggacaggccggagcttcggcccacgatgtctgaggtcgtccagctgctcaagggagagtctgctgagaagctcgacagcctggagaacgactgcctgttcaagcctggtggtggctcgttccagggctcggactgcgtcggcgagggcgagggcgagggcgaggggaggagccccggagcagatggagggatacaggaggagccccggagcagatgggg

SEQ ID NO: 42058 - DNA, 2787 bp, Zea Mays
ctccagtgctcctcgcgtgatcgcatccacgcttcgctgcactccatacgcggccgggagctcccccggttccaccacctcctcacctcatccgtctgaagccgccgcttttgcctcgacctcgcccgcagtccgcgatagcgcgggttgccacccgtccgatcgcgcccggacgaccgcgaccccctcccctcatgttccgcggccatgcccctctcctccaccacctcgccgtcggcgggggcggccgccgccgccgcagtgcgcaccgcttcgccgcctcgccgcatcgccacccacgttcgtgcgcagttcagattaatcaaatccattaccaaaattcggtcgagtgaagatagctgtgttttgttcaggcagaagctaggcattccggcggggttccaggctcaacatgtgaaatgtttacctcatttgatcagatctattgtaagaggtgctagatcagatatcactgacggtgacaatggaacaactgagcccgcgagggaactattggagcgtctgtttgccaagacaaagagtctagatccaagcgcttctcagggtagggaactgagcatgagcattgaggtcctgaagactgagtttgaggctgccttatcaatcctaaggaagaaagagaaggatcttcgtgatgcggagaagaaagtctccgtggataggtcaaggttgaaccagacgaagcaggacctcgatcagagggaggaggacatcatcaaagcatactcgaggcaacatgaaatggagaaagcactgatgaaggcgagcagggatttgactctacaagtccgacagatcaataacctgaaggttatgatcgaggaacaagacaaaaaacttgttagttcacaagacgcactttctaagaaggttattgaagtggataagcttaaacaagagatgctgaagaagaatgatgaagtagctttgctgcattcagagatcgagtccaaggaacaagagcttcttgtagctaatcaggccattgcacgtcaagaagcaacaattagggagcttcgaagtgaaactaaaagaaaggaaactgaggttgagagattaaatgaattggcgaaagctaatgaagacaaactgaaatttgcagaacaggaacttgagaagcagaattcaggatggattgcagcacagcaagagttaaaggaattggcacaaatggcattcaaggataaagatgatatcaagaatacaatcaatgacttcaaacgggtgaggtatttgctggatgctgtgcgttctgaactaatagcttcaaaagaggctttaaccttctcacgcaagcaagtagaagatcaagcggcacagttgagtaaccaagtgcaggaactcacagaccaaaaggcactgattatttcttatacccggaatctggaagctgcccagctggagattcaaggaaagtcaaatgagctcagtactgtacaatctcgttgtagtgaacttgaatctcagttacttgaggaaacggagaaggttgagttcctagaggctatgttaaccaaagaaagggagatcttggaacagaaaactaaggaagtggcgttccttcaagaggaggtagttcagaaggagaaggattacttcaattcacaaaagcttgttgaaacaaaagagactgagctgttagaggcgaggcatgaagtcgaagatatgaaattgaaggtggattccatacaatttgctgttcgagagaaggatttggagcttctggaggcacaaagaaaacttgatgaagttaacagcgaagttgttgaacttcagcagctgataaatagcaaggaggatcaactggtccaagttagaactgaattacaggataaagagcaatgcatacaattgatgcaggatgaattggataagatgagattaggacgctcgcaagctgaatctgtggttcaaaagatagtcgagcttactagcaatctcataggttctgtcaaaggcgaagaattcaacatttataacttgctggatgatgaaattttaagcacgagcacagcccttgagtacagtttgcataagcataaccaactggaggctgacatagacatgttaaaagaatccctgcgacagaaggacatggatctgactgctgcttataaagcgcttgacgccaaagatcgagagttgaaggcagtagttggaaggttagatgttagggacaaggaactagacaagttggaagagctatccatagacccctatggcaccaggaaactgtctagagttgctgatgaggcaaccgaagacaacattgctggtgaagcggagctccaaaagcatgagatggaatctgtggagatggaggcactagctgctagcactatgttgaagaagcttgcggatgtgactaagaaattcttgagaagtggtagaactgattctggtaccaatttagattcaaacgttagtgaaggtgcttctgaattggaaccacaaaggaaacttaatgtgattctcgaggctaaaaaggagattgtcgggctattttctttgacagaagagctcgtcactggtgctcaaacgaaggacgatgatgaggaaccatagcatcataagttcataactgaacatataactgcatcatgaatgttatgcatgtcaactggaatgacgcagctgaaattgttaccatcgtttcctttccttttggggctcaggatttctttatgttcttttggttcatggatggcatcgcaaaatgaaaaaaaaagattgtttagattttggttaaaaggatgatgattgtgc

SEQ ID NO: 42059 - DNA, 3093 bp, Zea Mays
acctttgcacacctcgctgcttcgtcttccttcccgttcttttataaggccccggccccgggctgcgccgccgctcgcctctcctcccttcccttccccgtaccgtgtcactctcctccccggttcgtcgtgcggagggccaaagcttcgaggaagcagaaccctagcgctagcgctgttggagtagtagcctacgccctacggccgatggctgcggcggcgatcctgccggagctggggacgcaggtgctcatcccggtcgcggcggccgtgggcatcgccttctcggtgctgcagtgggtgctggtgtccaaggtgcggctcgcccccgagcgacgcgcggacggcggcggagccgtcaagagcggccccagcgactacctcatcgaggaggaggaagggctcaacgaccacaacgtcgtcgtcaagtgcgccgagatccagaacgccatctccgaaggagctacatctttccttttcactgagtacaagtatgttggattattcatgggcatctttgcaatccttatattcctcttccttgggtccgtcgagggattcagcacaaagagtcaaccttgccactatagcaaggacaagacttgcaagcctgcccttgctaatgccatcttcagtactatagcttttgtgcttggtgcggtcacctcactggtttctggttttcttggaatgaagatagcaacttatgctaatgcccggacaactttagaggccagaaagggcgtcgggaaggcatttattactgccttccgatctggtgcagttatgggtttcctgcttgctgccagcggtcttttggttctttatattgctattaatttgtttggaatttattatggcgatgactgggaaggtctttttgaggctattactggttatggccttggtggttcttctatggctctttttggccgtgttggtggtggtatttataccaaggctgctgatgttggtgccgaccttgtggggaaggtagaaagaaacattcctgaggacgatccaagaaatccagctgtcattgctgacaatgttggtgataatgttggagatattgctggaatgggatcagatctctttggctcatatgctgaatcgtcatgtgctgctcttgttgtggcctcgatctcgtcttttggaatcaaccatcaatttactccaatggtgtatccccttcttgtcagctctgttggtattatagcatgtctcataacaacgctgtttgcaactgatttcttcgagataaaggctgtgaatgaaatagagcctgctctcaagaaacaacttataatatccactgttgtgatgaccattggcattgcgctcatcagttggcttggtcttccatacaccttcaccatttataactttggagcccagaagacagtgcaaagctggcaattgttcttgtgtgtggcggttggtctctgggctggcttagtcattggttttattactgagtactacacaagcaatgcctacagccctgtacaagttgttgctgattcctgcagaactggagctgccactaatgtcatttttgggcttgctctgggttacaaatcagtcattatcccaatttttgctattgcgtttagtatcttccttagcttcagccttgctgccatgtatggtgttgctgtggctgctcttggaatgctgagtaccattgccacaggccttgctattgatgcctatggccctatcagtgataatgctggaggcatagctgaaatggctgggatgagccataggattcgtgagagaactgatgctctagatgctgcaggaaacaccactgctgcaattggaaagggttttgctattggctctgcagccttggtatcccttgcactcttcggtgcctttgtaagccgggctgctatctccactgttgatgttctgactcctaaagtgttcattgggcttattgttggtgctatgctcccatactggttctcggcaatgaccatgaaaagtgtaggcagtgctgcactcaagatggtggaggaagtccgccggcagttcaacaccatccctgggctcatggagggcaccacaaagcctgactacgcaacttgtgtcaagatctcaacggatgcatccatcaaggagatgatccccccaggtgctcttgttatgctgacaccactgatcgttgggattttgtttggggttgagaccctcgctggggtccttgctggtgcccttgtctctggtgttcagattgccatttctgcatccaacactggtggtgcctgggacaacgccaagaagtacattgaggttctgaccctcacaaggcggctgtcattggtgacaccattggagatcctctcaaggacacgtctggcccctccctcaacattctcatcaagcttatggcggttgaatcccttgtcttcgcccccttcttcgccgcccatggtggcattatcttcaaatggctctaaagatagcgacaacgttagttagtcgcaagagaaaggccgcagttctgcggctgcgaggggaatagagcagtatgtcagctatacaacatctatggcatgtgctttgctcctccacttgattatagcccccgttgtgtgtttcggtttctgttttcctggagtttttggttccaggcttccgaccatgttttgatcccataaattctcctccagccttcgagcaactgagtccatcttcgtaagtcatcagccctagccagacattgaagcatcggaaaactttaagggcttgttcgttttggtgataatccacatgtattgggtgggattgagccggtttaaatccataacaagtcaaaatacatctcaatctcacccaatacacttcaatacacatgtaatatcaataaccgaacaagccctaatagtttttagagatatggtgatgattatgatgatgattaatctcagtttttttcctttgaaagtaattagcatggtctttgcttgagattttgttctcttttcaaaacgatatgcatgcgaaatggaggtgatgtttttttttgaacggttgtttcaaagcaatatgaaaacataaaggtagtgatgttcttcaaaa

SEQ ID NO: 42060 - DNA, 374 bp, Zea Mays
aaaatttcagcactcatccgcctcgtgaaaggcagagcacgcgcaaaagccaccaccgcgtcgtcgtctccaagcaagcgaagagcgcctcccctccccctcgagatcttctctccctccccgcgccgctatggacgctgttgactcggtggtcgacccgctccgcgagttcgccaaggacagcatccgcctcgtcaagcgctgccacaagcccgaccgcaaggagttcaccaaggtcgccgcgcgcactgcgatcggcttcatcgtcatgggattcgtcggcttctttgtcaagctcatcttcatccccatcaacaacatcatcgtcggctccggctgatccatgcccctcagttctttttttttcaatccgc

SEQ ID NO: 42061 - DNA, 493 bp, Zea Mays
aaaatttcagcactcatccgcctcgtgaaaggcagagcacgcgcaaaagccaccaccgcgtcgtcgtctccaagcaagcgaagagcgcctcccctccccctcgagatcttctctccctccccgcgccgctatggacgctgttgactcggtggtcgacccgctccgcgagttcgccaaggacagcatccgcctcgtcaagcgctgccacaagcccgaccgcaaggagttcaccaaggtcgccgcgcgcactgcgatcggcttcatcgtcatgggattcgtcggcttctttgtcaagctcatcttcatccccatcaacaacatcatcgtcggctccggctgatccatgcccctcaggagtggacaatggcgtctccgccttggaggcgcagctctggcatccggaaagcagtttgtttagacatacgaacctgcgtgcatttctactggttttaacaaaaagtgcacatcaccaattttggaacattgaagagag

SEQ ID NO: 42062 - DNA, 2377 bp, Zea Mays
atccgggagagaggggaagttaaaacagcagggcgatctgtactgtaccttccttccctgctgctccgccgtgatcgcgatccccttttgatcaatgaccccgggaggcacggcacgggccgcccggccggatcacactcctcaaagccgagcagaaagccccgcccgcccggcgcccggacgtccgattttattatataaatatcggcgctcccccgcaacggccaccgcttcctcgtcctcctcctcctcgtttcgctcacgagaaagcacgcaaacgcggtcctcgctcgagatcccccaccgcccgccccctaaagcctcgcggcgccgaccccgaccccccgtggatccaccctgcgcgcggcctctagagctagtccagatccgcggggcgcgcgccctcaccatcatcacatcgcgcgcccagctagccgcgccttggaggcaaggcatcgtgcgtgccaccgtacgtccaccgatcggtctcgatctcgggccctcccgctgacgccttcggctggcctaataggggcgccgccgggggatcggaggggggcgccgccgtcatgtggaaggggaagaagagcgggcctctggcgccgcggggccggaagcgggagttccccattcgtgcggcggactacgagctgctcgagcctatcggcgacggcgccaccgccgtcgtccgccgggcgcgctgcctgccgcacggcggcgagatcgtcgccgtcaaggtcatgaacatggcgcaccgcaccgagtccgacgtgaacaatgcctcagaggaagtgaagaccatgatcatgatcgaccacccaaaccttctcagcgcgtactgctcgttcacggaaggcgaagccctgtggatcgtaatgccctacatggccggaggttcgtgctaccacctgatgaaatcgtcgtaccccaagggattcgacgacgagaacttcatcgcgttcgtgctgcgcgaaacgctgaaaggtctggagtaccttcatgagaacggccacatacatcgggatgtaaaggctggaaacatactgcttgatcaagataaaggagtcaaactatcggattttggagttaccgccagcctttatgactcaataatcaatagacacggcaaaaggaagacacttgttgggacgccttgttggatggcccctgaagttatggagcaaaaggattacgatttcaaggcggatatttggtcatttggcattactgcacttgaacttgctattggtcatgcaccattttctagccaacctccagcaaaggtttttctcatgacgttgcaacatgcccctccatcacttcataacacgaaggagaagaagttttcagactcttttaaaagtatgattgccacttgtctcattaaagacccaacaaagaggccacctgcaaaaaagctattaaaacacccatttttcagaagagcaaggtcagaccataatgccgtgaaatgtatgctaaataagttgccgtcattggctgagcgaatgcaatttataaaggaaaacgaggcgaagttgcaggcagataaaaaacctcttgataactgcaaagagaaagcatcacaggaagagtatagaagaggtgtgagtgagtggaatttcgatattgcagatttaaaagcacaagcggcattgtaccccgatgagaacgaagcagaagacttcttacgttttctatttgaactggacattgttgatgaaacaacccagttaaaagatattagagcagaaagtcactctataaataatgatggaacggaaaatcaaattcaacaagtccgatgtcttcatcccaaagtgtgaaacagcttgataaaggaagtcctaatggccttgtgcgcagtgaatcatttgaaattcattccatatcacccgctaagcaactgacaacagcagtttctacgtgcaacgatgttgatgaatatttagagaaaacagcttttcagaagggtcgttttaaggtgatacatgattatagcaagcttgaaggagcaacgccaagagagaaggaattattagatcgtataagtagtttagagcaaatgcttcttgctacccaagacgaagttgagaggcttaaagcaaaggagtcataaggagcagaaggatgactgcaacaacaatagtagtgaagtggaagttaaattcaactgttacctagagcttgtaatgatagaaagcagttgtagtacgttttaaccataaaagagtacactaagttgatccgatggattatctattagaaatcatttgcgcattatgtattattttcaaatatttcttagatatttcctttcttattagatggatttaaaaatgagatttgttatatatgatggtctagtgttatgatg

SEQ ID NO: 42063 - DNA, 2419 bp, Zea Mays
atccgggagagaggggaagttaaaacagcagggcgatctgtactgtaccttccttccctgctgctccgccgtgatcgcgatccccttttgatcaatgaccccgggaggcacggcacgggccgcccggccggatcacactcctcaaagccgagcagaaagccccgcccgcccggcgcccggacgtccgattttattatataaatatcggcgctcccccgcaacggccaccgcttcctcgtcctcctcctcctcgtttcgctcacgagaaagcacgcaaacgcggtcctcgctcgagatcccccaccgcccgccccctaaagcctcgcggcgccgaccccgaccccccgtggatccaccctgcgcgcggcctctagagctagtccagatccgcggggcgcgcgccctcaccatcatcacatcgcgcgcccagctagccgcgccttggaggcaaggcatcgtgcgtgccaccgtacgtccaccgatcggtctcgatctcgggccctcccgctgacgccttcggctggcctaataggggcgccgccgggggatcggaggggggcgccgccgtcatgtggaaggggaagaagagcgggcctctggcgccgcggggccggaagcgggagttccccattcgtgcggcggactacgagctgctcgagcctatcggcgacggcgccaccgccgtcgtccgccgggcgcgctgcctgccgcacggcggcgagatcgtcgccgtcaaggtcatgaacatggcgcaccgcaccgagtccgacgtgaacaatgcctcagaggaagtgaagaccatgatcatgatcgaccacccaaaccttctcagcgcgtactgctcgttcacggaaggcgaagccctgtggatcgtaatgccctacatggccggaggttcgtgctaccacctgatgaaatcgtcgtaccccaagggattcgacgacgagaacttcatcgcgttcgtgctgcgcgaaacgctgaaaggtctggagtaccttcatgagaacggccacatacatcgggatgtaaaggctggaaacatactgcttgatcaagataaaggagtcaaactatcggattttggagttaccgccagcctttatgactcaataatcaatagacacggcaaaaggaagacacttgttgggacgccttgttggatggcccctgaagttatggagcaaaaggattacgatttcaaggcggatatttggtcatttggcattactgcacttgaacttgctattggtcatgcaccattttctagccaacctccagcaaaggtttttctcatgacgttgcaacatgcccctccatcacttcataacacgaaggagaagaagttttcagactcttttaaaagtatgattgccacttgtctcattaaagacccaacaaagaggccacctgcaaaaaagctattaaaacacccatttttcagaagagcaaggtcagaccataatgccgtgaaatgtatgctaaataagttgccgtcattggctgagcgaatgcaatttataaaggaaaacgaggcgaagttgcaggcagataaaaaacctcttgataactgcaaagagaaagcatcacaggaagagtatagaagaggtgtgagtgagtggaatttcgatattgcagatttaaaagcacaagcggcattgtaccccgatgagaacgaagcagaagacttcttacgttttctatttgaactggacattgttgatgaaacaacccagttaaaagatattagagcagaaagtcactctataaataatgatggaacgaatgttgctgatgatggcttaggaaaatcaaattcaacaagtccgatgtcttcatcccaaagtgtgaaacagcttgataaaggaagtcctaatggccttgtgcgcagtgaatcatttgaaattcattccatatcacccgctaagcaactgacaacagcagtttctacgtgcaacgatgttgatgaatatttagagaaaacagcttttcagaagggtcgttttaaggtgatacatgattatagcaagcttgaaggagcaacgccaagagagaaggaattattagatcgtataagtagtttagagcaaatgcttcttgctacccaagacgaagttgagaggcttaaagcaaagggtaaatatgctataatgctgagtcataaggagcagaaggatgactgcaacaacaatagtagtgaagtggaagttaaattcaactgttacctagagcttgtaatgatagaaagcagttgtagtacgttttaaccataaaagagtacactaagttgatccgatggattatctattagaaatcatttgcgcattatgtattattttcaaatatttcttagatatttcctttcttattagatggatttaaaaatgagatttgttatatatgatggtctagtgttatgatg

SEQ ID NO: 42064 - DNA, 2301 bp, Zea Mays
atccgggagagaggggaagttaaaacagcagggcgatctgtactgtaccttccttccctgctgctccgccgtgatcgcgatccccttttgatcaatgaccccgggaggcacggcacgggccgcccggccggatcacactcctcaaagccgagcagaaagccccgcccgcccggcgcccggacgtccgattttattatataaatatcggcgctcccccgcaacggccaccgcttcctcgtcctcctcctcctcgtttcgctcacgagaaagcacgcaaacgcggtcctcgctcgagatcccccaccgcccgccccctaaagcctcgcggcgccgaccccgaccccccgtggatccaccctgcgcgcggcctctagagctagtccagatccgcggggcgcgcgccctcaccatcatcacatcgcgcgcccagctagccgcgccttggaggcaaggcatcgtgcgtgccaccgtacgtccaccgatcggtctcgatctcgggccctcccgctgacgccttcggctggcctaataggggcgccgccgggggatcggaggggggcgccgccgtcatgtggaaggggaagaagagcgggcctctggcgccgcggggccggaagcgggagttccccattcgtgcggcggactacgagctgctcgagcctatcggcgacggcgccaccgccgtcgtccgccgggcgcgctgcctgccgcacggcggcgagatcgtcgccgtcaaggtcatgaacatggcgcaccgcaccgagtccgacgtgaacaatgcctcagaggaagtgaagaccatgatcatgatcgaccacccaaaccttctcagcgcgtactgctcgttcacggaaggcgaagccctgtggatcgtaatgccctacatggccggaggttcgtgctaccacctgatgaaatcgtcgtaccccaagggattcgacgacgagaacttcatcgcgttcgtgctgcgcgaaacgctgaaaggtctggagtaccttcatgagaacggccacatacatcgggatgtaaaggctggaaacatactgcttgatcaagataaaggagtcaaactatcggattttggagttaccgccagcctttatgactcaataatcaatagacacggcaaaaggaagacacttgttgggacgccttgttggatggcccctgaagttatggagcaaaaggattacgatttcaaggcggatatttggtcatttggcattactgcacttgaacttgctattggtcatgcaccattttctagccaacctccagcaaaggtttttctcatgacgttgcaacatgcccctccatcacttcataacacgaaggagaagaagttttcagactcttttaaaagtatgattgccacttgtctcattaaagacccaacaaagaggccacctgcaaaaaagctattaaaacacccatttttcagaagagcaaggtcagaccataatgccgtgaaatgtatgctaaataagttgccgtcattggctgagcgaatgcaatttataaaggaaaacgaggcgaagttgcaggcagataaaaaacctcttgataactgcaaagagaaagcatcacaggaagagtatagaagaggtgtgagtgagtggaatttcgatattgcagatttaaaagcacaagcggcattgtaccccgatgagaacgaagcagaagacttcttacgttttctatttgaactggacattgttgatgaaacaacccagttaaaagatattagagcagaaagtcactctataaataatgatggaacgaatgttgctgatgatggcttaggaaaatcaaattcaacaagtccgatgtcttcatcccaaagtttctacgtgcaacgatgttgatgaatatttagagaaaacagcttttcagaagggtcgttttaaggtgatacatgattatagcaagcttgaaggagcaacgccaagagagaaggaattattagatcgtataagtagtttagagcaaatgcttcttgctacccaagacgaagttgagaggcttaaagcaaaggagtcataaggagcagaaggatgactgcaacaacaatagtagtgaagtggaagttaaattcaactgttacctagagcttgtaatgatagaaagcagttgtagtacgttttaaccataaaagagtacactaagttgatccgatggattatctattagaaatcatttgcgcattatgtattattttcaaatatttcttagatatttcctttcttattagatggatttaaaaatgagatttgttatatatgatggtctagtgttatgatg

SEQ ID NO: 42065 - DNA, 1255 bp, Zea Mays
ggagcatatacgtggaatgatgattaatgtttctgtatattaatgtattttatcataacatgttggcgccataaaaaacgtacgggtatacacctagtgacacgcattaatactgggagtcggaatatcagatccatcatgaccttgagtaacagtgcattaatatatgaaaaaatgtccgtgagtcggtctagcacttagtatataacaacttgaatcgttcaacagaattgctgagttcattcatggagtatatatggacagaactcagagcaggcgtaggtctatgcctcactgacttgccaactcttgagaaaatgaggccaacgacattcctatttgccataactaacctatcgacctaccagctagatcaaattgcctgcataatccaataaccgtacagagtagggaacatagtatctactgagaattcgacggagatgaatgaaggcatgacaccgagcagacgccagggaacgtgcagatctacacacggcccgagggaaggagctgcggcgaggaagaaaaaaaagggggcaaatcttacctgcagcgacggcgatcgggatccaatctaatcgaagccgaagggcaaggcgaagagatggggcttcgttggtaggtgggcttacccttgcgtgctctcctcggcgggggctttgacggctcctttacctggctgtctggctctcctggggcagatccgtagagggcagggcagcgcgaggcgggaggctcgtgagcagcggcaatggccagcgggcatgaaaaggcgctcgtccttggccccctcctcgccttcggtggtatagagacggggcgttcaggagcgacgggcggagcgcacgaggcgaggacggggaggaatgcagggggagggcttgaaggagcaacgccaagagagaaggaattattagatcgtataagtagtttagagcaaatgcttcttgctacccaagacgaagttgagaggcttaaagcaaaggagtcataaggagcagaaggatgactgcaacaacaatagtagtgaagtggaagttaaattcaactgttacctagagcttgtaatgatagaaagcagttgtagtacgttttaaccataaaagagtacactaagttgatccgatggattatctattagaaatcatttgcgcattatgtattattttcaaatatttcttagatatttcctttcttattagatggatttaaaaatgagatttgttatatatgatggtctagtgttatgatg

SEQ ID NO: 42066 - DNA, 2325 bp, Zea Mays
cctctcttgtctcctatctcagaaaatgccgccgctctatctcagaaaacaccgcgacctctacctcacagaaataattgcctcccttcattggcctcatctctccctccctccttgacccatctgcgacttcccctgcattaaggatgacctcttctctctaggtcttacaaccctagacgtggaatcaggatcagtgtgcacggggaaccagcaacggcagcacgtacgtggaaccggcaccgacgaattgcacggggcagcagacaatcgtcgcctccttgactccatccgcgaccttcctccatccgtggtgccagcaaactgcacgagaagacctaggtgactcggtgctagccacactattacaagatgcctcctagtcgtttgcaggttggaacaaaaacaacagaaggacataaccaagcaggaaacacattacatccatatgaagtgcagcgccttagacaagttatgagaaacaatgcaaggctgcaacaactgggaattcctggtttatgcgacacactgccaaaggcatattcctttcatcacaacaaaaataagccaaattttacaaataatgaagattcagaatctgattataatccttcatcaaatgacactggtgaagaagatttacttgatgatgacaatgttcagggctcgaaggattataatatgaggactacaaacatgtctaatggtgtaatcaagctacgcactaaaagacttcttgcagagaaagaatctattagaattacaaggtcaaaaaaaactgctgcccagcctaatggtactgaagtgtttgacaacaacgatggccatacccaggctacagttcaagctagtgaccctgctctatttgacgagtacacccacatggctaatggaggtcattccattgctcgccctgatgggcacaacctgatgggaaacaaagataatgtaaacatccaagttgatgacaacatgaccagtggaggtgaagctagcatcgagcctagtgtacatgtacaactaggtgaaaatgatcgatgggaaaggggagttaatatgggacatggtctccataggatgaaccgagctatgcgtggaaaactgccggttgttattcctgaagggaggataaggcccgtggcacctcttgttgctgcaaagttttcaactgaatgcaatattgcagttaggaaccatgtgccagtgtacaagcattggaaggattacaagaaccataatggcatgtttaacctatttacagataaacttagtgcaaagtttgatatcaacacaaatgatgcaccagtccaaaaggcttgttcccaaatgatgaaaaatgctataaggcaacaacgatcgatgagtaatgaagagtggaatgatcttgtggaatattggaagagcccaaaaaggatggagacatcacaaaagaacaaagataaccgatccaaagttaaatttcatcaaacaacgggatctcgtagctatatggttcatgtagaaaatttgggagataaaaacattggtcaagagcccgatgcattagatttgttcaaggagtgtcattacagcaggaaaaagaaatgttacacatctaccgtgcaacaagctataactcaaatggataacaagcggtctgcaactacagaaggtgaaaaatcaatgtctgcaactgaagttgttgctaatgtgcttgctgaaaatacaaagaagaatttgttccttcaaaatgtggggatacaaaatgttggtcctaggtctagtctgagaaatattgaagcacagttggaagtggagaagagggcaaacagtgaccttaaatctattgttgatgctcaacatgaacaattggatgcattgttaaagcaaatgcaagaaactgaagaaaataggatcagggagcaagaggaagtgaagaagaagcaagctgagatggaaacaaagatgcaacttgtgttgagtcagattcattcaagattgagatagtatttatgtcatgttgacaactttttttgttgttgcaacaactttctttcttttttatggaaccaactataatgttttggatatgatgtggtgttctggttggatagtctttattgtttgggattgtccatgtgaagttctagttggatatttgaatttaaatattgatattttgtcattataattgttatgttatgtgctgattgtgcttttgatgtgagaatgaaattattgaaaattattatgggctgtagttataaatggtcgataaaatttctagattttagccttggcaaaaataattaaactgaataaaataaatgcacaaattaaaatcaa

SEQ ID NO: 42067 - DNA, 2051 bp, Zea Mays
cagaaaatgccgccgctctatctcagaaaacaccgcgacctctacctcacagaaataattgcctcccttcattggcctcatctctccctccctccttgacccatctgcgacttcccctgcattaaggatgacctcttctctctaggtcttacaaccctagacgtggaatcaggatcagtgtgcacggggaaccagcaacggcagcacgtacgtggaaccggcaccgacgaattgcacggggcagcagacaatcgtcgcctccttgactccatccgcgaccttcctccatccgtggtgccagcaaactgcacgagaagacctaggtcaggtgactcggtgctagccacactattacaagatgcctcctagtcgtttgcaggttggaacaaaaacaacagaaggacataaccaagcaggaaacacattacatccatatgaagtgcagcgccttagacaagttatgagaaacaatgcaaggctgcaacaactgggaattcctggtttatgcgacacactgccaaaggcatattcctttcatcacaacaaaaataagccaaattttacaaataatgaagattcagaatctgattataatccttcatcaaatgacactggtgaagaagatttacttgatgatgacaatgttcagggctcgaaggattataatatgaggactacaaacatgtctaatggtgtaatcaagctacgcactaaaagacttcttgcagagaaagaatctattagaattacaaggtcaaaaaaaactgctgcccagcctaatggtactgaagtgtttgacaacaacgatggccatacccaggctacagttcaagctagtgaccctgctctatttgacgagtacacccacatggctaatggaggtcattccattgctcgccctgatgggcacaacctgatgggaaacaaaggcaaagtttgatatcaacacaaatgatgcaccagtccaaaaggcttgttcccaaatgatgaaaaatgctataaggcaacaacggtacagactaaagaaaaaattctttgatccttttccactacatttggtgacaaaaacatcaccaatcagatcgatgagtaatgaagagtggaatgatcttgtggaatattggaagagcccaaaaaggatggagacatcacaaaagaacaaagataaccgatccaaagttaaatttcatcaaacaacgggatctcgtagctatatggttcatgtagaaaatttgggagataaaaacattggtcaagagcccgatgcattagatttgttcaaggagtgtcattacagcaggaaaaagaaatgttacacatctaccgtgcaacaagctataactcaaatggataacaagcggtctgcaactacagaaggtgaaaaatcaatgtctgcaactgaagttgttgctaatgtgcttgctgaaaatacaaagaagaatttgttccttcaaaatgtggggatacaaaatgttggtcctaggtctagtctgagaaatattgaagcacagttggaagtggagaagagggcaaacagtgaccttaaatctattgttgatgctcaacatgaacaattggatgcattgttaaagcaaatgcaagaaactgaagaaaataggatcagggagcaagaggaagtgaagaagaagcaagctgagatggaaacaaagatgcaacttgtgttgagtcagattcattcaagattgagatagtatttatgtcatgttgacaactttttttgttgttgcaacaactttctttcttttttatggaaccaactataatgttttggatatgatgtggtgttctggttggatagtctttattgtttgggattgtccatgtgaagttctagttggatatttgaatttaaatattgatattttgtcattataattgttatgttatgtgctgattgtgcttttgatgtgagaatgaaattattgaaaattattatgggctgtagttataaatggtcgataaaatttctagattttagccttggcaaaaataattaaactgaataaaataaatgcacaaattaaaatcaa

SEQ ID NO: 42068 - DNA, 2030 bp, Zea Mays
ccgcgacctctacctcacagaaataattgcctcccttcattggcctcatctctccctccctccttgacccatctgcgacttcccctgcattaaggatgacctcttctctctaggtcttacaaccctagacgtggaatcaggatcagtgtgcacggggaaccagcaacggcagcacgtacgtggaaccggcaccgacgaattgcacggggcagcagacaatcgtcgcctccttgactccatccgcgaccttcctccatccgtggtgccagcaaactgcacgagaagacctaggttggaacaaaaacaacagaaggacataaccaagcaggaaacacattacatccatatgaagtgcagcgccttagacaagttatgagaaacaatgcaaggctgcaacaactgggaattcctggtttatgcgacacactgccaaaggcatattcctttcatcacaacaaaaataagccaaattttacaaataatgaagattcagaatctgattataatccttcatcaaatgacactggtgaagaagatttacttgatgatgacaatgttcagggctcgaaggattataatatgaggactacaaacatgtctaatggtgtaatcaagctacgcactaaaagacttcttgcagagaaagaatctattagaattacaaggtcaaaaaaaactgctgcccagcctaatggtactgaagtgtttgacaacaacgatggccatacccaggctacagttcaagctagtgaccctgctctatttgacgagtacacccacatggctaatggaggtcattccattgctcgccctgatgggcacaacctgatgggaaacaaaggcaaagtttgatatcaacacaaatgatgcaccagtccaaaaggcttgttcccaaatgatgaaaaatgctataaggcaacaacggtacagactaaagaaaaaattctttgatccttttccactacatttggtgacaaaaacatcaccaatcagatcgatgagtaatgaagagtggaatgatcttgtggaatattggaagagcccaaaaaggatggagacatcacaaaagaacaaagataaccgatccaaagttaaatttcatcaaacaacgggatctcgtagctatatggttcatgtagaaaatttggtaagttcatttaatagattgcagggatcgcataagtaataatattgcatctaactattatttctagggagataaaaacattggtcaagagcccgatgcattagatttgttcaaggagtgtcattacagcaggaaaaagaaatgttacacatctaccgtgcaacaagctataactcaaatggataacaagcggtctgcaactacagaaggtgaaaaatcaatgtctgcaactgaagttgttgctaatgtgcttgctgaaaatacaaagaagaatttgttccttcaaaatgtggggatacaaaatgttggtcctaggtctagtctgagaaatattgaagcacagttggaagtggagaagagggcaaacagtgaccttaaatctattgttgatgctcaacatgaacaattggatgcattgttaaagcaaatgcaagaaactgaagaaaataggatcagggagcaagaggaagtgaagaagaagcaagctgagatggaaacaaagatgcaacttgtgttgagtcagattcattcaagattgagatagtatttatgtcatgttgacaactttttttgttgttgcaacaactttctttcttttttatggaaccaactataatgttttggatatgatgtggtgttctggttggatagtctttattgtttgggattgtccatgtgaagttctagttggatatttgaatttaaatattgatattttgtcattataattgttatgttatgtgctgattgtgcttttgatgtgagaatgaaattattgaaaattattatgggctgtagttataaatggtcgataaaatttctagattttagccttggcaaaaataattaaactgaataaaataaatgcacaaattaaaatcaa

SEQ ID NO: 42069 - DNA, 2271 bp, Zea Mays
aataattgcctcccttcattggcctcatctctccctccctccttgacccatctgcgacttcccctgcattaaggatgacctcttctctctaggtcttacaaccctagacgtggaatcaggatcagtgtgcacggggaaccagcaacggcagcacgtacgtggaaccggcaccgacgaattgcacggggcagcagacaatcgtcgcctccttgactccatccgcgaccttcctccatccgtggtgccagcaaactgcacgagaagacctaggttggaacaaaaacaacagaaggacataaccaagcaggaaacacattacatccatatgaagtgcagcgccttagacaagttatgagaaacaatgcaaggctgcaacaactgggaattcctggtttatgcgacacactgccaaaggcatattcctttcatcacaacaaaaataagccaaattttacaaataatgaagattcagaatctgattataatccttcatcaaatgacactggtgaagaagatttacttgatgatgacaatgttcagggctcgaaggattataatatgaggactacaaacatgtctaatggtgtaatcaagctacgcactaaaagacttcttgcagagaaagaatctattagaattacaaggtcaaaaaaaactgctgcccagcctaatggtactgaagtgtttgacaacaacgatggccatacccaggctacagttcaagctagtgaccctgctctatttgacgagtacacccacatggctaatggaggtcattccattgctcgccctgatgggcacaacctgatgggaaacaaagataatgtaaacatccaagttgatgacaacatgaccagtggaggtgaagctagcatcgagcctagtgtacatgtacaactaggtgaaaatgatcgatgggaaaggggagttaatatgggacatggtctccataggatgaaccgagctatgcgtggaaaactgccggttgttattcctgaagggaggataaggcccgtggcacctcttgttgctgcaaagttttcaactgaatgcaatattgcagttaggaaccatgtgccagtgtacaagcattggaaggattacaagaaccataatggcatgtttaacctatttacagataaacttagtgcaaagtttgatatcaacacaaatgatgcaccagtccaaaaggcttgttcccaaatgatgaaaaatgctataaggcaacaacggtacagactaaagaaaaaattctttgatccttttccactacatttggtgacaaaaacatcaccaatcagatcgatgagtaatgaagagtggaatgatcttgtggaatattggaagagcccaaaaaggatggagacatcacaaaagaacaaagataaccgatccaaagttaaatttcatcaaacaacgggatctcgtagctatatggttcatgtagaaaatttgggagataaaaacattggtcaagagcccgatgcattagatttgttcaaggagtgtcattacagcaggaaaaagaaatgttacacatctaccgtgcaacaagctataactcaaatggataacaagcggtctgcaactacagaaggtgaaaaatcaatgtctgcaactgaagttgttgctaatgtgcttgctgaaaatacaaagaagaatttgttccttcaaaatgtggggatacaaaatgttggtcctaggtctagtctgagaaatattgaagcacagttggaagtggagaagagggcaaacagtgaccttaaatctattgttgatgctcaacatgaacaattggatgcattgttaaagcaaatgcaagaaactgaagaaaataggatcagggagcaagaggaagtgaagaagaagcaagctgagatggaaacaaagatgcaacttgtgttgagtcagattcattcaagattgagatagtatttatgtcatgttgacaactttttttgttgttgcaacaactttctttcttttttatggaaccaactataatgttttggatatgatgtggtgttctggttggatagtctttattgtttgggattgtccatgtgaagttctagttggatatttgaatttaaatattgatattttgtcattataattgttatgttatgtgctgattgtgcttttgatgtgagaatgaaattattgaaaattattatgggctgtagttataaatggtcgataaaatttctagattttagccttggcaaaaataattaaactgaataaaataaatgcacaaattaaaatcaa

SEQ ID NO: 42070 - DNA, 2034 bp, Zea Mays
cctgcccttgcccccgccccgtatctctcgctgtctacgcccaccaacggatccgctctcccatggaaggaaactctccaccgcgtccatggaagccgcccggatctgcgtgcgcaccatctctctcgcccccgacccgtctctctcgctgcccagccacgttcgctctccaccgcgcagatcctcgcttcgcaatcaacgctcccttgacttaccagttaccacaccaacccaaccccgactctccatggaaggcgcgacgaccgagacccagctctccatggaaggcgtcaacatgccctcgtccccgctcgcccacgcatgcgcgcgcccacgtggctgggcagctcccgcaccctagcctgtgccttcgccacgccctcgcccacgccaacccctgcctctctcccgccgcgtccgcgttccggatctgtcgcctcccgccgcgccctgcctccctctcccaaccttgccagcaggaccaccgtcggcgatgcctccctcctgtcgcaccttacctcctcatcccgacctctccaccacgcccatgtccccattgtcgctcgtgctgggcccgtgccagactcatccacgccgctgatgtagagcgtgcgctaggcgagggggtgagtgcgtgaccgagatagaggctgcgacaacctccccggccaccttgccatctccatcgtcctcggggccaatgctggtagaggcactttggttcctggatgacctacaaggaatgggagatggtgggtaagcgtggggtgtagatccttccaggctcagatcgatttcttcgttcgctggagcattccttaatgcatttggatcaattgttctcaatgcgcctgttggaatcaagtaagttacattcagaaagaatttgaccttccattgttagtttgcatatgatgtagcagcggtaaaactagatctcgatgaaagtcattgacatgtgcaactaactgttagaaaagtgtactgattcgaagtatgtttagctatagtttttatctttgtacctcctcttttagatagagttagattgcatcagatatcttctctcttgtattcccaattgcaaagtaatattggttccatctctgttgggtaatggaaagaatagatgttgatcggtttgtgccatatcctaagaaaacaaaatatacgcgagttgtggtggatgctctgtagtcaatgtagtaatgccccagatcagtgttgttcctttaaagtttaaactatattttgcttgtgattaaatttgcagatcacttccactgagatgattaattttgccatttgtatcatacctaaattaagaaaaataatattgtgttgattaactgcaggagttattacctcagcttattcttagagttgtcacatattgccatgcccttcataagagttgagtgtcctacttccgggtgcccatgattggaaggtctcttgggttgattttctcagggactacacaatcactaggctggaaattagcttatacttgcatgagctcaccttgtcatttgtggaagcattcactgtctcctgataagggtgagcttcacatctttagaacagacacgttgaaggaaatgagtatccgagtaccaagaacgaaagaagagcttttggatataaatggcctctacaagtaatgcagctactctgccttttttgaatgaattatgtatgctgccatccttttgttttcaaaaagggcttggtcccggtttgttcctttctttgttttttctcgaacgtttcttgtcgcggtctcatggtggttgctataactcaatctccagttcacagtagggttgaacaaagtataaggggcaggttgactcttctcacttgaaacgaaaattgcaggggctatgttgtgtaatggtaatatagtgtcacatcaaaccattgtccctgactcagttcatgctattcatgtgtgacatgtgtccagactttagagatcagatactatatgtggcttgtgtttttggctggtcacatcccctcttttctttt

SEQ ID NO: 42071 - DNA, 1826 bp, Zea Mays
ctctcgctgtctacgcccaccaacggatccgctctcccatggaaggaaactctccaccgcgtccatggaagccgcccggatctgcgtgcgcaccatctctctcgcccccgacccgtctctctcgctgcccagccacgttcgctctccaccgcgcagatcctcgcttcgcaatcaacgctcccttgacttaccagttaccacaccaacccaaccccgactctccatggaaggcgcgacgaccgagacccagctctccatggaaggcgtcaacatgccctcgtccccgctcgcccacgcatgcgcgcgcccacgtggctgggcagctcccgcaccctagcctgtgccttcgccacgccctcgcccacgccaacccctgcctctctcccgccgcgtccgcgttccggatctgtcgcctcccgccgcgccctgcctccctctcccaaccttgccagcaggaccaccgtcggcgatgcctccctcctgtcgcaccttacctcctcatcccgacctctccaccacgcccatgtccccattgtcgctcgtgctgggcccgtgccagactcatccacgccgctgatgtagagcgtgcgctaggcgagggggtgagtgcgtgaccgagatagaggctgcgacaacctccccggccaccttgccatctccatcgtcctcggggccaatgctggtagaggcactttggttcctggatgacctacaaggaatgggagatggtgggtaagcgtggggtgtagatccttccaggctcagatcgatttcttcgttcgctggtgagttacctaggcaagctgaacgggatggttcaagagcgcgcaagatcgatctaacaaaataactcagatctgtttgtgtgtcagctcgacaaacagatctgagtgtcagctcgacaaactcatgcttgttgtcggcacctaaaaaatagtgaagcgggtgaaagtgaaggttgtttgcccctcataatgttccatgaaaccgaacaacagtcaaactgttagttgtgagttatataggatctgtttattttcctattttcatttctctgattttactacacatctttttccccacccattccaggagcattccttaatgcatttggatcaattgttctcaatgcgcctgttggaatcaagagttattacctcagcttattcttagagttgtcacatattgccatgcccttcataagagttgagtgtcctacttccgggtgcccatgattggaaggtctcttgggttgattttctcagggactacacaatcactaggctggaaattagcttatacttgcatgagctcaccttgtcatttgtggaagcattcactgtctcctgataagggtgagcttcacatctttagaacagacacgttgaaggaaatgagtatccgagtaccaagaacgaaagaagagcttttggatataaatggcctctacaagtaatgcagctactctgccttttttgaatgaattatgtatgctgccatccttttgttttcaaaaagggcttggtcccggtttgttcctttctttgttttttctcgaacgtttcttgtcgcggtctcatggtggttgctataactcaatctccagttcacagtagggttgaacaaagtataaggggcaggttgactcttctcacttgaaacgaaaattgcaggggctatgttgtgtaatggtaatatagtgtcacatcaaaccattgtccctgactcagttcatgctattcatgtgtgacatgtgtccagactttagagatcagatactatatgtggcttgtgtttttggctggtcacatcccctcttttctttt

SEQ ID NO: 42072 - DNA, 2093 bp, Zea Mays
ctctcgctgtctacgcccaccaacggatccgctctcccatggaaggaaactctccaccgcgtccatggaagccgcccggatctgcgtgcgcaccatctctctcgcccccgacccgtctctctcgctgcccagccacgttcgctctccaccgcgcagatcctcgcttcgcaatcaacgctcccttgacttaccagttaccacaccaacccaaccccgactctccatggaaggcgcgacgaccgagacccagctctccatggaaggcgtcaacatgccctcgtccccgctcgcccacgcatgcgcgcgcccacgtggctgggcagctcccgcaccctagcctgtgccttcgccacgccctcgcccacgccaacccctgcctctctcccgccgcgtccgcgttccggatctgtcgcctcccgccgcgccctgcctccctctcccaaccttgccagcaggaccaccgtcggcgatgcctccctcctgtcgcaccttacctcctcatcccgacctctccaccacgcccatgtccccattgtcgctcgtgctgggcccgtgccagactcatccacgccgctgatgtagagcgtgcgctaggcgagggggtgagtgcgtgaccgagatagaggctgcgacaacctccccggccaccttgccatctccatcgtcctcggggccaatgctggtagaggcactttggttcctggatgacctacaaggaatgggagatggtgggtaagcgtggggtgtagatccttccaggctcagatcgatttcttcgttcgctgctcgacaaacagatctgagtgtcagctcgacaaactcatgcttgttgtcggcacctaaaaaatagtgaagcgggtaatgatgtcaatttggtcttgcatccaactatttcaataaatgaaaatacagtacatgtcatagctgcattctgggtgccatcctcgatcatggaaaacaacattctctatcaaattatatctcctcatgtaagcagatgtagcctcttcttctgtagtgtgattagtttgaacattgatacagaattaaacatgcagtaggctattattctcttttatgcaggatggtgctcaaattttgaaaaatagaggtaggtgatccaattatattttactaccatggttcattgagaggcttgcttgtggacattccttttgtggtattttttctatatattgctattgactcatgtcataaatcagttagttatattttgctttgttgatggaactccatgaggtgacaacataatgtttcatttgcaaatttaggtgaaagtgaaggttgtttgcccctcataatgttccatgaaaccgaacaacagtcaaactgttagttgagcattccttaatgcatttggatcaattgttctcaatgcgcctgttggaatcaagagttattacctcagcttattcttagagttgtcacatattgccatgcccttcataagagttgagtgtcctacttccgggtgcccatgattggaaggtctcttgggttgattttctcagggactacacaatcactaggctggaaattagcttatacttgcatgagctcaccttgtcatttgtggaagcattcactgtctcctgataagggtgagcttcacatctttagaacagacacgttgaaggaaatgagtatccgagtaccaagaacgaaagaagagcttttggatataaatggcctctacaagtaatgcagctactctgccttttttgaatgaattatgtatgctgccatccttttgttttcaaaaagggcttggtcccggtttgttcctttctttgttttttctcgaacgtttcttgtcgcggtctcatggtggttgctataactcaatctccagttcacagtagggttgaacaaagtataaggggcaggttgactcttctcacttgaaacgaaaattgcaggggctatgttgtgtaatggtaatatagtgtcacatcaaaccattgtccctgactcagttcatgctattcatgtgtgacatgtgtccagactttagagatcagatactatatgtggcttgtgtttttggctggtcacatcccctcttttctttt

SEQ ID NO: 42073 - DNA, 2530 bp, Zea Mays
ctctcgctgtctacgcccaccaacggatccgctctcccatggaaggaaactctccaccgcgtccatggaagccgcccggatctgcgtgcgcaccatctctctcgcccccgacccgtctctctcgctgcccagccacgttcgctctccaccgcgcagatcctcgcttcgcaatcaacgctcccttgacttaccagttaccacaccaacccaaccccgactctccatggaaggcgcgacgaccgagacccagctctccatggaaggcgtcaacatgccctcgtccccgctcgcccacgcatgcgcgcgcccacgtggctgggcagctcccgcaccctagcctgtgccttcgccacgccctcgcccacgccaacccctgcctctctcccgccgcgtccgcgttccggatctgtcgcctcccgccgcgccctgcctccctctcccaaccttgccagcaggaccaccgtcggcgatgcctccctcctgtcgcaccttacctcctcatcccgacctctccaccacgcccatgtccccattgtcgctcgtgctgggcccgtgccagactcatccacgccgctgatgtagagcgtgcgctaggcgagggggtgagtgcgtgaccgagatagaggctgcgacaacctccccggccaccttgccatctccatcgtcctcggggccaatgctggtagaggcactttggttcctggatgacctacaaggaatgggagatggtgggtaagcgtggggtgtagatccttccaggctcagatcgatttcttcgttcgctggtgagttacctaggcaagctgaacgggatggttcaagagcgcgcaagatcgatctaacaaaataactcagatctgtttgtgtgtcagctcgacaaacagatctgagtgtcagctcgacaaactcatgcttgttgtcggcacctaaaaaatagtgaagcgggtaatgatgtcaatttggtcttgcatccaactatttcaataaatgaaaatacagtacatgtcatagctgcattctgggtgccatcctcgatcatggaaaacaacattctctatcaaattatatctcctcatgtaagcagatgtagcctcttcttctgtagtgtgattagtttgaacattgatacagaattaaacatgcagtaggctattattctcttttatgcaggatggtgctcaaattttgaaaaatagaggtaggtgatccaattatattttactaccatggttcattgagaggcttgcttgtggacattccttttgtggtattttttctatatattgctattgactcatgtcataaatcagttagttatattttgctttgttgatggaactccatgaggtgacaacataatgtttcatttgcaaatttaggtgaaagtgaaggttgtttgcccctcataatgttccatgaaaccgaacaacagtcaaactgttagttgtgagttatataggatctgtttattttcctattttcatttctctgattttactacacatctttttccccacccattccaggagcattccttaatgcatttggatcaattgttctcaatgcgcctgttggaatcaagtaagttacattcagaaagaatttgaccttccattgttagtttgcatatgatgtagcagcggtaaaactagatctcgatgaaagtcattgacatgtgcaactaactgttagaaaagtgtactgattcgaagtatgtttagctatagtttttatctttgtacctcctcttttagatagagttagattgcatcagatatcttctctcttgtattcccaattgcaaagtaatattggttccatctctgttgggtaatggaaagaatagatgttgatcggtttgtgccatatcctaagaaaacaaaatatacgcgagttgtggtggatgctctgtagtcaatgtagtaatgccccagatcagtgttgttcctttaaagtttaaactatattttgcttgtgattaaatttgcagatcacttccactgagatgattaattttgccatttgtatcatacctaaattaagaaaaataatattgtgttgattaactgcaggagttattacctcagcttattcttagagttgtcacatattgccatgcccttcataagagttgagtgtcctacttccgggtgcccatgattggaaggtctcttgggttgattttctcagggactacacaatcactaggctggaaattagcttatacttgcatgagctcaccttgtcatttgtggaagcattcactgtctcctgataagggtgagcttcacatctttagaacagacacgttgaaggaaatgagtatccgagtaccaagaacgaaagaagagcttttggatataaatggcctctacaagggctatgttgtgtaatggtaatatagtgtcacatcaaaccattgtccctgactcagttcatgctattcatgtgtgacatgtgtccagactttagagatcagatactatatgtggcttgtgtttttggctggtcacatcccctcttttctttt

SEQ ID NO: 42074 - DNA, 1901 bp, Zea Mays
ggcacacacgtgggcatctgcctctctcgtttcggtgctattcgccccccaaactccggacgagccttccgcgcgacgctgcacggctccgccagccacccgtaaaaccctagacggctagccggcgcacggaagcgggcagcggagcggaggtgagcctctcctgcatcggattgtccccgcccccgctaggcgccatgaagctgacggtgaagaccctcaagggaacgcacttcgagatccgggtgcagcccaacgacacgattatggctgtgaagaagaatatagaagagatacaagggaaagacagctatccatggggccaacaactgctgattttcaatggaaaggtcttgaaagatgaaagtacattggaagagaataaagtcaatgaggatgggtttctagttgtcatgcttagtaagggtaaaacatctggttcaactggaacttcatcttcccagcactcaaacactcctgcaacaaggcaggcacctcctctagaggccccacaacaagctcctcaacccccggtggcaccaattacaacttctcagcctgaaggacttcctgcacaggcacctaacacacatgacaatgcggcatcaaatcttctgtctggaaggaatgttgacacaataattaaccagctaatggagatgggtgggggcagttgggacaaagataaagtccaaagggctctccgtgccgcttacaacaaccccgaacgtgctgttgaatacctctactcttaacagctgaaattgctgttccaattggtggtcaaggggcaaacacaactgatcgagctcctactggggaagctggtctctctgggattccaaacaccgctccactagatcttttcccgcagggggcttccaatgctggaggtggtgctggtggtggaccacttgattttcttagaaacaatccacagtttcaagcagttagggaaatggtccatacaaatccacaaattttgcagcctatgctcgttgagttgagcaagcagaatcctcaaattctaaggttgattgaggagaatcatgatgagtttcttcagttactaaatgagccctttgaaggcggagagggggatttcttagaccaacctgaggaggatgaaatgcctcatgccattagtgttacaccagaggagcaggaggccattggacggcttgagtccatggggttcgacagagcacgcgttattgaagcattcttagcctgcgataggaacgaggagctagcagcaaactatctccttgagcatgctggtgaggaagattaagcgggagtagttttcatacgtaccgagtgacgaagagttgatatggagctgacgatcatttgaattgatttcgttgtgcaagacttgtattacataaacatttaaatacatgtagctgaacatttcagtagaaatgctacggttgtggtctcccatcgttgactttcattagcgtggtggtaaacatcggttctgctcctgtcctgtattaacacaagcttggcttgggaggaagcacaaggagctattgccacctagcaaaaggataaaagggaggatgacgaattggcgatgtgtttgcgacacgctgccctcaagtgtggatgatgagtgcagataggttgatgactgtgccaaggctgtcaagtgtgtaaacgaacgctgccttcgtagttctgacaactgcgacagttctgtagctagacctatttgctatcttcatgataaaattatctaaatgggacggtccttgaccgattaattgcacgatctaaggtgagaaaaagtacataatcgcttggattgcgtcaggtatgaaaacgctttgcatcccatttcacagggtgcagcttagtagcttttcctcaaccgatgccaggcaaatgca

SEQ ID NO: 42075 - DNA, 1912 bp, Zea Mays
cacacacgtgggcatctgcctctctcgtttcggtgctattcgccccccaaactccggacgagccttccgcgcgacgctgcacggctccgccagccacccgtaaaaccctagacggctagccggcgcacggaagcgggcagcggagcggaggtgagcctctcctgcatcggattgtccccgcccccgctaggcgccatgaagctgacggtgaagaccctcaagggaacgcacttcgagatccgggtgcagcccaacgacacgattatggctgtgaagaagaatatagaagagatacaagggaaagacagctatccatggggccaacaactgctgattttcaatggaaaggtcttgaaagatgaaagtacattggaagagaataaagtcaatgaggatgggtttctagttgtcatgcttagtaagggtaaaacatctggttcaactggaacttcatcttcccagcactcaaacactcctgcaacaaggcaggcacctcctctagaggccccacaacaagctcctcaacccccggtggcaccaattacaacttctcagcctgaaggacttcctgcacaggcacctaacacacatgacaatgcggcatcaaatcttctgtctggaaggaatgttgacacaataattaaccagctaatggagatgggtgggggcagttgggacaaagataaagtccaaagggctctccgtgccgcttacaacaaccccgaacgtgctgttgaatacctctactctggtattccagtaacagctgaaattgctgttccaattggtggtcaaggggcaaacacaactgatcgagctcctactggggaagctggtctctctgggattccaaacaccgctccactagatcttttcccgcagcagggggcttccaatgctggaggtggtgctggtggtggaccacttgattttcttagaaacaatccacagtttcaagcagttagggaaatggtccatacaaatccacaaattttgcagcctatgctcgttgagttgagcaagcagaatcctcaaattctaaggttgattgaggagaatcatgatgagtttcttcagttactaaatgagccctttgaaggcggagagggggatttcttagaccaacctgaggaggatgaaatgcctcatgccattagtgttacaccagaggagcaggaggccattggacggcttgagtccatggggttcgacagagcacgcgttattgaagcattcttagcctgcgataggaacgaggagctagcagcaaactatctccttgagcatgctggtgaggaagattaagcgggagtagttttcatacgtaccgagtgacgaagagttgatatggagctgacgatcatttgaattgatttcgttgtgcaagacttgtattacataaacatttaaatacatgtagctgaacatttcagtagaaatgctacggttgtggtctcccatcgttgactttcattagcgtggtggtaaacatcggttctgctcctgtcctgtattaacacaagcttggcttgggaggaagcacaaggagctattgccacctagcaaaaggataaaagggaggatgacgaattggcgatgtgtttgcgacacgctgccctcaagtgtggatgatgagtgcagataggttgatgactgtgccaaggctgtcaagtgtgtaaacgaacgctgccttcgtagttctgacaactgcgacagttctgtagctagacctatttgctatcttcatgataaaattatctaaatgggacggtccttgaccgattaattgcacgatctaaggtgagaaaaagtacataatcgcttggattgcgtcaggtatgaaaacgctttgcatcccatttcacagggtgcagcttagtagcttttcctcaaccgatgccaggcaaatgca

SEQ ID NO: 42076 - DNA, 1906 bp, Zea Mays
tgcctctctcgtttcggtgctattcgccccccaaactccggacgagccttccgcgcgacgctgcacggctccgccagccacccgtaaaaccctagacggctagccggcgcacggaagcgggcagcggagcggaggtgagcctctcctgcatcggattgtccccgcccccgctaggcgccatgaagctgacggtgaagaccctcaagggaacgcacttcgagatccgggtgcagcccaacgacacgattatggctgtgaagaagaatatagaagagatacaagggaaagacagctatccatggggccaacaactgctgattttcaatggaaaggtcttgaaagatgaaagtacattggaagagaataaagtcaatgaggatgggtttctagttgtcatgcttagtaagggtaaaacatctggttcaactggaacttcatcttcccagactcaaacactcctgcaacaaggcaggcacctcctctagaggccccacaacaagctcctcaacccccggtggcaccaattacaacttctcagcctgaaggacttcctgcacaggcacctaacacacatgacaatgcggcatcaaatcttctgtctggaaggaatgttgacacaataattaaccagctaatggagatgggtgggggcagttgggacaaagataaagtccaaagggctctccgtgccgcttacaacaaccccgaacgtgctgttgaatacctctactctggtattccagtaacagctgaaattgctgttccaattggtggtcaaggggcaaacacaactgatcgagctcctactggggaagctggtctctctgggattccaaacaccgctccactagatcttttcccgcagcagggggcttccaatgctggaggtggtgctggtggtggaccacttgattttcttagaaacaatccacagtttcaagcagttagggaaatggtccatacaaatccacaaattttgcagcctatgctcgttgagttgagcaagcagaatcctcaaattctaaggttgattgaggagaatcatgatgagtttcttcagttactaaatgagccctttgaaggcggagagggggatttcttagaccaacctgaggaggatgaaatgcctcatgccattagtgttacaccagaggagcaggaggccattggacggcttgagtccatggggttcgacagagcacgcgttattgaagcattcttagcctgcgataggaacgaggagctagcagcaaactatctccttgagcatgctggtgaggaagattaagcgggagtagttttcatacgattttttttagtaccgagtgacgaagagttgatatggagctgacgatcatttgaattgatttcgttgtgcaagacttgtattacataaacatttaaatacatgtagctgaacatttcagtagaaatgctacggttgtggtctcccatcgttgactttcattagcgtggtggtaaacatcggttctgctcctgtcctgtattaacacaagcttggcttgggaggaagcacaaggagctattgccacctagcaaaaggataaaagggaggatgacgaattggcgatgtgtttgcgacacgctgccctcaagtgtggatgatgagtgcagataggttgatgactgtgccaaggctgtcaagtgtgtaaacgaacgctgccttcgtagttctgacaactgcgacagttctgtagctagacctatttgctatcttcatgataaaattatctaaatgggacggtccttgaccgattaattgcacgatctaaggtgagaaaaagtacataatcgcttggattgcgtcaggtatgaaaacgctttgcatcccatttcacagggtgcagcttagtagcttttcctcaaccgatgccaggcaaatgca

SEQ ID NO: 42077 - DNA, 946 bp, Zea Mays
aggttcgtggtgacaccagctaacgcttcgtggggaagcgcccagcatttgggtgtgccaagccacgacggcagggcgtcgcagtccggcgtgccgcggtggccgcggacggtgttcctggtgggcgccatgtcgtgcctggccatcagcgcgacggcccacctgctggcgtgccactcgcggcgcgccagcgtggtgttctggcagctcgactacgcgggcatctccgtgatgatcgtcgcctccttcgtgccgccggtgtactacgccttcctctgccacccgccggcgcgggcggcctacctgtccgccatcgcggcgctgggcgcgctcgtggtggccgcgctgctctccccgtcctgctcgtccccgcgctaccgccgcctccgcgcggcgctgttcctggccatgggcctgtcgggcgtcgtcccggcgctgcacgcgctgtggctcaactggggccacgccgcctgctacctggcgctcggcctcgaggtcgccatgggtctcgcctacgccacgggcgcctggttctacgtcagccgcgtgccggagaagtggaggcccggtgtgttcgacgtcgtgggccacagccaccagatcttccacgtgctcgtgctcgtcggcgccgtcacgcactacgtcgccgtcgccgtgctcatccactggcgggagaaggtggctgccgcctgtggcgcggcgtcgtaggcaggcggggcttgctgctcctggcttctgcagcaagccagctgaggtgtttgatcatccagagcttcaatgtgccagtgcgatggattcaacaagcgttcgaatcggcgaacgaagtagttgcagttgcagttgcagcatagatcggctctagagttcgacgatttgtaatttaattgatgggatgattgagtatggtggttcactaatttatgttgagatttatctaaaaaataaa

SEQ ID NO: 42078 - DNA, 915 bp, Zea Mays
ctttattagagatgaattattggtgatccgcatatttttgttagggttgattgatccgaagaaacagtattggggaccacctgccattgttttgtgaatgaattagtggtaatagaataaacatagaaggcactttctgtttgccgtgttccgcaaggaagagagctagttatagatctttccgagtgtacagtttatttggagggaagaaggataaagatgagaatggcgatgaagcgccatcgaaagcagggatttttggaaacatgcaaaatctctatgaaactgttaagaaggcccaaatggttgtccaagttgaggctgtccgggtgcagaaggagcttgcagcgttacactttctggaaaccagcaacctattagagttgaaatcacagaagctgcaatggagttgggtgctgaaaaactttcggagctggtcaatgatgcatacaaggatgcgcatcaacggagcgtccaggccatgaaagagaggatgtctgacttggcacagagcttaggaatgcctgcgggccttggtgatggtctcaagtgatgctgcctgccattcgggaagcctttctaataatttttttccctcaattttgaatacgagccgtgtgggcacctctcgtagtcacgtagtaagaagtgtactcgtgaccagctgtttcgttcagcgttagctgtgattttgttttgtacaagcagatatatttgcactaaatcgtggtaacgtcgtcctatggaactcggatatcacatgtggtatgctaatctgcaagatataggggatatgcaccgaaaccaatttaaatcgtgtgataaatgatgtacattgtgtgtgtaacaaattaatgaattatgtttttttatacacccttttttttaacgtgaacgtaagggaccagattgtaa

SEQ ID NO: 42079 - DNA, 883 bp, Zea Mays
attggggaccacctgccattgttttgtgaatgaattagtggtaatagaataaacatagaaggcactttctgtttgccgtgttccgcaaggaagagagctagttatagatctttccgagtgtacagtttatttggagggaagaaggataaagatgagaatggcgatgaagcgccatcgaaaggatttttggaaacatgcaaaatctctatgaaactgttaagaaggcccaaatggttgtccaagttgaggctgtccgggtgcagaaggagcttgcagcgactgagattgatggttattgtgaaggtgaactaatcaaggttacactttctggaaaccagcaacctattagagttgaaatcacagaagctgcaatggagttgggtgctgaaaaactttcggagctggtcaatgatgcatacaaggatgcgcatcaacggagcgtccaggccatgaaagagaggatgtctgacttggcacagagcttaggaatgcctgcgggccttggtgatggtctcaagtgatgctgcctgccattcgggaagcctttctaataatttttttccctcaattttgaatacgagccgtgtgggcacctctcgtagtcacgtagtaagaagtgtactcgtgaccagctgtttcgttcagcgttagctgtgattttgttttgtacaagcagatatatttgcactaaatcgtggtaacgtcgtcctatggaactcggatatcacatgtggtatgctaatctgcaagatataggggatatgcaccgaaaccaatttaaatcgtgtgataaatgatgtacattgtgtgtgtaacaaattaatgaattatgtttttttatacacccttttttttaacgtgaacgtaagggaccagattgtaa

SEQ ID NO: 42080 - DNA, 1335 bp, Zea Mays
ctctctcactccttatcccttctctatccgccagagggaaatacccattgatctcatctcatgccctgttgccgcgcctgctcctccttccccatccgcgcccaccgccgcccctccggcagccccgccacgagcccacccgcaagcttcccgcacggccaccgctgcctggtatcaatcaaaccagtcgtccgtcctcctttccttcaaatcaagtccatttccactccctgtctaccctctccctcgtctctggtgggcggtggcctcgcctccctttccccgtcgccctgatggctccctccgcagctctcgctccggtggccttccgctccgccttctcgactccgctcgcgtcgaaccctacccgtaatagaataaacatagaaggcactttctgtttgccgtgttccgcaaggaagagagctagttatagatctttccgagtgtacagtttatttggagggaagaaggataaagatgagaatggcgatgaagcgccatcgaaagcagggatttttggaaacatgcaaaatctctatgaaactgttaagaaggcccaaatggttgtccaagttgaggctgtccgggtgcagaaggagcttgcagcgttacactttctggaaaccagcaacctattagagttgaaatcacagaagctgcaatggagttgggtgctgaagataagtttcatattcatgtgtgagaagacattgatgtttcatataaggaaggtactcaattcattagttcgaaaggaaaatagggaacccccaccattttgcacccttgtattagaaaaaaaagatgcatcttgtatcaaactcggttacgtataaagaaactttcggagctggtcaatgatgcatacaaggatgcgcatcaacggagcgtccaggccatgaaagagaggatgtctgacttggcacagagcttaggaatgcctgcgggccttggtgatggtctcaagtgatgctgcctgccattcgggaagcctttctaataatttttttccctcaattttgaatacgagccgtgtgggcacctctcgtagtcacgtagtaagaagtgtactcgtgaccagctgtttcgttcagcgttagctgtgattttgttttgtacaagcagatatatttgcactaaatcgtggtaacgtcgtcctatggaactcggatatcacatgtggtatgctaatctgcaagatataggggatatgcaccgaaaccaatttaaatcgtgtgataaatgatgtacattgtgtgtgtaacaaattaatgaattatgtttttttatacacccttttttttaacgtgaacgtaagggaccagattgtaa

SEQ ID NO: 42081 - DNA, 1072 bp, Zea Mays
ctctctcactccttatcccttctctatccgccagagggaaatacccattgatctcatctcatgccctgttgccgcgcctgctcctccttccccatccgcgcccaccgccgcccctccggcagccccgccacgagcccacccgcaagcttcccgcacggccaccgctgcctggtatcaatcaaaccagtcgtccgtcctcctttccttcaaatcaagtccatttccactccctgtctaccctctccctcgtctctggtgggcggtggcctcgcctccctttccccgtcgccctgatggctccctccgcagctctcgctccggtggccttccgctccgccttctcgactccgctcgcgtcgaaccctacccggatttttggaaacatgcaaaatctctatgaaactgttaagaaggcccaaatggttgtccaagttgaggctgtccgggtgcagaaggagcttgcagcgactgagattgatggttattgtgaaggtgaactaatcaaggttacactttctggaaaccagcaacctattagagttgaaatcacagaagctgcaatggagttgggtgctgaaaaactttcggagctggtcaatgatgcatacaaggatgcgcatcaacggagcgtccaggccatgaaagagaggatgtctgacttggcacagagcttaggaatgcctgcgggccttggtgatggtctcaagtgatgctgcctgccattcgggaagcctttctaataatttttttccctcaattttgaatacgagccgtgtgggcacctctcgtagtcacgtagtaagaagtgtactcgtgaccagctgtttcgttcagcgttagctgtgattttgttttgtacaagcagatatatttgcactaaatcgtggtaacgtcgtcctatggaactcggatatcacatgtggtatgctaatctgcaagatataggggatatgcaccgaaaccaatttaaatcgtgtgataaatgatgtacattgtgtgtgtaacaaattaatgaattatgtttttttatacacccttttttttaacgtgaacgtaagggaccagattgtaa

SEQ ID NO: 42082 - DNA, 1172 bp, Zea Mays
ctctctcactccttatcccttctctatccgccagagggaaatacccattgatctcatctcatgccctgttgccgcgcctgctcctccttccccatccgcgcccaccgccgcccctccggcagccccgccacgagcccacccgcaagcttcccgcacggccaccgctgcctggtatcaatcaaaccagtcgtccgtcctcctttccttcaaatcaagtccatttccactccctgtctaccctctccctcgtctctggtgggcggtggcctcgcctccctttccccgtcgccctgatggctccctccgcagctctcgctccggtggccttccgctccgccttctcgactccgctcgcgtcgaaccctacccgtaatagaataaacatagaaggcactttctgtttgccgtgttccgcaaggaagagagctagttatagatctttccgagtgtacagtttatttggagggaagaaggataaagatgagaatggcgatgaagcgccatcgaaaggatttttggaaacatgcaaaatctctatgaaactgttaagaaggcccaaatggttgtccaagttgaggctgtccgggtgcagaaggagcttgcagcgttacactttctggaaaccagcaacctattagagttgaaatcacagaagctgcaatggagttgggtgctgaaaaactttcggagctggtcaatgatgcatacaaggatgcgcatcaacggagcgtccaggccatgaaagagaggatgtctgacttggcacagagcttaggaatgcctgcgggccttggtgatggtctcaagtgatgctgcctgccattcgggaagcctttctaataatttttttccctcaattttgaatacgagccgtgtgggcacctctcgtagtcacgtagtaagaagtgtactcgtgaccagctgtttcgttcagcgttagctgtgattttgttttgtacaagcagatatatttgcactaaatcgtggtaacgtcgtcctatggaactcggatatcacatgtggtatgctaatctgcaagatataggggatatgcaccgaaaccaatttaaatcgtgtgataaatgatgtacattgtgtgtgtaacaaattaatgaattatgtttttttatacacccttttttttaacgtgaacgtaagggaccagattgtaa

SEQ ID NO: 42083 - DNA, 1401 bp, Zea Mays
ctctctctcgtggagacgactgggccgccgtcgttgctgccctacgcggctacgcccaggtcttcttcgggcccttagccgcgacgagcgccaccagggagtagaagaggttaaccttctggttggaaacgatgtacttcgaaggctatggcttccgtggaagtactttcgagcagacatatcgctgctatcctgcgtctttcatcgacaagccacaacttgaggccggtgacaaaattataatgccaccatcagctcttgatcgtcttgcatctctgcatattgaataccctatgctatttgaagtccacaatgcagcagcagaacggacttcgcattgtggtgttctggagttcattgcagaagaaggcatgatctacatgccatattggatgatgcaaaatcttcttttgcaagagggagatatggtgttcataaaaaatgccaacctccccaagggcacatatgtgaagttgcagcctcatacaacagactttctagatatttcaaaccccaaagcaatcttggagaaaactttgcggaacttttcttgtctaactacaggtgacagcattatggttgcatataataacaagaagtactacattgatatagtagagacaaagccctccaatgctataagtattattgagaccgattgtgaggttgactttgctccaccacttgactacaaagaacctgagccagtaaaacctgctgttcctgcaagcacggagcctggtaccgacgttccagctgaagaagaaccaaagttcatccccttcactggttcaggaaggcgcttggatgggaagccttccaaagataaagatgtgctagcctcttcccctgcaaagcgacaagctaatgcgaccaacggtgtacagccttcaacagccaccacatcacagggcagttcatcgcgtaaggccacaggaaaacttgtctttggctctggtggtaaccgagccgaaaaggcacctgaaaaggaagcagaggagcccaagaaagaagacccaaaattcgcagcattcacaggaaagaaatactcactgaagggctgaataaataggaagacaatgtattatcagtatttccggtgacggacattctcagggagaagcgcttaccaaccctgttatgtgggagggtctttcggtgggatagtggtctctgtttctcctgaactattacccttgtgtagttgtgtcagccacaccggagcaactgatgtataaagccgctcttgtccgataatggatttctgttgagcttgcatgtacattttctaaaaagataactgaaatcgccaaaaaaactacaaatactatctagaattctgttgaaattttagattttatttgcacttatctttgtttcactctagctttgtcactgaga

SEQ ID NO: 42084 - DNA, 1096 bp, Zea Mays
cgcccaggtcttcttcgggcccttagccgcgacgagcgccaccagggagtagaagaggttaaccttctggttggaaacgatgtacttcgaaggctatggcttccgtggaagtactttcgagcagacatatcgctgctatcctgcgtctttcatcgacaagccacaacttgaggccggtgacaaaattataatgccaccatcagctcttgatcgtcttgcttggagaaaactttgcggaacttttcttgtctaactacaggtgacagcattatggttgcatataataacaagaagtactacattgatatagtagagacaaagccctccaatgctataagtattattgagaccgattgtgaggttgactttgctccaccacttgactacaaagaacctgagccagtaaaacctgctgttcctgcaagcacggagcctggtaccgacgttccagctgaagaagaaccaaagttcatccccttcactggttcaggaaggcgcttggatgggaagccttccaaagataaagatgtgctagcctcttcccctgcaaagcgacaagctaatgcgaccaacggtgtacagccttcaacagccaccacatcacagggcagttcatcgcgtaaggccacaggaaaacttgtctttggctctggtggtaaccgagccgaaaaggcacctgaaaaggaagcagaggagcccaagaaagaagacccaaaattcgcagcattcacaggaaagaaatactcactgaagggctgaataaataggaagacaatgtattatcagtatttccggtgacggacattctcagggagaagcgcttaccaaccctgttatgtgggagggtctttcggtgggatagtggtctctgtttctcctgaactattacccttgtgtagttgtgtcagccacaccggagcaactgatgtataaagccgctcttgtccgataatggatttctgttgagcttgcatgtacattttctaaaaagataactgaaatcgccaaaaaaactacaaatactatctagaattctgttgaaattttagattttatttgcacttatctttgtttcactctagctttgtcactgaga

SEQ ID NO: 42085 - DNA, 1280 bp, Zea Mays
cgcccaggtcttcttcgggcccttagccgcgacgagcgccaccagggagtagaagaggttaaccttctggttggaaacgatgtacttcgaaggctatggcttccgtggaagtactttcgagcagacatatcgctgctatcctgcgtctttcatcgacaagccacaacttgaggccggtgacaaaatccacaatgcagcagcagaacggacttcgcattgtggtgttctggagttcattgcagaagaaggcatgatctacatgccatattggatgatgcaaaatcttcttttgcaagagggagatatggtgttcataaaaaatgccaacctccccaagggcacatatgtgaagttgcagcctcatacaacagactttctagatatttcaaaccccaaagcaatcttggagaaaactttgcggaacttttcttgtctaactacaggtgacagcattatggttgcatataataacaagaagtactacattgatatagtagagacaaagccctccaatgctataagtattattgagaccgattgtgaggttgactttgctccaccacttgactacaaagaacctgagccagtaaaacctgctgttcctgcaagcacggagcctggtaccgacgttccagctgaagaagaaccaaagttcatccccttcactggttcaggaaggcgcttggatgggaagccttccaaagataaagatgtgctagcctcttcccctgcaaagcgacaagctaatgcgaccaacggtgtacagccttcaacagccaccacatcacagggcagttcatcgcgtaaggccacaggaaaacttgtctttggctctggtggtaaccgagccgaaaaggcacctgaaaaggaagcagaggagcccaagaaagaagacccaaaattcgcagcattcacaggaaagaaatactcactgaagggctgaataaataggaagacaatgtattatcagtatttccggtgacggacattctcagggagaagcgcttaccaaccctgttatgtgggagggtctttcggtgggatagtggtctctgtttctcctgaactattacccttgtgtagttgtgtcagccacaccggagcaactgatgtataaagccgctcttgtccgataatggatttctgttgagcttgcatgtacattttctaaaaagataactgaaatcgccaaaaaaactacaaatactatctagaattctgttgaaattttagattttatttgcacttatctttgtttcactctagctttgtcactgaga

SEQ ID NO: 42086 - DNA, 1233 bp, Zea Mays
cagcttcatggcacatatgactatatgtcgtagttcgttatgagccacaacttgaggccggtgacaaaattataatgccaccatcagctcttgatcgtcttgcatctctgcatattgaataccctatgctatttgaagtccacaatgcagcagcagaacggacttcgcattgtggtgttctggagttcattgcagaagaaggcatgatctacatgccatattggatgatgcaaaatcttcttttgcaagagggagatatggtgttcataaaaaatgccaacctccccaagggcacatatgtgaagttgcagcctcatacaacagactttctagatatttcaaaccccaaagcaatcttggagaaaactttgcggaacttttcttgtctaactacaggtgacagcattatggttgcatataataacaagaagtactacattgatatagtagagacaaagccctccaatgctataagtattattgagaccgattgtgaggttgactttgctccaccacttgactacaaagaacctgagccagtaaaacctgctgttcctgcaagcacggagcctggtaccgacgttccagctgaagaagaaccaaagttcatccccttcactggttcaggaaggcgcttggatgggaagccttccaaagataaagatgtgctagcctcttcccctgcaaagcgacaagctaatgcgaccaacggtgtacagccttcaacagccaccacatcacagggcagttcatcgcgtaaggccacaggaaaacttgtctttggctctggtggtaaccgagccgaaaaggcacctgaaaaggaagcagaggagcccaagaaagaagacccaaaattcgcagcattcacaggaaagaaatactcactgaagggctgaataaataggaagacaatgtattatcagtatttccggtgacggacattctcagggagaagcgcttaccaaccctgttatgtgggagggtctttcggtgggatagtggtctctgtttctcctgaactattacccttgtgtagttgtgtcagccacaccggagcaactgatgtataaagccgctcttgtccgataatggatttctgttgagcttgcatgtacattttctaaaaagataactgaaatcgccaaaaaaactacaaatactatctagaattctgttgaaattttagattttatttgcacttatctttgtttcactctagctttgtcactgaga

SEQ ID NO: 42087 - DNA, 1475 bp, Zea Mays
tttttttggggtatctagtattttgcgtaaaagaggagcatgggagaggtgtgtgtcgtgtgtgtcagttttttttaatccgcgggttcagtgtatttaaaaggctcccccgggcacgacgccgctctgctctggttcgccttccacctccaccggctccacgcgccccacaccccgttcctttccttccttccactcgccttcgcctcccttccctcgcttctccacctctctctctctccctcacgccgccgacgttccgttttcctcggcccgcgagctgagcagagcagagctgcggcctgcgacggaggccactatggcggcatcatcggcggacgagctggtggcagcagccgccggcatcatctgctcgatgcgcggggccgacctcgccgccggctgggcgccgccgcggcgcaagcagcaggagccggcgcgggagggagcgctgatctggccggcggtggcgcgggggaagcggtcgcgccgccgctcgccgtccgcgggcttctcctcctcgggcaaggcgcggtgggggggcagggccagcccggcgtcgaccctcgactacagcggcggctccggctccggctccgggtccgctcccgcgtctaccagcggcggcgaggacggtggcttctgctccctgccccaccgacccgtacgaccagcggcaaggcacgtgccttgggacgctgacggctgacggctgacggctgacgcccacctcccccctgttcgtcttctgtctcctctcaactgccgccgccgccgccgtgctgaggctgccggagatgcagcagctggtgcggtcactcgccgtggacaacgagaggctccgcgaggagatgcgggatctacagggagcttgcgaggcgctgtccaaggaaaacgacgagcttgagacaaggttaggccaatcgagccgtcagagcgaggtcgcttcgaaggagcagagaggaaagggtctgcttgatccgcggcagcccgcacgggacagcttcgcgctacctgatctcaacctcccaccacaggactctgccgatgtctcaacagtttcattgatcgctccagatcgtttgcagctttgttaatcgaacaacaagtgtacagagaggaagcagggtagcagtctatgcatccgttcttttttatttgtcgcagtttagtttaaaaataaactagcggacggcaaattttcgagaactgtagtatttgataagttgttactagatcacagagttttatttcgactatagtcgtaagtgataagccacatctgtagctaaagggagctctaattttaactcacccgacattaattgttttcagatccagctgatcgccacactgtagtgtagtgggtttagatggattttattcatgttatttcgctcgattaggcgaagaaatgttacatgtgaagatctgaaattatgagaaataaaaccgttatttctgaatggttttat

SEQ ID NO: 42088 - DNA, 840 bp, Zea Mays
atgagagtcggtggtgtgcggtgcggccgaagctgggcccttccaccacggcttccgtgccgccaggtgggagccaccgaccggccgcagctcatcttcccgaccccgccgcttccacgcctcgccggccagcgaccgcggaagaaactgaggctgccggagatgcagcagctggtgcggtcactcgccgtggacaacgagaggctccgcgaggagatgcgggatctacagggagcttgcgaggcgctgtccaaggaaaacgacgagcttgagacaaggttaggccaatcgagccgtcagagcgaggtcgcttcgaaggagcagagaggaaagggtctgcttgatccgcggcagcccgcacgggacagcttcgcgctacctgatctcaacctcccaccacaggactctgccgatgtctcaacagtttcattgatcgctccagatcgtttgcagctttgttaatcgaacaacaagtgtacagagaggaagcagggtagcagtctatgcatccgttcttttttatttgtcgcagtttagtttaaaaataaactagcggacggcaaattttcgagaactgtagtatttgataagttgttactagatcacagagttttatttcgactatagtcgtaagtgataagccacatctgtagctaaagggagctctaattttaactcacccgacattaattgttttcagatccagctgatcgccacactgtagtgtagtgggtttagatggattttattcatgttatttcgctcgattaggcgaagaaatgttacatgtgaagatctgaaattatgagaaataaaaccgttatttctgaatggttttat

SEQ ID NO: 42089 - DNA, 719 bp, Zea Mays
gacaaagccaacaaaaaatctacctcattaggctgccggagatgcagcagctggtgcggtcactcgccgtggacaacgagaggctccgcgaggagatgcgggatctacagggagcttgcgaggcgctgtccaaggaaaacgacgagcttgagacaaggttaggccaatcgagccgtcagagcgaggtcgcttcgaaggagcagagaggaaagggtctgcttgatccgcggcagcccgcacgggacagcttcgcgctacctgatctcaacctcccaccacaggactctgccgatgtctcaacagtttcattgatcgctccagatcgtttgcagctttgttaatcgaacaacaagtgtacagagaggaagcagggtagcagtctatgcatccgttcttttttatttgtcgcagtttagtttaaaaataaactagcggacggcaaattttcgagaactgtagtatttgataagttgttactagatcacagagttttatttcgactatagtcgtaagtgataagccacatctgtagctaaagggagctctaattttaactcacccgacattaattgttttcagatccagctgatcgccacactgtagtgtagtgggtttagatggattttattcatgttatttcgctcgattaggcgaagaaatgttacatgtgaagatctgaaattatgagaaataaaaccgttatttctgaatggttttat

SEQ ID NO: 42090 - DNA, 3008 bp, Zea Mays
ctcacaaggaaaatcaaagcctaaaacctagtttctttacttagccgccacaaatctgtagaaaacatggaccatcaaaatcactccattaggttcacatacaataataatcagatcactaacacgacgatattgaccattcatcatccatctgatctgcgcatgtacatgctgctgctagtctgctactagtacagtgctctatatgttctgcttctgcaggacatgaaccaaaactcgtcgacgaacgcaaagcatccgcacgcaaaactaatcgcagcaaacaaactaaaaacacatccatggcctgccctcatcggccgccagggagagcgagcgagctcgatcgcagggccgggcgctagcgctagacggctacgcgacctcgacgaccacggccggcgtggacagccgcgacgagaagccgtggtagagcaggccgtcgccgcggtgggcgtggactccccgctgctgctgttgctcctcctcctccacgtcgaggtcgccctcgtcgaagttgagcgcgtagctgagcgggtcgtaccggaactccccgacgcccgcgcggcggcgccaccacgtccgctcgcccgggccgccgccctggccgaagcagcagcacacggtggccctcagcctgtgccgcagcgcgctcagcgacgacgacggcgacggcgactccatctcctcgactcctcctgctcctgctcgcgggctgaaggctgaagcgacagccgacagcgtcgggtcgggtactcaggtatctgcgctccgcttggcaggtcagtcaggggtcaggactagctagcgaacgtgattagtagccttgcttttttataattagccggcctgcgtttggttaaggtgggcgcgacgcaggttaaggccgggcgaggtggtcattaagtagtaagcatggccggtggtgccgtgccgtggtggtggtgggtgagactgagagggtcgcggcggcgcgcgttgcttgcgggtggggcggggtacggtgcggtgtggacgcaagttgcatgcgggacagttcggcacttcggcgatcctggtccgcaactgcggttattttctttttggaaggtattttgactagcaaataaatatgcatggccagctgttgcaacggggaaaataagctaacaaaacgctcttcgaaaacgacgacaggaatggtacattatatccttccctttctacaaaaattctatcttagcctgcgatttagatttattttctagtagccatggcgtggcgtccacaagatatataaaaaggtaacgctgcagcctaacgtcgaaataaaaatgtagttttagcagccttttttttattccatgcacgaaagttatcccatattaatacggaatttggaggccataggtcgatccgttgtacctaaaatatttgattttttttatgctgttatatctatatggatacaactatcaacccatctataaaagacaagataaacgatagaaaatatcttcattatctatattttatctacaaataaagagattgcagttggtggcatggtgctctcttctagtttgaccgataatatatagacagagatcaggtgcggagccggccctttttttttgcggttagcacatcccgataattttttaaatatctaatagaaaacagtgttaagaacaagagttttattgcgaagattcagtagaaaatattgatgaccccgataagatatttgctagctctgccactgatagagatgtcatatatagcttgctattggtttatgtgtcatgaagaacaaactgaagctgggctagacagacaacgactactcagtcataaacgacaacacgctggttgacctctaactctgtcatgtatgtttttagtttgtttttattttttttcaatattcggtcaataactccatgtcaggtacaatagaattaaataaggttgcagttttattatacatttttttcaaatttaaaatctaatatttcttgatctatttctaaacataaacatattacatgatatggtcaactatatttaatttaaaatataacgaatacaaaaatattatgtgttgatgagtcgagccatcgtatcaactgggtcaacaggttttgggcctatcgacctatttaagatttgacatagaccggatggacgtatctcttgtgggttgggtcaactacacacacatcactactcgacgccattggagacctcctaagaatcctggccaagccatccgccacaagcccatgcctgttgtcgcaatgaccattgacaaggattttgctcttttaggttgatttcctttacagctcgtcaaaatagcctagcattcgtctcactcgcttaattgctccactcaagcggcgcgcattagataaaataccccaatgcaactattaacatgtttttcatggatccagtaattcaaaatactacttttgaaaatatgagaaatacatcggtctacatttttagataacaaaacttcattagtgaatagtttgatattctctgaacatcgtaacttatgttagaaaaaatgctaataattttttatcactatttaacatttagtttttttaccattaaaattattatattatgtgatatttaatctatcaaaattattatgaaaacccattatatatttttctaagttaagttctaatattattgaaagggaaatgtgcttttgggccatttctaagtattttggtgattgagtgtcaacacaagtgtttaaatgtgaatctatgcccatggatgaacaaagtgcagatcacaagtaaaggtatgtttctaagccttggtacattggttttgtgtactaatatatttgtctaagtgctagaaacagaaagaagaagagttggctgtgtacagccaaaaggctgcttcggtctggggcaccggactgtccggtggtgcaccgaacagtgtccggtgcgccaggctacctcgggcgaagaggccgctctcgggaaattgcc

SEQ ID NO: 42091 - DNA, 1235 bp, Zea Mays
acagtaggttcattccccccaccacatcgaactgtgcgcgcgctgcgcggtcggtcgctcccctcctctgtccgcgatctcggctggccgcctgggcttggccctcgccaccgctcccgtctccggttccggcggccgagccagcgacgatgaaggacaagcgtgggctcgaggacgccggcgacgggcgccctgatgccaagaggccgcggcctccggctctggccaggtgaggagccctccggattccacttttggccttttgggcgtgtttagcttcgtgatgcgcatgagtggggagcactagcgggagccctactgacttacagtattgtacttgtacacaatcggaaacttggttctggattactttcccgctgatcttttatggtagtgagcgccagtggaaatggccccggcccccgtgtgttttttctcgtctcccacttgtcttgggtgacctcaactcgagctggaatcatcatcttcagtggctactggtctgtgcttagagcagcgtttagggtggtgtttggtgcaggctgttggacgattggctggaatgaactggtttgctggatcgtgggatttggaagaaatattgatctttgttgtgtgcgtggtagattttttatgcagtagccatagtcgcaactcatggaaccatgtgcctttgcatggaatattcatagtgagtgctaccttgtccaaaatggaaagtatttgtatcgttactgtcgacctaacggcctacgtgttagttggacacgagtaataacgtcggcaaattcggtaacgctccctgtttatttcaatagtttaagtaaccgctgtcgagtgtgcattaccaggtaagcaaaggaatcaagcccagcatggttggttaaagggtgtaatactgtagttcagtgattgcgtgctcagccaacacaagttcaagttctattcaatatggatttgggtgcctgtttcttcttaatgtaaagtcacttgatttttccaagtttggtgtacgtttccaggaagtatgtaaaaatctcaagtgaaattagagcatggtagcctatgcaaacatacaatgttggtgagtatgagtctagatggattcagggacacatggatttctgtagtacagtaagtaggaatagatttatctgtgtaataatcagtgttatagttcagttacatatacagtatacctgtattctatttgcaaacgcaagttgaagattgaa

SEQ ID NO: 42092 - DNA, 2262 bp, Zea Mays
ctgcgcggtcggtcgctcccctcctctgtccgcgatctcggctggccgcctgggcttggccctcgccaccgctcccgtctccggttccggcggccgagccaggtgaacgatctctccagtccgcgacgatgaaggacaagcgtgggctcgaggacgccggcgacgggcgccctgatgccaagaggccgcggcctccggctctggccagtgttattgttgaagcgttaaaggtggatagtctgcagaggctctgctcatcattggaaccaattcttcgtagagtagtcagtgaagaagtggagcgcgcactgggcaaacttggccctgcaacaatcggtggaaggccttccccaaagcgaattgaaggtccaaatggaagaactctgcaactcgaattccgaacaaggctgtcacttcccctttttactggaggaaaagttgaaggggagcagggagctgcaattcatgttgttttgtttgatgctggcactggctgtgttgtatcctctggaccagagtcgtctgccaaacttgacatcgttgttctagaaggtgatttcaacaatgaagatgaggagggctggaccggagaagagtttgacagtcacgttgtgaaggagcgtgagggaaagcggcctattttaactggtgatctacaagtcacactaaaagaaggtgtggggacagttggggagcttacattcacagataactctagctggataaggagtaggaaattcagacttggcttgaagattgcctcaggattttgtgagggtgttcgcattcgtgaggcaaaaacagaagcctttatggttaaggaccatagaggagaattacaagaagcactatccacctacactgaaagatgaggtctggaggttggaaaaaatagggaaggatgggtcattccataagaggctgaacaaatctggaatatctacagttgaggatttccttaggcttgtggttcgggatccacagaaattacgcagtatacttggaagtggtatgtccaacaaaatgtgggaaacccttgtggagcatgcaaagacttgtaccttaagtggaaaatattacatatactattctgatgagactagaagtattggtgctattttcaacaacatctatgcattctgtgggttgatttctggcgagcagttttattcatctgagagtcttgatgatagccaaaagctgtttgctgatgcattggtaaagaaagcatacgataactggatgtatgtcattgaatatgatggcaaaggtcttttgaaccctaaaccaaagaaaaagtctgcatccactggtcaagtggagacacatgctcctgcgggtggcccgacttcatatcaacaatacctctcttcgatgagcatgccagggccatcaccatcagggtatggcgtcgaccaaagcgcaacacatccatctcagctgcagagttcatccgccaatgtccaggcaccatatgatgacacattttcgttcttaccacctaacatgctgacagggtctgcaaatgatgccatgggtctggaactgggccagttgcagcaagtaacttctcaaggccagacaattcagccagcaaacgtgggatatggtgattggcccaggaaccgtgacagtcagtatcctgatgacttcactgaggacattcgcgttaagagccaccagttgctcgagggcgaggacatgcagcagctgctgagggtcttcagcatgggtggagcttctggcagtttgccagacgacaccttcaatttccagtcctacatgccctctccgttgcccaacctcgggttcgaaactgagcgtagccattcgtctggcaaagctgttgttggctggctcaagatcaaggcggcgatgaggtggggaatcttcgtcaggaagaaagctgccgagagaagggcgcagctagtcgaactggaggattgacaccgtggctttacaatggtcaaggttgccttgtagattactagtagttatctgcccccataccttcctgttaccgtttaaacaagtttctgaaactcttttctgaaatgtacaacgagtagttctactattttcttgtacagaattcaccttgttttgattgtgttagttgtggaacattgctctgctaagtttgacacatgactggacccgtatgcttgtgtatcttattttccatagctcttcagtgcagaatgtaccgcaacgatgcgaattaatccaaagattatgtgtacatgttgatgccttgccttt

SEQ ID NO: 42093 - DNA, 2093 bp, Zea Mays
cttcgtagagtatgaagaagtggagcgcgcactgggcaaacttggccctgcaacaatcggtggaaggccttccccaaagcgaattgaaggtccaaatggaagaactctgcaactcgaattccgaacaaggctgtcacttcccctttttactggaggaaaagttgaaggggagcagggagctgcaattcatgttgttttgtttgatgctggcactggctgtgttgtatcctctggaccagagtcgtctgccaaacttgacatcgttgttctagaaggtgatttcaacaatgaagatgaggagggctggaccggagaagagtttgacagtcacgttgtgaaggagcgtgagggaaagcggcctattttaactggtgatctacaagtcacactaaaagaaggtgtggggacagttggggagcttacattcacagataactctagctggataaggagtaggaaattcagacttggcttgaagattgcctcaggattttgtgagggtgttcgcattcgtgaggcaaaaacagaagcctttatggttaaggaccatagaggagaattgtacaagaagcactatccacctacactgaaagatgaggtctggaggttggaaaaaatagggaaggatgggtcattccataagaggctgaacaaatctggaatatctacagttgaggatttccttaggcttgtggttcgggatccacagaaattacgcagtgtaagtttgtgtgtgcagtgttattaacttattcttactatactttcatgtgttttggttgctgattataaatgctattctgtgatagatacttggaagtggtatgtccaacaaaatgtgggaaacccttgtggagcatgcaaagacttgtaccttaagtggaaaatattacatatactattctgatgagactagaagtattggtgctattttcaacaacatctatgcattctgtgggttgatttctggcgagcagttttattcatctgagagtcttgatgatagccaaaagctgtttgctgatgcattggtaaagaaagcatacgataactggatgtatgtcattgaatatgatggcaaaggtcttttgaaccctaaaccaaagaaaaagtctgcatccactggtcaagtggagacacatgctcctgcgggtggcccgacttcatatcaacaatacctctcttcgatgagcatgccagggccatcaccatcaggtggaactgattctgcagggtatggcgtcgaccaaagcgcaacacatccatctcagctgcagagttcatccgccaatgtccaggcaccatatgatgacacattttcgttcttaccacctaacatgctgacagggtctgcaaatgatgccatgggtctggaactgggccagttgcagcaagtaacttctcaaggccagacaattcagccagcaaacgtgggatatggtgattggcccaggaaccgtgacagtcagtatcctgatgacttcactgaggacattcgcgttaagagccaccagttgctcgagggcgaggacatgcagcagctgctgagggtcttcagcatgggtggagcttctggcagtttgccagacgacaccttcaatttccagtcctacatgccctctccgttgcccaacctcgggttcgaaactgagcgtagccattcgtctggcaaagctgttgttggctggctcaagatcaaggcggcgatgaggtggggaatcttcgtcaggaagaaagctgccgagagaagggcgcagctagtcgaactggaggattgacaccgtggctttacaatggtcaaggttgccttgtagattactagtagttatctgcccccataccttcctgttaccgtttaaacaagtttctgaaactcttttctgaaatgtacaacgagtagttctactattttcttgtacagaattcaccttgttttgattgtgttagttgtggaacattgctctgctaagtttgacacatgactggacccgtatgcttgtgtatcttattttccatagctcttcagtgcagaatgtaccgcaacgatgcgaattaatccaaagattatgtgtacatgttgatgccttgccttt

SEQ ID NO: 42094 - DNA, 1495 bp, Zea Mays
aaatcccccacagttccctttccctccgtccacccgcccttctccttcgttcccggctaagtggccaacggacgtgcgatccggcgcgcttcctcgccgtcgatcggaggccgagaggaatgtcaggggcggcatccgtgaaggaccgggccaccggcctcatcgacaagttcgtgctccgcgaggcccgcggcagctccgtcgaggtatatttatacggaggccaagtgacattttggaaaaacaacttcggtcagcaactgctttttatcagtaacaaggctacttttaaaccgccaaaagcagttcgtggtggtatccaaatttgcttccctcaactaggtaaccatggagttcttgaacagcatggatttgcaaggaaccggttttggagtgtcgatgaaagcccacctccttttccagttgctacttccaattgtcatgttgacttgatactcaagtcatctcccgaggatttgaagatctggccacatagttacgaatttcgtctgagagttgctctgagtccaaggggagatcttattcttacatctcgcataaaaaacatcagctcagacagcaagccattccaatttacatttgcataccacacctacttttcggtgtctgacatcagtgaagtgagggttgaaggtctggagaccttggactatcttgacaacctgcactccaagaaacgttttactgaacaaggagatgcggttgtattcgagtccgaagtggacaaggtgtatttgagtgctccgccgaaggttgcgatcatcgaccacgagaagaaaagaacgtttgtgttgagaaaagagggccttcctgacgttgtcgtttggaacccctgggacaagaaggacgaggggtacaagagcatgctgtgcgtcggggctgcggctattgagaagtcagtcactttaaagccaggcgaagagtggacagggaagcaggaaatttctgctgtgccgtccagttacagcagcgggcagttggaccctgaactgattcgtcgaatgcacacaatataaagtttacctgcgattgcatcctacgttccaaactagcctgtggttttttttttattattattattctgaagcagcactgggattggaatcatcaccctgttaattactagacaaattgggccgggggagtttttcatccatagctggggccggaggtgccattccgatccgtatacaatattctttttctctgtgtttttttggtattgtattgtaccactagtccgctgcaaaaggaagccccaagtttgtactgcatgtggcaaacaaaactaccaagatatactaattgagttgtataataaagcgtcacacgtttctttctgtgttgtctggagagaatggggattgtcacgctactgttagaacgctgaccaggaattccatttggcacggagagttttatctcacatcaagctgtgtagtacggcccgatacttctgaatgctacattgctt

SEQ ID NO: 42095 - DNA, 2944 bp, Zea Mays
ctgacctcttctcgccaagaagtaacagaaaaacgcagcccttccttccttgcttcccatgctcgcatcgcgtccttctcttcccgacttcctcgcgttcatttcttcaccccacccgcccccaaacgccaaatctaacagcaaaggtccggaaccttctagccgcacctagggtttggattggcgccgagcatggcgtacgtcgaccacgccttctccatctccgacgaggacgacctcgtcggcggcgccatggggggcccgcgcggggcgcccgtgaaggagatcgccttcgccgccgcgctgctcgccttcggggcgctcggtaccatcggtggcctgctaatggctgtcaaccgcgtcggaggggaccgcgcgcacggaattttcttcatgatgttgggcattgtaatgttcatccctgggttctactacacaaggatcgcctactatgcttacaaaggttacaagggtttctctttttcgaacatcccaccgatctgaaggagtgtgctgcctgcctgctggtcatgaagtggtgtcgctggtttaagagtttgtcgactctgtcgaatggctctgtagacacccttgttctacatctttctgtggccacattctctttgaacactctagaatgaactggtggatgtgtacagataaatgcagccatagttgtgctccatcgctgtttggccgattggaaggttgtttgttgtgctagtgtgaccatgttcaactgatacgcattgctacttgtgcattactatcgtttttgtcagggaccttaaatcattatatgggaataagatctcgtcgttccaattgtgaagaatatactactgcctccagtttcaaactgtcgtttttgtcagggaccttaaatcattctatgggaataagatctcgtcgttccaattgtgaagaatatactactgcctccagtttcaaattacaagttgtttagaacggccacacgggaccttaaatcattctagcagctggcaaacccaaggcgatggtggtggagtaatggagacaacacatgtagcggagttaaccacaaagtatacgagtgcctagctcttcactaggtggtgacagacaaaattgagatcaaactctgctaatttagccacccgttttgttatgtgcattacagtatgtttagtgtgttagcaattctattgatggaaaagatgcaaccagattgtatgcatcaagaaataaagttggatctttcgaggtgtgacagggaccgcagggagaagttttttgcatctctacagagtagataactagaattagctatagaggtcttggacaccacattaatactccaactagttgttagctaaattaagctaccacttagttcattagctagcttaacttatctaacaacttattcttacaagagagcctctaaacatgacattattttaaatataacgctctgtctgtcggacctaaatatagtacccatatacacgagccatgtctttgtttcctcttaatctctaaccatttattttctatagaattatttaaggtctaattgttcattcttttgaggctctaaacactataaatatagtcttatttcacattttaggtctctattttagagtttattgttgaggatgctcttagctgcataattattaactctttacacaactctagaagttttacacaactgtgatacataatgttttcttctcaagtttacacatggagtacgagagtcagtattatgtgaaacacaatagaagaaattacggaagaaaaaaatgtaaggactacttttgataacttcatttttctaagaattattattttttcaaaagaaaataaactatttttttaggaaaatgaaaaataacttcaaaatagaattgccaaactagctcaaagagaaaattagggtggaaattcttagaaacattttacctattatttcatagttttacaccgtaaaatgtttcacatgctgcttcttttatatgccctattaattaaggggatgttgggtttgtattactaatttttagtcactttattttaaaatagaagaacaaaataaaaaactaaaatttagttcttttacacctaacaccccattagttttgtgcattggttttataaggtaattcgaaattatatgtgtcacattaaaaaattgtacattttattttgcctgtaaaactaataggtagtaaaatgcaaattatttttacagaacgctttaaccaatcgctgacgcagcgttccagattaacggacgtaaataacgtttcgaaggcatgttatcatttctgtttcggttgcaaaaagaaaaaacagatgcgagcaacaaggagtcgaaccacccaaataaacagaaagtaaaacggatcaacaaacgatgtggccgcttgaaatttggacagggcagaaacgtgcattacgcctgacgcccccaccgtccgttcgtctaatgccgtccaaaagcaccaaatccaagaaaccaaaatattgggtgagttttgcatcgggggtgtggccaggtattgtggcttggaactaaaagaagatggatctccaaacaatcttctcctggctagaacgtcactatgggctccatgcggcagtcaggacgccattgaattggcgcctgctgttgactcaatattatcgagccggatctctctgatttgattctactccataccgagaaacacaatcaaatttcaaacgaacaaatcctacaaggcaaacagaatttctcccggggcgtgtactagattgagaaacagagggggaataaactccacccaggtagaaaaccaaaaagggagggcagtcaaaggagaaatgatatggagctatggtggggagaaatcctgcgacgacgaagcgtagtagaggcggcggccagctgccggcggctacaagtaacgag

SEQ ID NO: 42096 - DNA, 3223 bp, Zea Mays
ctgacctcttctcgccaagaagtaacagaaaaacgcagcccttccttccttgcttcccatgctcgcatcgcgtccttctcttcccgacttcctcgcgttcatttcttcaccccacccgcccccaaacgccaaatctaacagcaaaggtccggaaccttctagccgcacctagggtttggattggcgccgagcatggcgtacgtcgaccacgccttctccatctccgacgaggacgacctcgtcggcggcgccatggggggcccgcgcggggcgcccgtgaaggagatcgccttcgccgccgcgctgctcgccttcggggcgctcggtaccatcggtggcctgctaatggctgtcaaccgcgtcggaggggaccgcgcgcacggaattttcttcatgatgttgggcattgtaatgttcatccctgggttctactacacaaggatcgcctactatgcttacaaaggttacaagggtttctctttttcgaacatcccaccgatctgaaggagtgtgctgcctgcctgctggtcatgaagtggtgtcgctggtttaagagtttgtcgactctgtcgaatggctctgtagacacccttgttctacatctttctgtggccacattctctttgaacactctagaatgaactggtggatgtgtacagataaatgcagccatagttgtgctccatcgctgtttggccgattggaaggttgtttgttgtgctagtgtgaccatgttcaactgatacgcattgctacttgtgcattactatcgtttttgtcagggaccttaaatcattatatgggaataagatctcgtcgttccaattgtgaagaatatactactgcctccagtttcaaactgtcgtttttgtcagggaccttaaatcattctatgggaataagatctcgtcgttccaattgtgaagaatatactactgcctccagtttcaaattacaagttgtttagaacggccacacggtaactgggaagaatatactacttgctctaatttcaaattacaagttgtttagaacagcaacacactttccaaaatatagctttggacccatgttttttttttgctaaaactacatttgtactttagtaatagtactctttaaggtaaattggtacatataattattagattttaaaactaaataacaaaactattatttctagtcaaagttttataagtatgactcaaactttgtccaaaaatgacttttagttcgaaactgagtagtacattgctagggaccttaaatcattctagcagctggcaaacccaaggcgatggtggtggagtaatggagacaacacatgtagcggagttaaccacaaagtatacgagtgcctagctcttcactaggtggtgacagacaaaattgagatcaaactctgctaatttagccacccgttttgttatgtgcattacagtatgtttagtgtgttagcaattctattgatggaaaagatgcaaccagattgtatgcatcaagaaataaagttggatctttcgaggtgtgacagggaccgcagggagaagttttttgcatctctacagagtagataactagaattagctatagaggtcttggacaccacattaatactccaactagttgttagctaaattaagctaccacttagttcattagctagcttaacttatctaacaacttattcttacaagagagcctctaaacatgacattattttaaatataacgctctgtctgtcggacctaaatatagtacccatatacacgagccatgtctttgtttcctcttaatctctaaccatttattttctatagaattatttaaggtctaattgttcattcttttgaggctctaaacactataaatatagtcttatttcacattttaggtctctattttagagtttattgttgaggatgctcttagctgcataattattaactctttacacaactctagaagttttacacaactgtgatacataatgttttcttctcaagtttacacatggagtacgagagtcagtattatgtgaaacacaatagaagaaattacggaagaaaaaaatgtaaggactacttttgataacttcatttttctaagaattattattttttcaaaagaaaataaactatttttttaggaaaatgaaaaataacttcaaaatagaattgccaaactagctcaaagagaaaattagggtggaaattcttagaaacattttacctattatttcatagttttacaccgtaaaatgtttcacatgctgcttcttttatatgccctattaattaaggggatgttgggtttgtattactaatttttagtcactttattttaaaatagaagaacaaaataaaaaactaaaatttagttcttttacacctaacaccccattagttttgtgcattggttttataaggtaattcgaaattatatgtgtcacattaaaaaattgtacattttattttgcctgtaaaactaataggtagtaaaatgcaaattatttttacagaacgctttaaccaatcgctgacgcagcgttccagattaacggacgtaaataacgtttcgaaggcatgttatcatttctgtttcggttgcaaaaagaaaaaacagatgcgagcaacaaggagtcgaaccacccaaataaacagaaagtaaaacggatcaacaaacgatgtggccgcttgaaatttggacagggcagaaacgtgcattacgcctgacgcccccaccgtccgttcgtctaatgccgtccaaaagcaccaaatccaagaaaccaaaatattgggtgagttttgcatcgggggtgtggccaggtattgtggcttggaactaaaagaagatggatctccaaacaatcttctcctggctagaacgtcactatgggctccatgcggcagtcaggacgccattgaattggcgcctgctgttgactcaatattatcgagccggatctctctgatttgattctactccataccgagaaacacaatcaaatttcaaacgaacaaatcctacaaggcaaacagaatttctcccggggcgtgtactagattgagaaacagagggggaataaactccacccaggtagaaaaccaaaaagggagggcagtcaaaggagaaatgatatggagctatggtggggagaaatcctgcgacgacgaagcgtagtagaggcggcggccagctgccggcggctacaagtaacgag

SEQ ID NO: 42097 - DNA, 2324 bp, Zea Mays
cccttttctccgcggggctttccccctcacaaatcccaacccccttttccctccctttcttccctcaccgctgctcactcacccccaccagtcagcgatctcacacagtaacaactctctctctctctctccacctttttcactcccgttgctggctgctttgctcctctgctctccctctcctctctctcctccgctgcctttatctcacttcgccgccactcccagtcccagtcgtccctctctatctccatctctctatctctgcactgcactgctcacagtcacagctatagattctagaagccaacaaaaacagacgggagcggagaatcgtgctccgggaaaacaagagaatccacctcctctcccctcccctccccttcactctccagatctacgccggcggcggctggtgcgtccgtgctgctccgcggaggcggtgctgcgctgctagctggtcgtccgagagagcccggcccccgaccgagcgatgggggcggcgccggtcctcgtcctgctgctgctggtcgccgctgccgcattgccgcggcgggcaagcgcggccaccgacgccggcgacgtttctgctataaatggactttatgttgcacttggatcaccaaagctacctggatggtctgctagtggtggagatccctgtggtgagagttggcagggtgtcacatgtaccggctcaagtataacctcaatctaggcagcctggggaacttcacttcaataactgaaataaatcttagcaacaacaatatcggtggaagcataccggaagatctacctgtcacactgcagaatatctttctctcagataaccaactaactggaagcattccagtgtcattatcaaaactccatagtctaacagccatgtcactgaatgataaccatctagatggaaaactaccagatacatttgattccctcacagaacttgtaaatcttggtccattaccaccttcattgggaagcttgacatcactgactacattgcacatgcaggataatcaactatctgggacccttgatgtcttgcaggatctctccctcaaagatttaaatgtcgagaataatatgttttctggaccagttcctccgaagctgctcaacataccaaacttcaaaaatgatgggaatccttttaataccagcatagctccctccacctcaccctcttcacctacaggctcaccaacacaaacaccatcgtcctcttcatccccttcaggatctccttcaccatctaatgcagcatcaaactcttctagtggatctactgctcgaaatagcaattctacgtcatccaagaagaagaagccttcaaccctcagaactgttggatatgttcttcttgctattgtgctattcatagttcttgcgctactggtagtattttgcttgtccaagtatcaagaaagacagactagacgtgattattccatggctcaattaggtaggcatcagagggctgaggagccaaaaagcaagcaagcttcggtgcagtctagacatgatgccaaaaaaggtttatctgaagttcctgaaagaaagaaaccccgtgaaataaatttagctgtaccagttgccattgagaagcctcctgaaaagagaaaagagcatgtaattaatttggagcgaacagaatcagagatctttgctgcagcgcctcctccacctccacctccacctcctccacctccacctccgccaccaccaccctcaacaccgccacctccatctccacctccacgattgccatcaccacctcctgctgaaaaagtaactgtaaatcccattgtacgtccagtaaaaagagttaacactccgccaaggactggtccctcgacatctgcaacatccttttccgtggcatcacttcagcaatatacaaatagttttcaagagcaaaatttgataagggagagtagattgggaaaagtttatctggcagaacttcctgaagggaaattactggaagttatgaagattgataatgctaatggaagaataccagtagatgactttctagagttggttgcttgtatatcagatattagacaccctaacattcttgaattagttggatactgtgctgagtatgaacagaggttacttgtgtataaccacttcagtagaaaaacattacttgatgtactacatgaaggggaggatattgataatccattatcctggaatgctcgcctccagattgctcttcatgcagcaaaagccttagagtaagttgtattcaagctacatattacattcatgacctgtttgtgttaaacttagcttgccaagagatg

SEQ ID NO: 42098 - DNA, 2355 bp, Zea Mays
cccttttctccgcggggctttccccctcacaaatcccaacccccttttccctccctttcttccctcaccgctgctcactcacccccaccagtcagcgatctcacacagtaacaactctctctctctctctccacctttttcactcccgttgctggctgctttgctcctctgctctccctctcctctctctcctccgctgcctttatctcacttcgccgccactcccagtcccagtcgtccctctctatctccatctctctatctctgcactgcactgctcacagtcacagctatagattctagaagccaacaaaaacagacgggagcggagaatcgtgctccgggaaaacaagagaatccacctcctctcccctcccctccccttcactctccagatctacgccggcggcggctggtgcgtccgtgctgctccgcggaggcggtgctgcgctgctagctggtcgtccgagagagcccggcccccgaccgagcgatgggggcggcgccggtcctcgtcctgctgctgctggtcgccgctgccgcattgccgcggcgggcaagcgcggccaccgacgccggcgacgtttctgctataaatggactttatgttgcacttggatcaccaaagctacctggatggtctgctagtggtggagatccctgtggtgagagttggcagggtgtcacatgtaccggctcaagtataacctcaataattttcaatgctgcaaatttgggtggacagctaggcagcctggggaacttcacttcaataactgaaataaatcttagcaacaacaatatcggtggaagcataccggaagatctacctgtcacactgcagaatatctttctctcagataaccaactaactggaagcattccagtgtcattatcaaaactccatagtctaacagccatgtcactgaatgataaccatctagatggaaaactaccagatacatttgattccctcacagaacttgtaaatcttggtccattaccaccttcattgggaagcttgacatcactgactacattgcacatgcaggataatcaactatctgggacccttgatgtcttgcaggatctctccctcaaagatttaaatgtcgagaataatatgttttctggaccagttcctccgaagctgctcaacataccaaacttcaaaaatgatgggaatccttttaataccagcatagctccctccacctcaccctcttcacctacaggctcaccaacacaaacaccatcgtcctcttcatccccttcaggatctccttcaccatctaatgcagcatcaaactcttctagtggatctactgctcgaaatagcaattctacgtcatccaagaagaagaagccttcaaccctcagaactgttggatatgttcttcttgctattgtgctattcatagttcttgcgctactggtagtattttgcttgtccaagtatcaagaaagacagactagacgtgattattccatggctcaattaggtaggcatcagagggctgaggagccaaaaagcaagcaagcttcggtgcagtctagacatgatgccaaaaaaggtttatctgaagttcctgaaagaaagaaaccccgtgaaataaatttagctgtaccagttgccattgagaagcctcctgaaaagagaaaagagcatgtaattaatttggagcgaacagaatcagagatctttgctgcagcgcctcctccacctccacctccacctcctccacctccacctccgccaccaccaccctcaacaccgccacctccatctccacctccacgattgccatcaccacctcctgctgaaaaagtaactgtaaatcccattgtacgtccagtaaaaagagttaacactccgccaaggactggtccctcgacatctgcaacatccttttccgtggcatcacttcagcaatatacaaatagttttcaagagcaaaatttgataagggagagtagattgggaaaagtttatctggcagaacttcctgaagggaaattactggaagttatgaagattgataatgctaatggaagaataccagtagatgactttctagagttggttgcttgtatatcagatattagacaccctaacattcttgaattagttggatactgtgctgagtatgaacagaggttacttgtgtataaccacttcagtagaaaaacattacttgatgtactacatgaaggggaggatattgataatccattatcctggaatgctcgcctccagattgctcttcatgcagcaaaagccttagagtaagttgtattcaagctacatattacattcatgacctgtttgtgttaaacttagcttgccaagagatg

SEQ ID NO: 42099 - DNA, 2377 bp, Zea Mays
ctttccccctcacaaatcccaacccccttttccctccctttcttccctcaccgctgctcactcacccccaccagtcagcgatctcacacagtaacaactctctctctctctctccacctttttcactcccgttgctggctgctttgctcctctgctctccctctcctctctctcctccgctgcctttatctcacttcgccgccactcccagtcccagtcgtccctctctatctccatctctctatctctgcactgcactgctcacagtcacagctatagattctagaagccaacaaaaacagacgggagcggagaatcgtgctccgggaaaacaagagaatccacctcctctcccctcccctccccttcactctccagatctacgccggcggcggctggtgcgtccgtgctgctccgcggaggcggtgctgcgctgctagctggtcgtccgagagagcccggcccccgaccgagcgatgggggcggcgccggtcctcgtcctgctgctgctggtcgccgctgccgcattgccgcggcgggcaagcgcggccaccgacgccggcgacgtttctgctataaatggactttatgttgcacttggatcaccaaagctacctggatggtctgctagtggtggagatccctgtggtgagagttggcagggtgtcacatgtaccggctcaagtataacctcaataattttcaatgctgcaaatttgggtggacagctaggcagcctggggaacttcacttcaataactgaaataaatcttagcaacaacaatatcggtggaagcataccggaagatctacctgtcacactgcagaatatctttctctcagataaccaactaactggaagcattccagtgtcattatcaaaactccatagtctaacagccatattctcttttaccaggtcactgaatgataaccatctagatggaaaactaccagatacatttgattccctcacagaacttgtaaatcttgatatttcttccaacaacttcagtggtccattaccaccttcattgggaagcttgacatcactgactacattgcacatgcaggataatcaactatctgggacccttgatgtcttgcaggatctctccctcaaagatttaaatgtcgagaataatatgttttctggaccagttcctccgaagctgctcaacataccaaacttcaaaaatgatgggaatccttttaataccagcatagctccctccacctcaccctcttcacctacaggctcaccaacacaaacaccatcgtcctcttcatccccttcaggatctccttcaccatctaatgcagcatcaaactcttctagtggatctactgctcgaaatagcaattctacgtcatccaagaagaagaagccttcaaccctcagaactgttggatatgttcttcttgctattgtgctattcatagttcttgcgctactggtagtattttgcttgtccaagtatcaagaaagacagactagacgtgattattccatggctcaattaggtaggcatcagagggctgaggagccaaaaagcaagcaagcttcggtgcagtctagacatgatgccaaaaaaggtttatctgaagttcctgaaagaaagaaaccccgtgaaataaatttagctgtaccagttgccattgagaagcctcctgaaaagagaaaagagcatgtaattaatttggagcgaacagaatcagagatctttgctgcagcgcctcctccacctccacctccacctcctccacctccacctccgccaccaccaccctcaacaccgccacctccatctccacctccacgattgccatcaccacctcctgctgaaaaagtaactgtaaatcccattgtacgtccagtaaaaagagttaacactccgccaaggactggtccctcgacatctgcaacatccttttccgtggcatcacttcagcaatatacaaatagttttcaagagcaaaatttgataagggagagtagattgggaaaagtttatctggcagaacttcctgaagggaaattactggaagttatgaagattgataatgctaatggaagaataccagtagatgactttctagagttggttgcttgtatatcagatattagacaccctaacattcttgaattagttggatactgtgctgagtatgaacagaggttacttgtgtataaccacttcagtagaaaaacattacttgatgtactacatgaaggggaggatattgataatccattatcctggaatgctcgcctccagattgctcttcatgcagcaaaagccttagagtaagttgtattcaagctacatattacattcatgacctgtttgtgttaaacttagcttgccaagagatg

SEQ ID NO: 42100 - DNA, 2297 bp, Zea Mays
tccccctcacaaatcccaacccccttttccctccctttcttccctcaccgctgctcactcacccccaccagtcagcgatctcacacagtaacaactctctctctctctctccacctttttcactcccgttgctggctgctttgctcctctgctctccctctcctctctctcctccgctgcctttatctcacttcgccgccactcccagtcccagtcgtccctctctatctccatctctctatctctgcactgcactgctcacagtcacagctatagattctagaagccaacaaaaacagacgggagcggagaatcgtgctccgggaaaacaagagaatccacctcctctcccctcccctccccttcactctccagatctacgccggcggcggctggtgcgtccgtgctgctccgcggaggcggtgctgcgctgctagctggtcgtccgagagagcccggcccccgaccgagcgatgggggcggcgccggtcctcgtcctgctgctgctggtcgccgctgccgcattgccgcggcgggcaagcgcggccaccgacgccggcgacgtttctgctataaatggactttatgttgcacttggatcaccaaagctacctggatggtctgctagtggtggagatccctgtggtgagagttggcagggtgtcacatgtaccggctcaagtataacctcaataattttcaatgctgcaaatttgggtggacagctaggcagcctggggaacttcacttcaataactgaaataaatcttagcaacaacaatatcggtggaagcataccggaagatctacctgtcacactgcagaatatctttctctcagataaccaactaactggaagcattccagtgtcattatcaaaactccatagtctaacagccatgtcactgaatgataaccatctagatggaaaactaccagatacatttgattccctcacagaacttgtaaatcttgatatttcttccaacaacttcagtggtccattaccaccttcattgggaagcttgacatcactgactacattgcacatgcaggataatcaactatctgggacccttgatgtcttgcaggatctctccctcaaagatttaaatgtcgagaataatatgttttctggaccagttcctccgaagctgctcaacataccaaacttcaagctcaccaacacaaacaccatcgtcctcttcatccccttcaggatctccttcaccatctaatgcagcatcaaactcttctagtggatctactgctcgaaatagcaattctacgtcatccaagaagaagaagccttcaaccctcagaactgttggatatgttcttcttgctattgtgctattcatagttcttgcgctactggtagtattttgcttgtccaagtatcaagaaagacagactagacgtgattattccatggctcaattaggtaggcatcagagggctgaggagccaaaaagcaagcaagcttcggtgcagtctagacatgatgccaaaaaaggtttatctgaagttcctgaaagaaagaaaccccgtgaaataaatttagctgtaccagttgccattgagaagcctcctgaaaagagaaaagagcatgtaattaatttggagcgaacagaatcagagatctttgctgcagcgcctcctccacctccacctccacctcctccacctccacctccgccaccaccaccctcaacaccgccacctccatctccacctccacgattgccatcaccacctcctgctgaaaaagtaactgtaaatcccattgtacgtccagtaaaaagagttaacactccgccaaggactggtccctcgacatctgcaacatccttttccgtggcatcacttcagcaatatacaaatagttttcaagagcaaaatttgataagggagagtagattgggaaaagtttatctggcagaacttcctgaagggaaattactggaagttatgaagattgataatgctaatggaagaataccagtagatgactttctagagttggttgcttgtatatcagatattagacaccctaacattcttgaattagttggatactgtgctgagtatgaacagaggttacttgtgtataaccacttcagtagaaaaacattacttgatgtactacatgaaggggaggatattgataatccattatcctggaatgctcgcctccagattgctcttcatgcagcaaaagccttagagtaagttgtattcaagctacatattacattcatgacctgtttgtgttaaacttagcttgccaagagatg

SEQ ID NO: 42101 - DNA, 2327 bp, Zea Mays
ccccctcacaaatcccaacccccttttccctccctttcttccctcaccgctgctcactcacccccaccagtcagcgatctcacacagtaacaactctctctctctctctccacctttttcactcccgttgctggctgctttgctcctctgctctccctctcctctctctcctccgctgcctttatctcacttcgccgccactcccagtcccagtcgtccctctctatctccatctctctatctctgcactgcactgctcacagtcacagctatagattctagaagccaacaaaaacagacgggagcggagaatcgtgctccgggaaaacaagagaatccacctcctctcccctcccctccccttcactctccagatctacgccggcggcggctggtgcgtccgtgctgctccgcggaggcggtgctgcgctgctagctggtcgtccgagagagcccggcccccgaccgagcgatgggggcggcgccggtcctcgtcctgctgctgctggtcgccgctgccgcattgccgcggcgggcaagcgcggccaccgacgccggcgacgtttctgctataaatggactttatgttgcacttggatcaccaaagctacctggatggtctgctagtggtggagatccctgtggtgagagttggcagggtgtcacatgtaccggctcaagtataacctcaatctaggcagcctggggaacttcacttcaataactgaaataaatcttagcaacaacaatatcggtggaagcataccggaagatctacctgtcacactgcagaatatctttctctcagataaccaactaactggaagcattccagtgtcattatcaaaactccatagtctaacagccatgtcactgaatgataaccatctagatggaaaactaccagatacatttgattccctcacagaacttgtaaatcttgatatttcttccaacaacttcagtggtccattaccaccttcattgggaagcttgacatcactgactacattgcacatgcaggataatcaactatctgggacccttgatgtcttgcaggatctctccctcaaagatttaaatgtcgagaataatatgttttctggaccagttcctccgaagctgctcaacataccaaacttcaaaaatgatgggaatccttttaataccagcatagctccctccacctcaccctcttcacctacaggctcaccaacacaaacaccatcgtcctcttcatccccttcaggatctccttcaccatctaatgcagcatcaaactcttctagtggatctactgctcgaaatagcaattctacgtcatccaagaagaagaagccttcaaccctcagaactgttggatatgttcttcttgctattgtgctattcatagttcttgcgctactggtagtattttgcttgtccaagtatcaagaaagacagactagacgtgattattccatggctcaattaggtaggcatcagagggctgaggagccaaaaagcaagcaagcttcggtgcagtctagacatgatgccaaaaaaggtttatctgaagttcctgaaagaaagaaaccccgtgaaataaatttagctgtaccagttgccattgagaagcctcctgaaaagagaaaagagcatgtaattaatttggagcgaacagaatcagagatctttgctgcagcgcctcctccacctccacctccacctcctccacctccacctccgccaccaccaccctcaacaccgccacctccatctccacctccacgattgccatcaccacctcctgctgaaaaagtaactgtaaatcccattgtacgtccagtaaaaagagttaacactccgccaaggactggtccctcgacatctgcaacatccttttccgtggcatcacttcagcaatatacaaatagttttcaagagcaaaatttgataagggagagtagattgggaaaagtttatctggcagaacttcctgaagggaaattactggaagttatgaagattgataatgctaatggaagaataccagtagatgactttctagagttggttgcttgtatatcagatattagacaccctaacattcttgaattagttggatactgtgctgagtatgaacagaggttacttgtgtataaccacttcagtagaaaaacattacttgatgtactacatgaaggggaggatattgataatccattatcctggaatgctcgcctccagattgctcttcatgcagcaaaagccttagagtaagttgtattcaagctacatattacattcatgacctgtttgtgttaaacttagcttgccaagagatg

SEQ ID NO: 42102 - DNA, 2320 bp, Zea Mays
cttttccctccctttcttccctcaccgctgctcactcacccccaccagtcagcgatctcacacagtaacaactctctctctctctctccacctttttcactcccgttgctggctgctttgctcctctgctctccctctcctctctctcctccgctgcctttatctcacttcgccgccactcccagtcccagtcgtccctctctatctccatctctctatctctgcactgcactgctcacagtcacagctatagattctagaagccaacaaaaacagacgggagcggagaatcgtgctccgggaaaacaagagaatccacctcctctcccctcccctccccttcactctccagatctacgccggcggcggctggtgcgtccgtgctgctccgcggaggcggtgctgcgctgctagctggtcgtccgagagagcccggcccccgaccgagcgatgggggcggcgccggtcctcgtcctgctgctgctggtcgccgctgccgcattgccgcggcgggcaagcgcggccaccgacgccggcgacgtttctgctataaatggactttatgttgcacttggatcaccaaagctacctggatggtctgctagtggtggagatccctgtggtgagagttggcagggtgtcacatgtaccggctcaagtataacctcaatctaggcagcctggggaacttcacttcaataactgaaataaatcttagcaacaacaatatcggtggaagcataccggaagatctacctgtcacactgcagaatatctttctctcagataaccaactaactggaagcattccagtgtcattatcaaaactccatagtctaacagccatattctcttttaccaggtcactgaatgataaccatctagatggaaaactaccagatacatttgattccctcacagaacttgtaaatcttgatatttcttccaacaacttcagtggtccattaccaccttcattgggaagcttgacatcactgactacattgcacatgcaggataatcaactatctgggacccttgatgtcttgcaggatctctccctcaaagatttaaatgtcgagaataatatgttttctggaccagttcctccgaagctgctcaacataccaaacttcaaaaatgatgggaatccttttaataccagcatagctccctccacctcaccctcttcacctacaggctcaccaacacaaacaccatcgtcctcttcatccccttcaggatctccttcaccatctaatgcagcatcaaactcttctagtggatctactgctcgaaatagcaattctacgtcatccaagaagaagaagccttcaaccctcagaactgttggatatgttcttcttgctattgtgctattcatagttcttgcgctactggtagtattttgcttgtccaagtatcaagaaagacagactagacgtgattattccatggctcaattaggtaggcatcagagggctgaggagccaaaaagcaagcaagcttcggtgcagtctagacatgatgccaaaaaaggtttatctgaagttcctgaaagaaagaaaccccgtgaaataaatttagctgtaccagttgccattgagaagcctcctgaaaagagaaaagagcatgtaattaatttggagcgaacagaatcagagatctttgctgcagcgcctcctccacctccacctccacctcctccacctccacctccgccaccaccaccctcaacaccgccacctccatctccacctccacgattgccatcaccacctcctgctgaaaaagtaactgtaaatcccattgtacgtccagtaaaaagagttaacactccgccaaggactggtccctcgacatctgcaacatccttttccgtggcatcacttcagcaatatacaaatagttttcaagagcaaaatttgataagggagagtagattgggaaaagtttatctggcagaacttcctgaagggaaattactggaagttatgaagattgataatgctaatggaagaataccagtagatgactttctagagttggttgcttgtatatcagatattagacaccctaacattcttgaattagttggatactgtgctgagtatgaacagaggttacttgtgtataaccacttcagtagaaaaacattacttgatgtactacatgaaggggaggatattgataatccattatcctggaatgctcgcctccagattgctcttcatgcagcaaaagccttagagtaagttgtattcaagctacatattacattcatgacctgtttgtgttaaacttagcttgccaagagatg

SEQ ID NO: 42103 - DNA, 2308 bp, Zea Mays
cttccctcaccgctgctcactcacccccaccagtcagcgatctcacacagtaacaactctctctctctctctccacctttttcactcccgttgctggctgctttgctcctctgctctccctctcctctctctcctccgctgcctttatctcacttcgccgccactcccagtcccagtcgtccctctctatctccatctctctatctctgcactgcactgctcacagtcacagctatagattctagaagccaacaaaaacagacgggagcggagaatcgtgctccgggaaaacaagagaatccacctcctctcccctcccctccccttcactctccagatctacgccggcggcggctggtgcgtccgtgctgctccgcggaggcggtgctgcgctgctagctggtcgtccgagagagcccggcccccgaccgagcgatgggggcggcgccggtcctcgtcctgctgctgctggtcgccgctgccgcattgccgcggcgggcaagcgcggccaccgacgccggcgacgtttctgctataaatggactttatgttgcacttggatcaccaaagctacctggatggtctgctagtggtggagatccctgtggtgagagttggcagggtgtcacatgtaccggctcaaaattttcaatgctgcaaatttgggtggacagctaggcagcctggggaacttcacttcaataactgaaataaatcttagcaacaacaatatcggtggaagcataccggaagatctacctgtcacactgcagaatatctttctctcagataaccaactaactggaagcattccagtgtcattatcaaaactccatagtctaacagccatgtcactgaatgataaccatctagatggaaaactaccagatacatttgattccctcacagaacttgtaaatcttgatatttcttccaacaacttcagtggtccattaccaccttcattgggaagcttgacatcactgactacattgcacatgcaggataatcaactatctgggacccttgatgtcttgcaggatctctccctcaaagatttaaatgtcgagaataatatgttttctggaccagttcctccgaagctgctcaacataccaaacttcaaaaatgatgggaatccttttaataccagcatagctccctccacctcaccctcttcacctacaggctcaccaacacaaacaccatcgtcctcttcatccccttcaggatctccttcaccatctaatgcagcatcaaactcttctagtggatctactgctcgaaatagcaattctacgtcatccaagaagaagaagccttcaaccctcagaactgttggatatgttcttcttgctattgtgctattcatagttcttgcgctactggtagtattttgcttgtccaagtatcaagaaagacagactagacgtgattattccatggctcaattaggtaggcatcagagggctgaggagccaaaaagcaagcaagcttcggtgcagtctagacatgatgccaaaaaaggtttatctgaagttcctgaaagaaagaaaccccgtgaaataaatttagctgtaccagttgccattgagaagcctcctgaaaagagaaaagagcatgtaattaatttggagcgaacagaatcagagatctttgctgcagcgcctcctccacctccacctccacctcctccacctccacctccgccaccaccaccctcaacaccgccacctccatctccacctccacgattgccatcaccacctcctgctgaaaaagtaactgtaaatcccattgtacgtccagtaaaaagagttaacactccgccaaggactggtccctcgacatctgcaacatccttttccgtggcatcacttcagcaatatacaaatagttttcaagagcaaaatttgataagggagagtagattgggaaaagtttatctggcagaacttcctgaagggaaattactggaagttatgaagattgataatgctaatggaagaataccagtagatgactttctagagttggttgcttgtatatcagatattagacaccctaacattcttgaattagttggatactgtgctgagtatgaacagaggttacttgtgtataaccacttcagtagaaaaacattacttgatgtactacatgaaggggaggatattgataatccattatcctggaatgctcgcctccagattgctcttcatgcagcaaaagccttagagtaagttgtattcaagctacatattacattcatgacctgtttgtgttaaacttagcttgccaagagatg

SEQ ID NO: 42104 - DNA, 2230 bp, Zea Mays
aactctctctctctctctccacctttttcactcccgttgctggctgctttgctcctctgctctccctctcctctctctcctccgctgcctttatctcacttcgccgccactcccagtcccagtcgtccctctctatctccatctctctatctctgcactgcactgctcacagtcacagctatagattctagaagccaacaaaaacagacgggagcggagaatcgtgctccgggaaaacaagagaatccacctcctctcccctcccctccccttcactctccagatctacgccggcggcggctggtgcgtccgtgctgctccgcggaggcggtgctgcgctgctagctggtcgtccgagagagcccggcccccgaccgagcgatgggggcggcgccggtcctcgtcctgctgctgctggtcgccgctgccgcattgccgcggcgggcaagcgcggccaccgacgccggcgacgtttctgctataaatggactttatgttgcacttggatcaccaaagctacctggatggtctgctagtggtggagatccctgtggtgagagttggcagggtgtcacatgtaccggctcaaaattttcaatgctgcaaatttgggtggacagctaggcagcctggggaacttcacttcaataactgaaataaatcttagcaacaacaatatcggtggaagcataccggaagatctacctgtcacactgcagaatatctttctctcagataaccaactaactggaagcattccagtgtcattatcaaaactccatagtctaacagccatgtcactgaatgataaccatctagatggaaaactaccagatacatttgattccctcacagaacttgtaaatcttggtccattaccaccttcattgggaagcttgacatcactgactacattgcacatgcaggataatcaactatctgggacccttgatgtcttgcaggatctctccctcaaagatttaaatgtcgagaataatatgttttctggaccagttcctccgaagctgctcaacataccaaacttcaaaaatgatgggaatccttttaataccagcatagctccctccacctcaccctcttcacctacaggctcaccaacacaaacaccatcgtcctcttcatccccttcaggatctccttcaccatctaatgcagcatcaaactcttctagtggatctactgctcgaaatagcaattctacgtcatccaagaagaagaagccttcaaccctcagaactgttggatatgttcttcttgctattgtgctattcatagttcttgcgctactggtagtattttgcttgtccaagtatcaagaaagacagactagacgtgattattccatggctcaattaggtaggcatcagagggctgaggagccaaaaagcaagcaagcttcggtgcagtctagacatgatgccaaaaaaggtttatctgaagttcctgaaagaaagaaaccccgtgaaataaatttagctgtaccagttgccattgagaagcctcctgaaaagagaaaagagcatgtaattaatttggagcgaacagaatcagagatctttgctgcagcgcctcctccacctccacctccacctcctccacctccacctccgccaccaccaccctcaacaccgccacctccatctccacctccacgattgccatcaccacctcctgctgaaaaagtaactgtaaatcccattgtacgtccagtaaaaagagttaacactccgccaaggactggtccctcgacatctgcaacatccttttccgtggcatcacttcagcaatatacaaatagttttcaagagcaaaatttgataagggagagtagattgggaaaagtttatctggcagaacttcctgaagggaaattactggaagttatgaagattgataatgctaatggaagaataccagtagatgactttctagagttggttgcttgtatatcagatattagacaccctaacattcttgaattagttggatactgtgctgagtatgaacagaggttacttgtgtataaccacttcagtagaaaaacattacttgatgtactacatgaaggggaggatattgataatccattatcctggaatgctcgcctccagattgctcttcatgcagcaaaagccttagagtaagttgtattcaagctacatattacattcatgacctgtttgtgttaaacttagcttgccaagagatg

SEQ ID NO: 42105 - DNA, 2371 bp, Zea Mays
cctctctctcctccgctgcctttatctcacttcgccgccactcccagtcccagtcgtccctctctatctccatctctctatctctgcactgcactgctcacagtcacagctatagattctagaagccaacaaaaacagacgggagcggagaatcgtgctccgggaaaacaagagaatccacctcctctcccctcccctccccttcactctccagatctacgccggcggcggctggtgcgtccgtgctgctccgcggaggcggtgctgcgctgctagctggtcgtccgagagagcccggcccccgaccgagcgatgggggcggcgccggtcctcgtcctgctgctgctggtcgccgctgccgcattgccgcggcgggcaagcgcggccaccgacgccggcgacgtttctgctataaatggactttatgttgcacttggatcaccaaagctacctggatggtctgctagtggtggagatccctgtggtgagagttggcagggtgtcacatgtaccggctcaagtataacctcaatgtacgccagttattcaatatgttaccttttgccaataagactttttcattttgtgcttttatcaactaattgtttgcagaattttcaatgctgcaaatttgggtggacagctaggcagcctggggaacttcacttcaataactgaaatgtgaacagaggatactttatatactggtataagtgttacttgtatctcaatatgtcatcaagctttgtgattgtctgctttcttgtcattgtagaaatcttagcaacaacaatatcggtggaagcataccggaagatctacctgtcacactgcagaatatctttctctcagataaccaactaactggaagcattccagtgtcattatcaaaactccatagtctaacagccatgtcactgaatgataaccatctagatggaaaactaccagatacatttgattccctcacagaacttgtaaatcttgatatttcttccaacaacttcagtggtccattaccaccttcattgggaagcttgacatcactgactacattgcacatgcaggataatcaactatctgggacccttgatgtcttgcaggatctctccctcaaagatttaaatgtcgagaataatatgttttctggaccagttcctccgaagctgctcaacataccaaacttcaaaaatgatgggaatccttttaataccagcatagctccctccacctcaccctcttcacctacaggctcaccaacacaaacaccatcgtcctcttcatccccttcaggatctccttcaccatctaatgcagcatcaaactcttctagtggatctactgctcgaaatagcaattctacgtcatccaagaagaagaagccttcaaccctcagaactgttggatatgttcttcttgctattgtgctattcatagttcttgcgctactggtagtattttgcttgtccaagtatcaagaaagacagactagacgtgattattccatggctcaattaggtaggcatcagagggctgaggagccaaaaagcaagcaagcttcggtgcagtctagacatgatgccaaaaaaggtttatctgaagttcctgaaagaaagaaaccccgtgaaataaatttagctgtaccagttgccattgagaagcctcctgaaaagagaaaagagcatgtaattaatttggagcgaacagaatcagagatctttgctgcagcgcctcctccacctccacctccacctcctccacctccacctccgccaccaccaccctcaacaccgccacctccatctccacctccacgattgccatcaccacctcctgctgaaaaagtaactgtaaatcccattgtacgtccagtaaaaagagttaacactccgccaaggactggtccctcgacatctgcaacatccttttccgtggcatcacttcagcaatatacaaatagttttcaagagcaaaatttgataagggagagtagattgggaaaagtttatctggcagaacttcctgaagggaaattactggaagttatgaagattgataatgctaatggaagaataccagtagatgactttctagagttggttgcttgtatatcagatattagacaccctaacattcttgaattagttggatactgtgctgagtatgaacagaggttacttgtgtataaccacttcagtagaaaaacattacttgatgtactacatgaaggggaggatattgataatccattatcctggaatgctcgcctccagattgctcttcatgcagcaaaagccttagagtaagttgtattcaagctacatattacattcatgacctgtttgtgttaaacttagcttgccaagagatg

SEQ ID NO: 42106 - DNA, 1823 bp, Zea Mays
attcaatgtctgttggaaatagtcaacgtttctgctataaatggactttatgttgcacttggatcaccaaagctacctggatggtctgctagtggtggagatccctgtggtgagagttggcagggtgtcacatgtaccggctcaagtataacctcaataattttcaatgctgcaaatttgggtggacagctaggcagcctggggaacttcacttcaataactgaaataaatcttagcaacaacaatatcggtggaagcataccggaagatctacctgtcacactgcagaatatctttctctcagataaccaactaactggaagcattccagtgtcattatcaaaactccatagtctaacagccatgtcactgaatgataaccatctagatggaaaactaccagatacatttgattccctcacagaacttgtaaatcttgatatttcttccaacaacttcagtggtccattaccaccttcattgggaagcttgacatcactgactacattgcacatgcaggataatcaactatctgggacccttgatgtcttgcaggatctctccctcaaagatttaaatgtcgagaataatatgttttctggaccagttcctccgaagctgctcaacataccaaacttcaaaaatgatgggaatccttttaataccagcatagctccctccacctcaccctcttcacctacaggctcaccaacacaaacaccatcgtcctcttcatccccttcaggatctccttcaccatctaatgcagcatcaaactcttctagtggatctactgctcgaaatagcaattctacgtcatccaagaagaagaagccttcaaccctcagaactgttggatatgttcttcttgctattgtgctattcatagttcttgcgctactggtagtattttgcttgtccaagtatcaagaaagacagactagacgtgattattccatggctcaattaggtaggcatcagagggctgaggagccaaaaagcaagcaagcttcggtgcagtctagacatgatgccaaaaaaggtttatctgaagttcctgaaagaaagaaaccccgtgaaataaatttagctgtaccagttgccattgagaagcctcctgaaaagagaaaagagcatgtaattaatttggagcgaacagaatcagagatctttgctgcagcgcctcctccacctccacctccacctcctccacctccacctccgccaccaccaccctcaacaccgccacctccatctccacctccacgattgccatcaccacctcctgctgaaaaagtaactgtaaatcccattgtacgtccagtaaaaagagttaacactccgccaaggactggtccctcgacatctgcaacatccttttccgtggcatcacttcagcaatatacaaatagttttcaagagcaaaatttgataagggagagtagattgggaaaagtttatctggcagaacttcctgaagggaaattactggaagttatgaagattgataatgctaatggaagaataccagtagatgactttctagagttggttgcttgtatatcagatattagacaccctaacattcttgaattagttggatactgtgctgagtatgaacagaggttacttgtgtataaccacttcagtagaaaaacattacttgatgtactacatgaaggggaggatattgataatccattatcctggaatgctcgcctccagattgctcttcatgcagcaaaagccttagagtaagttgtattcaagctacatattacattcatgacctgtttgtgttaaacttagcttgccaagagatg

SEQ ID NO: 42107 - DNA, 1743 bp, Zea Mays
tcaatattttcaatgctgcaaatttgggtggacagctaggcagcctggggaacttcacttcaataactgaaataaatcttagcaacaacaatatcggtggaagcataccggaagatctacctgtcacactgcagaatatctttctctcagataaccaactaactggaagcattccagtgtcattatcaaaactccatagtctaacagccatgtcactgaatgataaccatctagatggaaaactaccagatacatttgattccctcacagaacttgtaaatctgtatgttctccctccttccttccctcccaccccttcatgcaaactgcttgatgatatctgacctttgatcacagtgatatttcttccaacaacttcagtggtccattaccaccttcattgggaagcttgacatcactgactacattgcacatgcaggataatcaactatctgggacccttgatgtcttgcaggatctctccctcaaagatttaaatgtcgagaataatatgttttctggaccagttcctccgaagctgctcaacataccaaacttcaaaaatgatgggaatccttttaataccagcatagctccctccacctcaccctcttcacctacaggctcaccaacacaaacaccatcgtcctcttcatccccttcaggatctccttcaccatctaatgcagcatcaaactcttctagtggatctactgctcgaaatagcaattctacgtcatccaagaagaagaagccttcaaccctcagaactgttggatatgttcttcttgctattgtgctattcatagttcttgcgctactggtagtattttgcttgtccaagtatcaagaaagacagactagacgtgattattccatggctcaattaggtaggcatcagagggctgaggagccaaaaagcaagcaagcttcggtgcagtctagacatgatgccaaaaaaggtttatctgaagttcctgaaagaaagaaaccccgtgaaataaatttagctgtaccagttgccattgagaagcctcctgaaaagagaaaagagcatgtaattaatttggagcgaacagaatcagagatctttgctgcagcgcctcctccacctccacctccacctcctccacctccacctccgccaccaccaccctcaacaccgccacctccatctccacctccacgattgccatcaccacctcctgctgaaaaagtaactgtaaatcccattgtacgtccagtaaaaagagttaacactccgccaaggactggtccctcgacatctgcaacatccttttccgtggcatcacttcagcaatatacaaatagttttcaagagcaaaatttgataagggagagtagattgggaaaagtttatctggcagaacttcctgaagggaaattactggaagttatgaagattgataatgctaatggaagaataccagtagatgactttctagagttggttgcttgtatatcagatattagacaccctaacattcttgaattagttggatactgtgctgagtatgaacagaggttacttgtgtataaccacttcagtagaaaaacattacttgatgtactacatgaaggggaggatattgataatccattatcctggaatgctcgcctccagattgctcttcatgcagcaaaagccttagagtaagttgtattcaagctacatattacattcatgacctgtttgtgttaaacttagcttgccaagagatg

SEQ ID NO: 42108 - DNA, 1934 bp, Zea Mays
gttaggtttatggccatacaagaagagatcgactccgaaatgatgatatacgtgataggcaagggttaacaccaattaaagaaaattttgtcaacacaatttgtgatgacaaacatgtccaacagagatctctaaagacacaagtacgtagtgatatcctaaggcacaatagcaataggaagagaggcaggggaaggtcgaaattgacatgagaagacataataaaaggtgacttgaaaggatgtattatatccaaaagatttagccttgaataggagtgcctggaaaacaactatctatgtgcttgaatcttgacttgtgggtttcaactctagcctatcacaacttgcttgatactaaaaggttttattattgttgttgattgttgtaaaaaaacaaggacatgtgtagtgttgtggtgagagctgtctcactaggtcataatgtcgtaggtttgaagtagcatctccacatttgcaaggaaaaattgtttcgtttattcctttcctaaaccccgctcatgtgaaagccttcggtactagatctgccctctatctgttagaaaaacaattggaaattgacctatcacaggcttatattgcttggttatcattaatactttacttctttgggagtatgaatgtaaaacttcttataatagcattccctttatctcagctatcaggtcgtatgcgggctctactcaattatgaagcacctgaaatccatgactctgagccttttactcagcgcagcgacgtatatagtttcggtgtggtgatgctagaacttcttactggtcgtaagccatatgacagctctcgtccacgtgctgaacaacatcttgttagatgggctgattctcagcttcatgacatgaagtccctgtcagagatggttgatccatctatccgaggagagtgttccgtgatactattgtcatgttttgcagacatcatcagtcggtgtattcagccgggaccagaattcaggccagcaatgtctcaaatcgtccaagacctagctaggattgtaggtgctagtagtgaggtatcagagtgacaaataaaggaggaacagtaaaatatctagcttgccagtggcgtggccagcgaagatccctagatccatagcgcagtgccaggggcactctatctatcagcatttatattggacgagattgcggctagtgtacatgccattttggagcctcatttacttctggaaagatgtagactggtagtatggcacaaccagtgagatatggcttctcattgttgccgagcagattcatgtgctctagacatgatagtttcacctgtaggcagtatttcttgtaactaattctaatttttattactttattacattatggctagctatgttaaatatgatgcctttaccatgtcttgagactcatgtttctccggttgctaactccgtatggtttgttaatcatagaagtctactgttattgagattattttcagaggcaaagcgacattccaacttgacatggacatgatcatcatagtgacctggtgtcttctgccgaccacatgaaggttctcctccttgaagcgaaagcacccctgctagagcaagagcatgtcacgaaactgggagagtttgccctgcttcctatcttgttgggggaaatggttggcgatgttatgcttgcctttcaggaaaagaaaaaaaacaaaaggttataactcaaaactgtgaaagcgttgccctgcttcctgtctcttgggggcgaaatgtttgacggccatttttttactgtggacttggtggagctgtgagtaacgaaacccttaggcattgttgcttgagacggaccgcttttctaggaagatgacttgttttgacttcgaaaatgattgttcgtttgattttaatccgtacagatttttatctctatgaattgt

SEQ ID NO: 42109 - DNA, 450 bp, Zea Mays
gcaaggagacttgatatttaacctaaaactgctattgggctagcctgcaccttcagcaaaaggaaagccatccaagttgcataaaaggaaacatcagattggttctctgtactttgacatgaagtcaaaggagatggagcttgcggagaggcgttctaagggcattcttacgaaagcagaaactcaagcaaaatatggctggtgaggagggatgtaaaagaactcaagatacctgtgtgggaggctgggagctgtagaattgagatgcgtgaatttttgttgcacattttgttgtaagagttacggactttgtaagttcaatcctgaacaaatagagaacaaatagttcaataacgagtcaatatttttaaacttgtgttacccattaagaatcacgctcacattcaattgatgtgatctctgccaagtgtatgtgagtagagaggtcta

SEQ ID NO: 42110 - DNA, 938 bp, Zea Mays
atacgcttcgagcctgccttgttttccattactctcagcctgctctctctctctcatggcgacgactgggtggccgtcgctaccaacggcacacccaggtattcttgggaccctgcgccggcgacgagcaccgcaagcagacaagtccattaagattgctgactttggagttgctcgcatcgaagtgaaaactgaagggatgacaccagagacgaacctaccggtggatggcaccggaaatgatccagcacaggccctatgatcataatgttgatgtctatagctttggcatcgtcttgtgggagctaataaccggcatgcttcctttcaccaacatgacggccgttcaggcagcttttgctgttgtaaataagggtgctcgtccggtgatccctcaagactgcctatcttctctaagccacattatgactcgctgctgggatgcgaaccctgaagttcgcccgccatttactgagattgtctgcatgcttgagagtgctgagatggagctcctgagcaacgtgcgcaaagcacgcttccgctgttgtatttctgagcccatgaccacggactgaagtggaaggtggtggctagatgaccacaaaatgggtaagagaatcgcaggaggaaaaggataaagagcctatctcgatgtactcgcgtcaagtgtcagggtccctctgaagaccatgggatttgagcttgtgtgttgttgcattctatcttgtgtaagttgcacaactgagtaatctcttctgaaagtataggcgatgcttccttgtatgttgacaagatctaactctaatagagctttcctatgttaataacatctgcctgttcttgtaatcagcaagtttgcttgcaccattgccgttccttgccctttgttgttgacctacattcaaagactactgcggtttctgcacttcaggatgata

SEQ ID NO: 42111 - DNA, 2078 bp, Zea Mays
atacgcttcgagcctgccttgttttccattactctcagcctgctctctctctctcatggcgacgactgggtggccgtcgctaccaacggcacacccaggtattcttgggaccctgcgccggcgacgagcaccgcaagagcttgtgagggggcagagaagatgacatttcttgcttgaggatgggaaacttgcagcagctctattagggcttgttcggttagctctcaatccatgtggattgagtgggattggatgggtttgaaacccaaacaagtcaaacctcttctcatttttttccaatcccatccaatccatgtgttttgggaataaccgaacaagcccttattaggattggatcctgagagatgaccgaggcggcgaggtttcatggtatgataggtggtggtggtggcaaggggatgcaagacaatgtgatcaatggcttcgacaacattccgtattaccaaaagtttggggagggctctcacatgtccgtagacagtgtcgatggcttcaacctgaccaattgtgctggtggttctgttgccatgtcagttgacagcagcagtgtgggctccaacgagtcccgcacggtcatactgaagcacccaggcctccgtgatgctccgactgcaagctattcagtcaacaatagtgtcttccgccccaaccgtgtagccgcacacactctaaatgaggatgcattggcccaggttttgatggacccaaatcatcctacagaggtactgagcagctatgagcagtggaccattgatctgggaaggttggacatggggggtccttttgctcaaggagcctttggaagctgtaccggggaatatataatggagaagatgttgccattaagctgctggagaagtctgagaatgatccagaaagagcccattcgatggagcagcaatttgtgcaagaggttatgatgctgtctaggctgagtcacccaaatattgtaaggttcataggggcatgcaggaaatcagtcgtgtggtgtactattactgagtatgcaaaaggtggctcagttcggcaattcctggcaagaaggtagaacaagtcagtgcctttgcggttggctgtgaaacaggcgttggatgtagctcggggaatgacatatgttttttttgaagtaaaggtactgtaggaaggtcctacagtaatattattaaatcaaaagaactgagtttagggaatgacatatgttcatgcattgggatttattcacagagatctgaagtcagataaccttctgatttcagcagacaagtccattaagattgctgactttggagttgctcgcatcgaagtgaaaactgaagggatgacaccagagacgaacctaccggtggatggcaccggaaatgatccagcacaggccctatgatcataatgttgatgtctatagctttggcatcgtcttgtgggagctaataaccggcatgcttcctttcaccaacatgacggccgttcaggcagcttttgctgttgtaaataagggtgctcgtccggtgatccctcaagactgcctatcttctctaagccacattatgactcgctgctgggatgcgaaccctgaagttcgcccgccatttactgagattgtctgcatgcttgagagtgctgagatggagctcctgagcaacgtgcgcaaagcacgcttccgctgttgtatttctgagcccatgaccacggactgaagtggaaggtggtggctagatgaccacaaaatgggtaagagaatcgcaggaggaaaaggataaagagcctatctcgatgtactcgcgtcaagtgtcagggtccctctgaagaccatgggatttgagcttgtgtgttgttgcattctatcttgtgtaagttgcacaactgagtaatctcttctgaaagtataggcgatgcttccttgtatgttgacaagatctaactctaatagagctttcctatgttaataacatctgcctgttcttgtaatcagcaagtttgcttgcaccattgccgttccttgccctttgttgttgacctacattcaaagactactgcggtttctgcacttcaggatgata

SEQ ID NO: 42112 - DNA, 2531 bp, Zea Mays
atacgcttcgagcctgccttgttttccattactctcagcctgctctctctctctcatggcgacgactgggtggccgtcgctaccaacggcacacccaggtattcttgggaccctgcgccggcgacgagcaccgcaaggtacgcccgccgcttggtcttcccttcatattgtgtgaaactgtgcatccaaaccataatttacaattcgtattcggatctgatctaggagtaattaagcgtatatgcatgtattatacctactaactttgattgttttgcaaaacttatcggttgttctttactgggttcgccacttctgagcctcatagatgagggaagttcttatttttagtagaagacgttccttgccacggcttctttggctgtagcaaggagttactgctgcaattttaagctagaattacatgttgtttggtggtcgccagctcacttcattaattttatcctgttttagctcatttcattgattttatcttgttttagctcagttcattgattttatcctgttttagagcttgtgagggggcagagaagatgacatttcttgcttgaggatgggaaacttgcagcagctctattagggcttgttcggttagctctcaatccatgtggattgagtgggattggatgggtttgaaacccaaacaagtcaaacctcttctcatttttttccaatcccatccaatccatgtgttttgggaataaccgaacaagcccttattaggattggatcctgagagatgaccgaggcggcgaggtttcatggtatgataggtggtggtggtggcaaggggatgcaagacaatgtgatcaatggcttcgacaacattccgtattaccaaaagtttggggagggctctcacatgtccgtagacagtgtcgatggcttcaacctgaccaattgtgctggtggttctgttgccatgtcagttgacagcagcagtgtgggctccaacgagtcccgcacggtcatactgaagcacccaggcctccgtgatgctccgactgcaagctattcagtcaacaatagtgtcttccgccccaaccgtgtagccgcacacactctaaatgaggatgcattggcccaggttttgatggacccaaatcatcctacagaggtactgagcagctatgatcccgcacggtcatactgaagcacccaggcctccgtgatgctccgactgcaagctattcagtcaacaatagtgtcttccgccccaaccgtgtagccgcacacactctaaatgaggatgcattggcccaggttttgatggacccaaatcatcctacagaggtactgagcagctatgagcagtggaccattgatctgggaaggttggacatggggggtccttttgctcaaggagcctttggaagctgtaccggggaatatataatggagaagatgttgccattaagctgctggagaagtctgagaatgatccagaaagagcccattcgatggagcagcaatttgtgcaagaggttatgatgctgtctaggctgagtcacccaaatattgtaaggttcataggggcatgcaggaaatcagtcgtgtggtgtattattactgagtatgcaaaaggtggctcagtttggcaattcctggcaagaaggcagaacaagtgcctttgcggttggctgtgaaacaggcgttggatgtagctcggggaatgacatatattcatgcattgggatttattcacagagatctgaagtcagataaccttctgatttcagcagacaagtccattaagattgctgactttggagttgctcgtatcgaagtgaaaactgaagggatgacaccagagacaggaacctaccggtggatggcaccggaaatgatctagcacaagccctatgatcataaagttgatgtctatagctttgggctttggcatcgtcttgtgggagctaggagctataaccggcatgcttcccttcaccaacatgacggccgttcaggcagcttttgctgttgtaaataagggtgcccgtccggtgatccctcaagactgcctaccttctctaagacacattatgactcgctgctgggatgcgaaccctgaagttcacccgccatttactgagattgtctgcatgcttgagagtgctgagatggagctcctgagcaacgtgcgcaaagcacgcttccgctgttgtatttctgagcccatgaccaccgactgaagtggaaggtgccaaggtggtggctagatgaccacaaaatgggtaagagaattgcgggggaaaaggataaagagcctatctcgatgtactcgcgtcaagtgtcagggtccctctgaagaccctgggatttgagcttgtgtgttgttgcattctatcttgtgtaagttgcacagctgagtaatctcttctgaaagtataggtgatgcttccttgtatgttgacaagatctaactctaatagagttttcctatgttaataacatctgcctgttcttgtaatcagcaagtttgcttgcaccattgccgttccttacccttt

SEQ ID NO: 42113 - DNA, 3086 bp, Zea Mays
ccgaaggggaggaaagcgaagtccgctatgatctggaagacgacattgtagaagcaatagaagatgctggcttcgaagcagaaattcttcctgactctactgtttctcagccaaaaccgcataagactttgtcaggacaatttaggataggggggatgacttgtgctgcatgtgtgaactcggttgaggggatcttaaaaaaattgccaggtgtaaaaggtgcagttgttgcattagcgacctcattgggtgaagttgaatatgatccttctgccattagcaaagatgaaattgttcaggccatcgaggatgctggttttgacgctgcactgttgcaaagtagtgaccaagacaaggtcctattaaatgtccaggggttacatttcgaggaagatgtagatgtattgcatgatatcctgaagaaaatggaaggcttgcgtcagttcggtgtaaattttgcaaactcagaagttgacattgtatttgaccctgaagtagttggtttgagacagattgtagatactatcgagacggagagcaacaataggctgaaagctcatgtacaggatccatatatacgagctgcatcaaatgatgcacaagaggcctctaagacgcttcatcttcttcgttttagtttattcctaagtattcctgtatttttcatccgcatggtatgccctcgcatacctctgattagttcattcctacttatgcactttgggccatttcgtataggagatctgctgaggtggattctggtgaccatggtacagtttattgttggcaaacgattctatgttgcagcgtatagggccctaagacatggctctacaaatatggatgtcttagttgttattggcactactgcttcatatgtctactctgtttgtgcactactttatggggcattcactggatttcatcctccaatatattttgagacgagcgcaatgataattacatttgtgctatttgggaagtatcttgaggtgctcgcgaaaggaaagacatcagatgctatcaagaagcttgtagagcttgctcctgctacagctattctacttctgaaggacaaagagggaaaatattcaggagagaaggagattgatgcgtcgttagtacaacctggtgatgtgttaaaagtgcttcctggttcaaaggttcctgctgatggtatcgtcatttggggtacaagtcatgtcaatgagagtatggtaactggtgaatctgtaccaatctccaaggaagtatccagtctagtcattggaggcacaatgaacttgcatggtgttcttcatatacaagcgacgaaagtaggatctggaacagttttgagccagataatttctctcgtggaaaccgcccagatgtctaaggcccctattcagaagtttgctgattatgtagccagcatttttgttcctattgtcatcaccctgtccttcttgacattccttgcatggtttctatgtggatggttgggagcatatccaaactcatggtctgctgaaagtagcaattgctttgttttctccctaatgttctccatatctgttgttgtgattgcttgtccatgtgctcttggtctggcaacaccaactgctgttatggtagcaactggagtcggggctagtcatggagtacttgtaaagggcggagatgccctggagagagctcagaatgtgaagtatgttatttttgacaagaccggaacactgacccaaggaaaggctactgtaactgcaacaaagattttttcaggaatggatctgggtgactttctcacgttggtagcgtctgcagaggcaagcagtgagcatccactggcaaaagctatcttggattatgcattccatttccatttcttcggcaatcttccctcaggaaaagacagcatcaagagaagaaaagaagagatactttctcagtggcttctggaagtcgtggactttgctgccttgcctggcaaagggattcaatgttggatcaatgggaagaaagttttggtagggaatcgtgctttgataactgaaaatggggtaaacattcctgaagaagctgaacgtttcctggtagacatggagctgaatgcaaagactggtattctcgtagcgtatgatggtgacttcattggcttagttgggataaccgatcctttgaaaagggaggctgctgtggtcatacaaggtctaaaaaagatgggtgttcatccagttatggtcactggggataactggaggactgcacgagcagttgcaaaggaggttggcatcgatgatgtcagagccgaggttatgccggctggaaaagccgatgtaatccactccctgcaaaaggatggcagtgttgtcgcgatggtcggagatggcatcaacgactcgcccgcccttgctgccgccgatgtcggcatggccatcggcgcaggcactgacatcgctatcgaggcggctgactatgtgctcgtccggaacaacctggaggatgtgatcacggctattgacctctcacggaagacgttcatccggatccggtggaactacttctttgccatggcctacaacgtgatcgccatccccgtagctgctggcgcgttgtttcccttcaccggggtccagatgccgccttggttagccggcgcgtgcatggcgttctcgtccgtcagcgtggtgtcgtcgtcgctgctgctgaggaggtataggaaacccagactcaccaccgtgcttcagataacagtggaataagttccttttttttttggcaatttgttgtatctcactttatcggagagaaatagatacaaacgtgaatgttggtgtggacgtgcggtgcagtactgagagtcaaacacagaaacacttgtacatatcgaacagtttgcaattgcaaccgagttatacatgttaactatgtgagggatcaagagacatgcgacaagacaattctagttttctcctagtgttagtttggtttggaggataatatgatggatctgcccctagagtagaatattccctgtcacatgtcattcctcgccatctcttttaggcattatcggtgaggccgtcttcttctccacgcgctgc

SEQ ID NO: 42114 - DNA, 3489 bp, Zea Mays
gtgggagtggttggtgaccgtcttaccaaagtaccaaacccttcacccttcaggatcaactgatcaagtcaatcctgcagtatttgcagaaaccccctccaaacccaacgatcgtattcaaacaacccctcggcacccgtctccggtctcccttccgtcattgcgcgtcccaccttccgtccccacaatttccgctcccctcacgagcatttcccccgcctacccgtcgccgacggccatggcccacctccagctcacggcgctcgccggcggcgccgacgacgagatggaggaggtcgcgctgctgggatcctacgacgaggaggccggggtggggccggaggcggagggggaccgggcggaggccggcatgcggcgggtgcaggtgcgcgtaaccggcatgacgtgctccgcgtgcacgggagccgtggaggccgcgctctccgcccgccgcggcgtgcgccgcgccgccgtgtcgctgctccagaaccgcgcccacgtcgttttcgaccccgcgctcgccaaggaagacgacattgtagaagcaatagaagatgctggcttcgaagcagaaattcttcctgactctactgtttctcagccaaaaccgcataagactttgtcaggacaatttaggataggggggatgacttgtgctgcatgtgtgaactcggttgaggggatcttaaaaaaattgccaggtgtaaaaggtgcagttgttgcattagcgacctcattgggtgaagttgaatatgatccttctgccattagcaaagatgaaattgttcaggccatcgaggatgctggttttgacgctgcactgttgcaaagtagtgaccaagacaaggtcctattaaatgtccaggggttacatttcgaggaagatgtagatgtattgcatgatatcctgaagaaaatggaaggcttgcgtcagttcggtgtaaattttgcaaactcagaagttgacattgtatttgaccctgaagtagttggtttgagacagattgtagatactatcgagacggagagcaacaataggctgaaagctcatgtacaggatccatatatacgagctgcatcaaatgatgcacaagaggcctctaagacgcttcatcttcttcgttttagtttattcctaagtgagatctgctgaggtggattctggtgaccatggtacagtttattgttggcaaacgattctatgttgcagcgtatagggccctaagacatggctctacaaatatggatgtcttagttgttattggcactactgcttcatatgtctactctgtttgtgcactactttatggggcattcactggatttcatcctccaatatattttgagacgagcgcaatgataattacatttgtgctatttgggaagtatcttgaggtgctcgcgaaaggaaagacatcagatgctatcaagaagcttgtagagcttgctcctgctacagctattctacttctgaaggacaaagagggaaaatattcaggagagaaggagattgatgcgtcgttagtacaacctggtgatgtgttaaaagtgcttcctggttcaaaggttcctgctgatggtatcgtcatttggggtacaagtcatgtcaatgagagtatggtaactggtgaatctgtaccaatctccaaggaagtatccagtctagtcattggaggcacaatgaacttgcatggtgttcttcatatacaagcgacgaaagtaggatctggaacagttttgagccagataatttctctcgtggaaaccgcccagatgtctaaggcccctattcagaagtttgctgattatgtagccagcatttttgttcctattgtcatcaccctgtccttcttgacattccttgcatggtttctatgtggatggttgggagcatatccaaactcatggtctgctgaaagtagcaattgctttgttttctccctaatgttctccatatctgttgttgtgattgcttgtccatgtgctcttggtctggcaacaccaactgctgttatggtagcaactggagtcggggctagtcatggagtacttgtaaagggcggagatgccctggagagagctcagaatgtgaagtatgttatttttgacaagaccggaacactgacccaaggaaaggctactgtaactgcaacaaagattttttcaggaatggatctgggtgactttctcacgttggtagcgtctgcagaggcaagcagtgagcatccactggcaaaagctatcttggattatgcattccatttccatttcttcggcaatcttccctcaggaaaagacagcatcaagagaagaaaagaagagatactttctcagtggcttctggaagtcgtggactttgctgccttgcctggcaaagggattcaatgttggatcaatgggaagaaagttttggtagggaatcgtgctttgataactgaaaatggggtaaacattcctgaagaagctgaacgtttcctggtagacatggagctgaatgcaaagactggtattctcgtagcgtatgatggtgacttcattggcttagttgggataaccgatcctttgaaaagggaggctgctgtggtcatacaaggtctaaaaaagatgggtgttcatccagttatggtcactggggataactggaggactgcacgagcagttgcaaaggaggttggcatcgatgatgtcagagccgaggttatgccggctggaaaagccgatgtaatccactccctgcaaaaggatggcagtgttgtcgcgatggtcggagatggcatcaacgactcgcccgcccttgctgccgccgatgtcggcatggccatcggcgcaggcactgacatcgctatcgaggcggctgactatgtgctcgtccggaacaacctggaggatgtgatcacggctattgacctctcacggaagacgttcatccggatccggtggaactacttctttgccatggcctacaacgtgatcgccatccccgtagctgctggcgcgttgtttcccttcaccggggtccagatgccgccttggttagccggcgcgtgcatggcgttctcgtccgtcagcgtggtgtcgtcgtcgctgctgctgaggaggtataggaaacccagactcaccaccgtgcttcagataacagtggaataagttccttttttttttggcaatttgttgtatctcactttatcggagagaaatagatacaaacgtgaatgttggtgtggacgtgcggtgcagtactgagagtcaaacacagaaacacttgtacatatcgaacagtttgcaattgcaaccgagttatacatgttaactatgtgagggatcaagagacatgcgacaagacaattctagttttctcctagtgttagtttggtttggaggataatatgatggatctgcccctagagtagaatattccctgtcacatgtcattcctcgccatctcttttaggcattatcggtgaggccgtcttcttctccacgcgctgc

SEQ ID NO: 42115 - DNA, 3729 bp, Zea Mays
attcaaacaacccctcggcacccgtctccggtctcccttccgtcattgcgcgtcccaccttccgtccccacaatttccgctcccctcacgagcatttcccccgcctacccgtcgccgacggccatggcccacctccagctcacggcgctcgccggcggcgccgacgacgagatggaggaggtcgcgctgctgggatcctacgacgaggaggccggggtggggccggaggcggagggggaccgggcggaggccggcatgcggcgggtgcaggtgcgcgtaaccggcatgacgtgctccgcgtgcacgggagccgtggaggccgcgctctccgcccgccgcggcgtgcgccgcgccgccgtgtcgctgctccagaaccgcgcccacgtcgttttcgaccccgcgctcgccaaggaagacgacattgtagaagcaatagaagatgctggcttcgaagcagaaattcttcctgactctactgtttctcagccaaaaccgcataagactttgtcaggacaatttaggataggggggatgacttgtgctgcatgtgtgaactcggttgaggggatcttaaaaaaattgccaggtgtaaaaggtgcagttgttgcattagcgacctcattgggtgaagttgaatatgatccttctgccattagcaaagatgaaattgttcaggccatcgaggatgctggttttgacgctgcactgttgcaaagtagtgaccaagacaaggtcctattaaatgtccaggggttacatttcgaggaagatgtagatgtattgcatgatatcctgaagaaaatggaaggcttgcgtcagttcggtgtaaattttgcaaactcagaagttgacattgtatttgaccctgaagtagttggtttgagacagattgtagatactatcgagacggagagcaacaataggctgaaagctcatgtacaggatccatatatacgagctgcatcaaatgatgcacaagaggcctctaagacgcttcatcttcttcgttttagtttattcctaagtgtaagtttagtccccccttctatcctaaagacttaattatgtgtcttcgatgatatgtttatttcgataatcgatattatagatactgcttgacaggaaactttgtgttacttgcatactgactctccactggtttccttgcaccagattcctgtatttttcatccgcatggtatgccctcgcatacctctgattagttcattcctacttatgcactttgggccatttcgtataggagatctgctgaggtggattctggtgaccatggtacagtttattgttggcaaacgattctatgttgcagcgtatagggccctaagacatggctctacaaatatggatgtcttagttgttattggcactactgcttcatatgtctactctgtttgtgcactactttatggggcattcactggatttcatcctccaatatattttgagacgagcgcaatgataattacatttgtgctatttgggaagtatcttgaggtgctcgcgaaaggaaagacatcagatgctatcaagaagcttgtagagcttgctcctgctacagctattctacttctgaaggacaaaggagagaaggagattgatgcgtcgttagtacaacctggtgatgtgttaaaagtgcttcctggttcaaaggttcctgctgatggtatcgtcatttggggtacaagtcatgtcaatgagagtatggtaactggtgaatctgtaccaatctccaaggaagtatccagtctagtcattggaggcacaatgaacttgcatggtgttcttcatatacaagcgacgaaagtaggatctggaacagttttgagccagataatttctctcgtggaaaccgcccagatgtctaaggcccctattcagaagtttgctgattatgtagccagcatttttgttcctattgtcatcaccctgtccttcttgacattccttgcatggtttctatgtggatggttgggagcatatccaaactcatggtctgctgaaagtagcaattgctttgttttctccctaatgttctccatatctgttgttgtgattgcttgtccatgtgctcttggtctggcaacaccaactgctgttatggtagcaactggagtcggggctagtcatggagtacttgtaaagggcggagatgccctggagagagctcagaatgtgaagtatgttatttttgacaagaccggaacactgacccaaggaaaggctactgtaactgcaacaaagattttttcaggaatggatctgggtgactttctcacgttggtagcgtctgcagaggcaagcagtgagcatccactggcaaaagctatcttggattatgcattccatttccatttcttcggcaatcttccctcaggaaaagacagcatcaagagaagaaaagaagagatactttctcagtggcttctggaagtcgtggactttgctgccttgcctggcaaagggattcaatgttggatcaatgggaagaaagttttggtgagttggaagaatatagctttgctttacttaccccccctcaaataattggagggtaaacctgatttatagtgtgttacatgcttacatgcccgattaaatgtgatatgttggcgcttaaatacttgtacccaggtagggaatcgtgctttgataactgaaaatggggtaaacattcctgaagaagctgaacgtttcctggtagacatggagctgaatgcaaagactggtattctcgtagcgtatgatggtgacttcattggcttagttgggataaccgatcctttgaaaagggaggctgctgtggtcatacaaggtctaaaaaagatgggtgttcatccagttatggtcactggggataactggaggactgcacgagcagttgcaaaggaggttggcatcgatgatgtcagagccgaggttatgccggctggaaaagccgatgtaatccactccctgcaaaaggatggcagtgttgtcgcgatggtcggagatggcatcaacgactcgcccgcccttgctgccgccgatgtcggcatggccatcggcgcaggcactgacatcgctatcgaggcggctgactatgtgctcgtccggaacaacctggaggatgtgatcacggctattgacctctcacggaagacgttcatccggatccggtggaactacttctttgccatggcctacaacgtgatcgccatccccgtagctgctggcgcgttgtttcccttcaccggggtccagatgccgccttggttagccggcgcgtgcatggcgttctcgtccgtcagcgtggtgtcgtcgtcgctgctgctgaggaggtataggaaacccagactcaccaccgtgcttcagataacagtggaataagttccttttttttttggcaatttgttgtatctcactttatcggagagaaatagatacaaacgtgaatgttggtgtggacgtgcggtgcagtactgagagtcaaacacagaaacacttgtacatatcgaacagtttgcaattgcaaccgagttatacatgttaactatgtgagggatcaagagacatgcgacaagacaattctagttttctcctagtgttagtttggtttggaggataatatgatggatctgcccctagagtagaatattccctgtcacatgtcattcctcgccatctcttttaggcattatcggtgaggccgtcttcttctccacgcgctgc

SEQ ID NO: 42116 - DNA, 3370 bp, Zea Mays
attcaaacaacccctcggcacccgtctccggtctcccttccgtcattgcgcgtcccaccttccgtccccacaatttccgctcccctcacgagcatttcccccgcctacccgtcgccgacggccatggcccacctccagctcacggcgctcgccggcggcgccgacgacgagatggaggaggtcgcgctgctgggatcctacgacgaggaggccggggtggggccggaggcggagggggaccgggcggaggccggcatgcggcgggtgcaggtgcgcgtaaccggcatgacgtgctccgcgtgcacgggagccgtggaggccgcgctctccgcccgccgcggcgtgcgccgcgccgccgtgtcgctgctccagaaccgcgcccacgtcgttttcgaccccgcgctcgccaaggaagacgacattgtagaagcaatagaagatgctggcttcgaagcagaaattcttcctgactctactgtttctcagccaaaaccgcataagactttgtcaggacaatttaggataggggggatgacttgtgctgcatgtgtgaactcggttgaggggatcttaaaaaaattgccaggtgtaaaaggtgcagttgttgcattagcgacctcattgggtgaagttgaatatgatccttctgccattagcaaagatgaaattgttcaggccatcgaggatgctggttttgacgctgcactgttgcaaagtagtgaccaagacaaggtcctattaaatgtccaggggttacatttcgaggaagatgtagatgtattgcatgatatcctgaagaaaatggaaggcttgcgtcagttcggtgtaaattttgcaaactcagaagttgacattgtatttgaccctgaagtagttggtttgagacagattgtagatactatcgagacggagagcaacaataggctgaaagctcatgtacaggatccatatatacgagctgcatcaaatgatgcacaagaggcctctaagacgcttcatcttcttcgttttagtttattcctaagtgagatctgctgaggtggattctggtgaccatggtacagtttattgttggcaaacgattctatgttgcagcgtatagggccctaagacatggctctacaaatatggatgtcttagttgttattggcactactgcttcatatgtctactctgtttgtgcactactttatggggcattcactggatttcatcctccaatatattttgagacgagcgcaatgataattacatttgtgctatttgggaagtatcttgaggtgctcgcgaaaggaaagacatcagatgctatcaagaagcttgtagagcttgctcctgctacagctattctacttctgaaggacaaagagggaaaatattcaggagagaaggagattgatgcgtcgttagtacaacctggtgatgtgttaaaagtgcttcctggttcaaaggttcctgctgatggtatcgtcatttggggtacaagtcatgtcaatgagagtatggtaactggtgaatctgtaccaatctccaaggaagtatccagtctagtcattggaggcacaatgaacttgcatggtgttcttcatatacaagcgacgaaagtaggatctggaacagttttgagccagataatttctctcgtggaaaccgcccagatgtctaaggcccctattcagaagtttgctgattatccagcatttttgttcctattgtcatcaccctgtccttcttgacattccttgcatggtttctatgtggatggttgggagcatatccaaactcatggtctgctgaaagtagcaattgctttgttttctccctaatgttctccatatctgttgttgtgattgcttgtccatgtgctcttggtctggcaacaccaactgctgttatggtagcaactggagtcggggctagtcatggagtacttgtaaagggcggagatgccctggagagagctcagaatgtgaagtatgttatttttgacaagaccggaacactgacccaaggaaaggctactgtaactgcaacaaagattttttcaggaatggatctgggtgactttctcacgttggtagcgtctgcagaggcaagcagtgagcatccactggcaaaagctatcttggattatgcattccatttccatttcttcggcaatcttccctcaggaaaagacagcatcaagagaagaaaagaagagatactttctcagtggcttctggaagtcgtggactttgctgccttgcctggcaaagggattcaatgttggatcaatgggaagaaagttttggtagggaatcgtgctttgataactgaaaatggggtaaacattcctgaagaagctgaacgtttcctggtagacatggagctgaatgcaaagactggtattctcgtagcgtatgatggtgacttcattggcttagttgggataaccgatcctttgaaaagggaggctgctgtggtcatacaaggtctaaaaaagatgggtgttcatccagttatggtcactggggataactggaggactgcacgagcagttgcaaaggaggttggcatcgatgatgtcagagccgaggttatgccggctggaaaagccgatgtaatccactccctgcaaaaggatggcagtgttgtcgcgatggtcggagatggcatcaacgactcgcccgcccttgctgccgccgatgtcggcatggccatcggcgcaggcactgacatcgctatcgaggcggctgactatgtgctcgtccggaacaacctggaggatgtgatcacggctattgacctctcacggaagacgttcatccggatccggtggaactacttctttgccatggcctacaacgtgatcgccatccccgtagctgctggcgcgttgtttcccttcaccggggtccagatgccgccttggttagccggcgcgtgcatggcgttctcgtccgtcagcgtggtgtcgtcgtcgctgctgctgaggaggtataggaaacccagactcaccaccgtgcttcagataacagtggaataagttccttttttttttggcaatttgttgtatctcactttatcggagagaaatagatacaaacgtgaatgttggtgtggacgtgcggtgcagtactgagagtcaaacacagaaacacttgtacatatcgaacagtttgcaattgcaaccgagttatacatgttaactatgtgagggatcaagagacatgcgacaagacaattctagttttctcctagtgttagtttggtttggaggataatatgatggatctgcccctagagtagaatattccctgtcacatgtcattcctcgccatctcttttaggcattatcggtgaggccgtcttcttctccacgcgctgc

SEQ ID NO: 42117 - DNA, 3239 bp, Zea Mays
cttcgtttcatcttagaggaggttcagaagcacgtaactcggaagacgacattgtagaagcaatagaagatgctggcttcgaagcagaaattcttcctgactctactgtttctcagccaaaaccgcataagactttgtcaggacaatttaggataggggggatgacttgtgctgcatgtgtgaactcggttgaggggatcttaaaaaaattgccaggtgtaaaaggtgcagttgttgcattagcgacctcattgggtgaagttgaatatgatccttctgccattagcaaagatgaaattgttcaggccatcgaggatgctggttttgacgctgcactgttgcaaagtagtgaccaagacaaggtcctattaaatgtccaggggttacatttcgaggaagatgtagatgtattgcatgatatcctgaagaaaatggaaggcttgcgtcagttcggtgtaaattttgcaaactcagaagttgacattgtatttgaccctgaagtagttggtttgagacagattgtagatactatcgagacggagagcaacaataggctgaaagctcatgtacaggatccatatatacgagctgcatcaaatgatgcacaagaggcctctaagacgcttcatcttcttcgttttagtttattcctaagtgtaagtttagtccccccttctatcctaaagacttaattatgtgtcttcgatgatatgtttatttcgataatcgatattatagatactgcttgacaggaaactttgtgttacttgcatactgactctccactggtttccttgcaccagattcctgtatttttcatccgcatggtatgccctcgcatacctctgattagttcattcctacttatgcactttgggccatttcgtataggagatctgctgaggtggattctggtgaccatggtacagtttattgttggcaaacgattctatgttgcagcgtatagggccctaagacatggctctacaaatatggatgtcttagttgttattggcactactgcttcatatgtctactctgtttgtgcactactttatggggcattcactggatttcatcctccaatatattttgagacgagcgcaatgataattacatttgtgctatttgggaagtatcttgaggtgctcgcgaaaggaaagacatcagatgctatcaagaagcttgtagagcttgctcctgctacagctattctacttctgaaggacaaagagggaaaatattcaggagagaaggagattgatgcgtcgttagtacaacctggtgatgtgttaaaagtgcttcctggttcaaaggttcctgctgatggtatcgtcatttggggtacaagtcatgtcaatgagagtatggtaactggtgaatctgtaccaatctccaaggaagtatccagtctagtcattggaggcacaatgaacttgcatggtgttcttcatatacaagcgacgaaagtaggatctggaacagttttgagccagataatttctctcgtggaaaccgcccagatgtctaaggcccctattcagaagtttgctgattatgtagccagcatttttgttcctattgtcatcaccctgtccttcttgacattccttgcatggtttctatgtggatggttgggagcatatccaaactcatggtctgctgaaagtagcaattgctttgttttctccctaatgttctccatatctgttgttgtgattgcttgtccatgtgctcttggtctggcaacaccaactgctgttatggtagcaactggagtcggggctagtcatggagtacttgtaaagggcggagatgccctggagagagctcagaatgtgaagtatgttatttttgacaagaccggaacactgacccaaggaaaggctactgtaactgcaacaaagattttttcaggaatggatctgggtgactttctcacgttggtagcgtctgcagaggcaagcagtgagcatccactggcaaaagctatcttggattatgcattccatttccatttcttcggcaatcttccctcaggaaaagacagcatcaagagaagaaaagaagagatactttctcagtggcttctggaagtcgtggactttgctgccttgcctggcaaagggattcaatgttggatcaatgggaagaaagttttggtagggaatcgtgctttgataactgaaaatggggtaaacattcctgaagaagctgaacgtttcctggtagacatggagctgaatgcaaagactggtattctcgtagcgtatgatggtgacttcattggcttagttgggataaccgatcctttgaaaagggaggctgctgtggtcatacaaggtctaaaaaagatgggtgttcatccagttatggtcactggggataactggaggactgcacgagcagttgcaaaggaggttggcatcgatgatgtcagagccgaggttatgccggctggaaaagccgatgtaatccactccctgcaaaaggatggcagtgttgtcgcgatggtcggagatggcatcaacgactcgcccgcccttgctgccgccgatgtcggcatggccatcggcgcaggcactgacatcgctatcgaggcggctgactatgtgctcgtccggaacaacctggaggatgtgatcacggctattgacctctcacggaagacgttcatccggatccggtggaactacttctttgccatggcctacaacgtgatcgccatccccgtagctgctggcgcgttgtttcccttcaccggggtccagatgccgccttggttagccggcgcgtgcatggcgttctcgtccgtcagcgtggtgtcgtcgtcgctgctgctgaggaggtataggaaacccagactcaccaccgtgcttcagataacagtggaataagttccttttttttttggcaatttgttgtatctcactttatcggagagaaatagatacaaacgtgaatgttggtgtggacgtgcggtgcagtactgagagtcaaacacagaaacacttgtacatatcgaacagtttgcaattgcaaccgagttatacatgttaactatgtgagggatcaagagacatgcgacaagacaattctagttttctcctagtgttagtttggtttggaggataatatgatggatctgcccctagagtagaatattccctgtcacatgtcattcctcgccatctcttttaggcattatcggtgaggccgtcttcttctccacgcgctgc

SEQ ID NO: 42118 - DNA, 3000 bp, Zea Mays
gtttcatcttagaggaggttcagaagcacgtaactcggaagacgacattgtagaagcaatagaagatgctggcttcgaagcagaaattcttcctgactctactgtttctcagccaaaaccgcataagactttgtcaggacaatttaggataggggggatgacttgtgctgcatgtgtgaactcggttgaggggatcttaaaaaaattgccaggtgtaaaaggtgcagttgttgcattagcgacctcattgggtgaagttgaatatgatccttctgccattagcaaagatgaaattgttcaggccatcgaggatgctggttttgacgctgcactgttgcaaagtagtgaccaagacaaggtcctattaaatgtccaggggttacatttcgaggaagatgtagatgtattgcatgatatcctgaagaaaatggaaggcttgcgtcagttcggtgtaaattttgcaaactcagaagttgacattgtatttgaccctgaagtagttggtttgagacagattgtagatactatcgagacggagagcaacaataggctgaaagctcatgtacaggatccatatatacgagctgcatcaaatgatgcacaagaggcctctaagacgcttcatcttcttcgttttagtttattcctaagtgagatctgctgaggtggattctggtgaccatggtacagtttattgttggcaaacgattctatgttgcagcgtatagggccctaagacatggctctacaaatatggatgtcttagttgttattggcactactgcttcatatgtctactctgtttgtgcactactttatggggcattcactggatttcatcctccaatatattttgagacgagcgcaatgataattacatttgtgctatttgggaagtatcttgaggtgctcgcgaaaggaaagacatcagatgctatcaagaagcttgtagagcttgctcctgctacagctattctacttctgaaggacaaagagggaaaatattcaggagagaaggagattgatgcgtcgttagtacaacctggtgatgtgttaaaagtgcttcctggttcaaaggttcctgctgatggtatcgtcatttggggtacaagtcatgtcaatgagagtatggtaactggtgaatctgtaccaatctccaaggaagtatccagtctagtcattggaggcacaatgaacttgcatggtgttcttcatatacaagcgacgaaagtaggatctggaacagttttgagccagataatttctctcgtggaaaccgcccagatgtctaaggcccctattcagaagtttgctgattatgtagccagcatttttgttcctattgtcatcaccctgtccttcttgacattccttgcatggtttctatgtggatggttgggagcatatccaaactcatggtctgctgaaagtagcaattgctttgttttctccctaatgttctccatatctgttgttgtgattgcttgtccatgtgctcttggtctggcaacaccaactgctgttatggtagcaactggagtcggggctagtcatggagtacttgtaaagggcggagatgccctggagagagctcagaatgtgaagtatgttatttttgacaagaccggaacactgacccaaggaaaggctactgtaactgcaacaaagattttttcaggaatggatctgggtgactttctcacgttggtagcgtctgcagaggcaagcagtgagcatccactggcaaaagctatcttggattatgcattccatttccatttcttcggcaatcttccctcaggaaaagacagcatcaagagaagaaaagaagagatactttctcagtggcttctggaagtcgtggactttgctgccttgcctggcaaagggattcaatgttggatcaatgggaagaaagttttggtagggaatcgtgctttgataactgaaaatggggtaaacattcctgaagaagctgaacgtttcctggtagacatggagctgaatgcaaagactggtattctcgtagcgtatgatggtgacttcattggcttagttgggataaccgatcctttgaaaagggaggctgctgtggtcatacaaggtctaaaaaagatgggtgttcatccagttatggtcactggggataactggaggactgcacgagcagttgcaaaggaggttggcatcgatgatgtcagagccgaggttatgccggctggaaaagccgatgtaatccactccctgcaaaaggatggcagtgttgtcgcgatggtcggagatggcatcaacgactcgcccgcccttgctgccgccgatgtcggcatggccatcggcgcaggcactgacatcgctatcgaggcggctgactatgtgctcgtccggaacaacctggaggatgtgatcacggctattgacctctcacggaagacgttcatccggatccggtggaactacttctttgccatggcctacaacgtgatcgccatccccgtagctgctggcgcgttgtttcccttcaccggggtccagatgccgccttggttagccggcgcgtgcatggcgttctcgtccgtcagcgtggtgtcgtcgtcgctgctgctgaggaggtataggaaacccagactcaccaccgtgcttcagataacagtggaataagttccttttttttttggcaatttgttgtatctcactttatcggagagaaatagatacaaacgtgaatgttggtgtggacgtgcggtgcagtactgagagtcaaacacagaaacacttgtacatatcgaacagtttgcaattgcaaccgagttatacatgttaactatgtgagggatcaagagacatgcgacaagacaattctagttttctcctagtgttagtttggtttggaggataatatgatggatctgcccctagagtagaatattccctgtcacatgtcattcctcgccatctcttttaggcattatcggtgaggccgtcttcttctccacgcgctgc

SEQ ID NO: 42119 - DNA, 825 bp, Zea Mays
gatccatcccagtgcagatcagcatccaacaaatccctcacgagcgtctcgatcgagcaagcagctgaagccatatggctcgccaggccacagccctcgtcgcatctgccctgctgctgctggcagtagccttcatgtctcatgatgctggtgtggaagcgtggtgcctggagtaccctgcgccggaccccaacgcctgccacggaagcaacggccttcgttactgccgcaacgagtgcgtggcggtcggcaatggcttcgtcggcggggagtgcaataagggcacctgctactgcctcaagtgcgccgacgagccactaccggcgccgcgtgctctgtaggactcatgtagaatctgcaacggatgtatgcatcgtgcgcagcgcagatgcaccgtgcatgcattaggatcgttttcgtataacaaagatgaaaatttcaatttataaaccatgcatgcgcgcggtgtgaaaatcacatgcatgcggtctgagttgcggtgatctgagactgagtaacgatgtcgtattttcatttttgtagaagcatattttaaattgggttatttgagggggctatttttccaatttaaaaatattacatatatatatgagaaagatatttatttgttttattgctgttctagaaaagttataaattattacacgccagaaacatagcgttatgattgttgagcaccttaatcagccgccggacggtccggcccactgtccggacggtccgcgcgtgcgcagaaacgaataggattccgagtttcttgctgtgtttgttagctagattcacggaattagctcggggagtttg

SEQ ID NO: 42120 - DNA, 2460 bp, Zea Mays
cgcccaccggccaccggcagtgcgcgcggaaccgctcctgcccgccacgtgtccccgtctcccgtccccacgtttaaatgtcatgtcccgctcgccacccatcctcccccctacttccaattcagcgagcgattcaccaccccaccaccaaaccgtctccgtcgcgcctcccgaatccccgtcgaatccgagctcccggaggcacccgaggcgcgggctccccaaccgcctcccgaccccgcgggcctgcgctgcgcaccgcgacgaaaacaaagaactactgatcaatataaaatggctgtaagcttcaaatactgggacgattgcttggatccagaggatatgagattgatgtggcaggatcctgttgtaagtaaagagtggaatgatgctggggaagagcaaggacagaaagttcacctgtcacgggaccctgatggtgaagcatatctcacacaaactgaaatgatggtgaggagtctgttgaactccatgatattgatagcaatagttctagaatattggaatcctattgaaacctgtcaagtaaatcaccacttcccaacgtgcaattccgccttttcaacttttcaagtctaagccaccaaaatttcactaaagtttgcctaacataaagaaattatcaatactatatttaacaaagtggttaccgagtaaatcaccggttaggagtatttgttacaaagctatttgaattaagtttgctaaggcgctaagctatgaaaataaacagtaaaggttcttctatattctaagttctgtctgtttttacgcaactgtggctttgaactgattcttgtgtacatccattggttctttcaggcagtggcggcaattaccgtccatagacatttcaaatcgcagctagacccgtatatgataggagcacttgctgaaattgcaagtggaaggagactctttgtagatacctatgatcgcaagactaaagaaaccaaggttggcatactgcaggtggcacctgaagttgctcaatggcttggaaggttacaagagttatgacattgaagataatactaatttgctgtactggcctcttgtgaatgtctattttggtgctgcttatgcaaaatggctcttctcttgtgatgacagacaaagaactgaagaatttgttgttagagcatataaaggcggcaaaaagaaggctgctcacaaatcaacttcccccatcttccagcgttatctttatgtgaaagagaacctgttgtctataagacaaccagaaatttgccatgacctcgctcctgaccaagaaaaactgtcaagcacagaatcacagttgatatattgggattccaaggtatcagaggctgatatggatgcaatgtggaaacatcctgatgtgtataaggagtggataaaatctggtgagagacgtggaaatgtacgattctcccatgatgcaaagaacaggccttacctttctcgcgttgaggtgaaggctgttgccgaaataatcatatcacgccatttgagcacaagaggagtaaaaccagaagctctcgcagcacttgcagaggtttgcagtatgcgctttgttcatggagtaagtacccggactggattgatgggaatagactaccctactgctgtatggctttccagggattgtggctacagggcatatacactgatctctgtggatgatctctacaatccttttgcatcaatgtactttggtgcatcgtacttggcatggttgtctcagtacgaaggaagggagcaaagctacgaattcattgtccaggcttaccttgggggaccagagaatgttagtcttcaggagactggaccgttttggaaccaattcctggagtcattaacacagtatcaagatccaaagaaggacaataataatagctgctgtatcttgtgaagttatctgatacctcttccaactttggttactgaagtttctgctgaggatcatttatgaatgctcatcgacattcttgccaaatttcaaatcccctcccgaagggttcgggtactggcaaacaattttgcttgctagacaacacgaggtacaggataacaggggctgtcagttcgttcatacattttggtcgctggcgccttgctcatgtttaaacaattattgatcccatctcggttcatacagctgcccacacccccacccccggttccatatgttttttgttctacttttaccatcagaaagttaacgcccttcctgttctttccgctcattggtgtatggcatactgtacctctgttgtataataataggaactttagaagaaaatggcctttgtaaaattatcgacgctccatagtacatgtgctaccgttatagatgtaccaactgatactctgatagcagaaccgtaaaaatgtcgtcgcagactcgcagctgtgaacacagccatgttatcgctggtcctgactgtagaaaag

SEQ ID NO: 42121 - DNA, 1878 bp, Zea Mays
cactgttcggcctcagcgtgtgcgcgacgctgaagaacggcagcgacgaaaacaaagaactactgatcaatataaaatggctgtaagcttcaaatactgggacgattgcttggatccagaggatatgagattgatgtggcaggatcctgttgtaagtaaagagtggaatgatgctggggaagagcaaggacagaaagttcacctgtcacgggaccctgatggtgaagcatatctcacacaaactgaaatgatggcagtggcggcaattaccgtccatagacatttcaaatcgcagctagacccgtatatgataggagcacttgctgaaattgcaagtggaaggagactctttgtagatacctatgatcgcaagactaaagaaaccaaggttggcatactgcaggtggcacctgaagttgctcaatggcttggaagggaactaggttacaagagttatgacattgaagataatactaatttgctgtactggcctcttgtgaatgtctattttggtgctgcttatgcaaaatggctcttctcttgtgatgacagacaaagaactgaagaatttgttgttagagcatataaaggcggcaaaaagaaggctgctcacaaatcaacttcccccatcttccagcgttatctttatgtgaaagagaacctgttgtctataagacaaccagaaatttgccatgacctcgctcctgaccaagaaaaactgtcaagcacagaatcacagttgatatattgggattccaaggtatcagaggctgatatggatgcaatgtggaaacatcctgatgtgtataaggagtggataaaatctggtgagagacgtggaaatgtacgattctcccatgatgcaaagaacaggccttacctttctcgcgttgaggtgaaggctgttgccgaaataatcatatcacgccatttgagcacaagaggagtaaaaccagaagctctcgcagcacttgcagaggtttgcagtatgcgctttgttcatggagtaagtacccggactggattgatgggaatagactaccctactgctgtatggctttccagggattgtggctacagggcatatacactgatctctgtggatgatctctacaatccttttgcatcaatgtactttggtgcatcgtacttggcatggttgtctcagtacgaaggaagggagcaaagctacgaattcattgtccaggcttaccttgggggaccagagaatgttagtcttcaggagactggaccgttttggaaccaattcctggagtcattaacacagtatcaagatccaaagaaggacaataataatagctgctgtatcttgtgaagttatctgatacctcttccaactttggttactgaagtttctgctgaggatcatttatgaatgctcatcgacattcttgccaaatttcaaatcccctcccgaagggttcgggtactggcaaacaattttgcttgctagacaacacgaggtacaggataacaggggctgtcagttcgttcatacattttggtcgctggcgccttgctcatgtttaaacaattattgatcccatctcggttcatacagctgcccacacccccacccccggttccatatgttttttgttctacttttaccatcagaaagttaacgcccttcctgttctttccgctcattggtgtatggcatactgtacctctgttgtataataataggaactttagaagaaaatggcctttgtaaaattatcgacgctccatagtacatgtgctaccgttatagatgtaccaactgatactctgatagcagaaccgtaaaaatgtcgtcgcagactcgcagctgtgaacacagccatgttatcgctggtcctgactgtagaaaag

SEQ ID NO: 42122 - DNA, 1151 bp, Zea Mays
tgatgttcaagtaaatctgaagcacctcattgtctcgaactagtcactaagctcctccgcctgttcgagaggaaggaaagacataaagatggagtctctagagtcctctagcatgaagaagcaaagccagtagttgattggagaacctaccagcagatgcagaaattgtacgggtgctccagcacataggcccgccacaaaattccacctaaataaggaaggggtaaaacataaaatcgcatagagaaactgtttctatatgtagtgtaatattctgattgtttggagctctgctatggaaacatcatatggatcaagaactatatgatcaaacactaaccacagtagaagcagcaggctttccacggaagagaacactaatggacacagaaaagctggggtaaccatgtgcaaagttcgttgttccatctggagggagaaatttggtagattagatccccgtcatgctaacttaattttctcattaaattcaggtacaataacccatatatgcaggtacacccttactgctgtgaaatatcagatatatgaattgtactagtccttctatttctcaatctgcttgtcactaataatacacaggactgaattctttttctcgccggggtaacagtaatacagagaactatcaccttctaaatgaatgaagtggaggatagactaatctgttcaaattcacaggtttgctgtaaaaaatcgagaaattatctggaaaactactggagctatccggtattacaaagtacaaaaatggttacaatgttaaatagatgttcgtcaaatcagaggtaggaaccgagcaagggaccaaacctaaagggtcaatgcaccagaggtactctgatagggaatctccaacaaggccgccttcctccccaagtatgaggtggtctttgaagttcttggtgacaacttccaaaatgactgattcactcaacttgtctgtgctgaacaaaatatagagcactagattgaaacactacgctgtttcactttactgcatgaaacgaggcgctaatatcttatacctgctaccttatatagcaattaaactaagaactggcgcagcacgacaataacagcgagaagcattcttactctgtcaccaggtctgcaacacctttatagtg

SEQ ID NO: 42123 - DNA, 583 bp, Zea Mays
atggatacagaactaacagggtcgtggtcgtatggaagggaaggtgtaaatcagggccctcacaggaaaggcacatgctatgggcaaaggcaccgcggagcacagcggcgtatgacgagatccacagaagaggcacatgctgtgataagcaaggatgaacggagaactggcttgaatttccaggttacaaggccatccagtttccaggatttctacatatatgcatttcgttattgcctcacagaggataagaagaaatgtatagaaataccagctgcttgtgagttgctgaatctagtattaggcttacagttccgccctcaggttgacaagcttaataattacctcatggcatggctatccttagtgacctctgaattgacaatgattgcaggcatggcagtggggttcaaccttgtgtttgaacacgacaatcttatcacagccatatgttttgcaagtgttgttgttaatctactaccatacacactctcccgactgtcacccacataccccagtcaatatgaatgcgatgtttcccaagttgagtggtgaaagcgcttattcactgatggcacttctt

SEQ ID NO: 42124 - DNA, 1926 bp, Zea Mays
ggtccttgcggtacggcttcggatacaagcgtgatggtgagaagcaacccggaatgctgatccaaaccgggggaccggcttctcggattcggcccattagttacgtccgttttaatctgtcgaggaggcccacaaagcccagaccaggcaggatcttcccgttcgcttccccatttcgccctccccctccattcaaatcccgctgcttccgccaccggctaccctcgcggcctcgcccgtggccacctcctttcctctttccatttccgttcctccgctcccgatccctaaaccctacctaccccaaacccgcggcggcggcggcgcgactgttgggtttccttggtcatgggctgcttcctctcctgcttccggggcggctccaacccgtcgggcgatctccgcgacccgctcgtgagggagagccgcatcggggacgcctttgtcaacgacgagaagaagcttgatgaagcgactggaaagctggatgtcgaggcggctactgaccacggagtcgacgacgagcttcggagagaggcaaattatctcaaatcatgtggcacaatatcacagaccccaccggaaattctagattcaatcccaatcaactcagaagatgctaacgagtgcggcgatacaccgaccaacgtgcagcagacgaaacatgtagtggtagttgaagagaactcatctgaactgctcaactccgatgatcacgatgtactacataagcaggacactgatgaagggaggactctcaggacgggatcagagactcaaccatccttagaagaagttaagccttcgtgccaccagaacgtggtgagagaccaaagcaccgactccagtgactcgccctatccaacccctctggtgctcaggggtgacatccagactcctggcaccgtatacgccgccgctcacaaggaggcttggaagcctgggaagcgcgcgagggcgttcatctaccctgtcctgcgccccatcgagaacaagatgcagtggatggaactgaaagccgccgagtctcctactgtgctatcacccaaccctccaaaaagaaggaacctgagcgcagcaggttccggcgacaaggctcaccagccgcctacacgttcagcgttcgccggatcttcagagcacggatccttcccaaatacttacagccgtgcagcgcaggacggagtgatgtcgcccgatgaacccaagtgccagaacggcttggaacagcaggacggacgcgaagagctatcgacgcgaagttctggacgcgggaagcgtggtgtcgcaagcctgtctcattggctgaagccatcgtcatcgtccgcggatgacggcagccccgacgacggcagcagcaattttgttggaacggaggaggagaagacacggtgtggggcgaacgtctctgatgtgcccttctttcctgcgttcgggttggactgggagggggagaccgacaagcctactcctgtgctgcccaaggcgtgggacggcaacggcatcccgaacaccacaaccaaatacaaggaggaccagaaggtaagctggcacgcgacgccgttcgaggagaggctgctgaaggttctgtctgacgagaagcctcggcatgaaaggaggatcagcgggaagcttatccacctcgacgaaaacgccgagtagaggggccttttgcgccgtcctctgcatcaagaaccgtctaaagaatggtccagtgctgcgtggaatgttacaagcatatgtgatgacgtgtcaataaaaggacaaacatgccagtctcatagtctggtttcatgagaaacatgaacatcctcatatattaaaaaaaacctgtgcggtggttttcgtggcctcgtcggtctttttatgtattgagaccgttctctctgaaccgctaaacataacatcagttccttgtgtgccacc

SEQ ID NO: 42125 - DNA, 1641 bp, Zea Mays
ccacctgcgacctctcaaatctcgcggacccgctcgtgagggagagccgcatcggggacgcctttgtcaacgacgagaagaagcttgatgaagcgactggaaagctggatgtcgaggcggctactgaccacggagtcgacgacgagcttcggagagaggcaaattatctcaaatcatgtggcacaatatcacagaccccaccggaaattctagattcaatcccaatcaactcagaagatgctaacgagtgcggcgatacaccgaccaacgtgcagcagacgaaacatgtagtggtagttgaagagaactcatctgaactgctcaactccgatgatcacgatgtactacataagcaggacactgatgaagggaggactctcaggacgggatcagagactcaaccatccttagaagaagttaagccttcgtgccaccagaacgtggtgagagaccaaagcaccgactccagtgactcgccctatccaacccctctggtgctcaggggtgacatccagactcctggcaccgtatacgccgccgctcacaaggaggcttggaagcctgggaagcgcgcgagggcgttcatctaccctgtcctgcgccccatcgagaacaagatgcagtggatggaactgaaagccgccgagtctcctactgtgctatcacccaaccctccaaaaagaaggaacctgagcgcagcaggttccggcgacaaggctcaccagccgcctacacgttcagcgttcgccggatcttcagagcacggatccttcccaaatacttacagccgtgcagcgcaggacggagtgatgtcgcccgatgaacccaagtgccagaacggcttggaacagcaggacggacgcgaagagctatcgacgcgaagttctggacgcgggaagcgtggtgtcgcaagcctgtctcattggctgaagccatcgtcatcgtccgcggatgacggcagccccgacgacggcagcagcaattttgttggaacggaggaggagaagacacggtgtggggcgaacgtctctgatgtgcccttctttcctgcgttcgggttggactgggagggggagaccgacaagcctactcctgtgctgcccaaggcgtgggacggcaacggcatcccgaacaccacaaccaaatacaaggagaaggtaagctggcacgcgacgccgttcgaggagaggctgctgaaggttctgtctgacgagaagcctcggcatgaaaggaggatcagcgggaagcttatccacctcgacgaaaacgccgagtagaggggccttttgcgccgtcctctgcatcaagaaccgtctaaagaatggtccaggtggtggtggccgccagcccaccatatgaactccgtttttcagccgcatgtcacctgtagatagagtttctttcgctgagttatgctctgcactctgcagtgctgcgtggaatgttacaagcatatgtgatgacgtgtcaataaaaggacaaacatgccagtctcatagtctggtttcatgagaaacatgaacatcctcatatattaaaaaaaacctgtgcggtggttttcgtggcctcgtcggtctttttatgtattgagaccgttctctctgaaccgctaaacataacatcagttccttgtgtgccacc

SEQ ID NO: 42126 - DNA, 1355 bp, Zea Mays
caataattaaaaaacaggaaaaagaagatacgtgaattgcagagaacaaccaccaatggtcacgactgccgtcgcggcggtcgccggcgccgtgccgccagctcggaaagcccaagcggtaactgtggccacaaccacagcactacctcccaccctcactagaaggcagctcctcgccgcggtcgccaccgcctccaccctccccacggccgccgcctcagctgcggcccccaggttcgccgagattccgggctccggcggcgtgaaggccctggacctccgggaaggttcgggagagatcccggccgttggcgaccaggttgcggttcattattatgggagattagcagcgaagcaaggatggcgcttcgattcgacgtatgatcacaaggacgagaccggcgatcccatgccgtttgtcttcacccttggatccggcaagcagtgaagtccatgagagtcggcggtcttcgccgagtgatcattccaccatcgcagggataccaaaacacgtcacaagaaccggttcctcctaatttctttgatcggcagaggctgttcaccactatattcaacccgacgcgcctcgcaaatggcgagggttccactctcggcacacttatcttcgacatcgagctaatcaacattaggcaacgtccataactgttctgctccatactcttgtgtctaaaaagttgttccgtgcaagaatctggttatgctttaagtaactgtcagcgctccttcggtcaatccccaattacatattgtaatgcatactgatcgctgacagacgatatatgaagaaaaatcaattgaatgcggatttgattccgttgttctacccctgaaatgtaactccttttatgcttaaaagtcgttgtgtactctatgccgctggaaaagcagccttggctttcacaccagcaaaaggttggattaagtgacagcatcctgtaatctatgtaactatgtttgagagagaaaacaccagagattaacaaacaccaggtcgaggagaggcctccttcacaaacatgaacgaggagccaccatatgggctgatccatgaagccttgccagacctgaacgaggggccaccagaacccttccaaatccatgaagcacagcttgttggaggtgagattgctggagggcaacatgaaggacaacatcagttcgggtaagttctttcattatttgttacatctctataattatttcagttgtgctgaccccgcactgtagcgcatgctgatgacgaacaacatcagcctagctaatcttgatgagcaccaagcagatgcagaggccacacctgacctcagtggtgcagcagcctacttaaaacgaac

SEQ ID NO: 42127 - DNA, 540 bp, Zea Mays
cctctcttcttcaccatcgcctcgctcgcctcctccgtcgtcgagccagcccttctccgtatccgtcgccatcacccccggatctgcctcccccatgaccgacgaccaacgagagcggcgtgagacggctttaggcgacgaaggcggcccacaccatgtcagccaacgacgcacagcggtggaagcacgcgatgggagctgacgacgcccttcctcggacggtatgcctacccccaatcaggtcatcgtcggcctcctgcagctgtccctccatcacctccttcaaggtttaggcgctccaccacctcagtccgggtgcactgtcttgccctcgactccagtgcctgtcacctcctcctgggccttggcgttaccgtggcccctcgcacagagaaccctcggtccaacaagcatctaggcgtctttggtagtggtctgtcaacaacttacaagatgatgcaatatgtaaagataggcttcagcatatgagacaacatagagattagaatttctacatgtgtaaagtcagcaaggactctg

SEQ ID NO: 42128 - DNA, 546 bp, Zea Mays
cctctcttcttcaccatcgcctcgctcgcctcctccgtcgtcgagccagcccttctccgtatccgtcgccatcacccccggatctgcctcccccatgaccgacgaccaacgagagcggcgtgagacggctttaggcgacgaaggcggcccacaccatgtcagccaacgacgcacagcggtggaagcacgcgatgggagctgacgacgcccttcctcggacggtatgcctacccccaatcaggtcatcgtcggcctcctgcagctgtccctccatcacctccttcaaggtttaggcgctccaccacctcagtccgggtgcactgtcttgccctcgactccagtgcctgtcacctcctcctgggccttggcgttaccgtggcccctcgcacagagaaccctcggtccaacaagcatctaggcgtctttggtagtggtctgtcaacaacttacaagttacagatgatgcaatatgtaaagataggcttcagcatatgagacaacatagagattagaatttctacatgtgtaaagtcagcaaggactctg

SEQ ID NO: 42129 - DNA, 4226 bp, Zea Mays
ccgccgccgtttcttgattctcccatctacatcttcctcgcagcgccggcgcggcggcgctccatcttccgctccctcccttacttgcgcttggcacgcaggcgacggcggcggcgcccagtctcgtactctcagcggcggcgtcagtggcttcccctcccgcctctcgccagtcgcctcgcgccctcgcctccggtcctgcgcacgccggcctgttaccctgcgacattgttgaattctctgaagtgtgtgctcttgtaaaggcttgctaaaatggcaaatttaaacataaccaacatcttggagaagatgacagggaaagataaagactacagatatatggcaacatcagatctgcttagtgaattgaataaagaaagcttcaaagctgatcaagaccttgagccaaagttaacgattactgttcttcaacaacttgaggatgcttcgggagatgtttctggtttagctgttaaatgcttggccccactcgtcaagaaggttggtgaggacagggttgtggagatgaccaataaactttgtgataagttgataaatggaaaggaccagcatcgggataccgctagtatagccctcaagacaatcattgctgaagttactacaccgtcacttgctgaaaagatcttgctttctcttgccccgcaactcatcaagggtgtcaatactgcaaaaagtgctgaaattaaatgcgaatgtcttgatatattggcggatgtgcttcatagatttggcaacttgatcacaaaagatcatgagtacatgctcaatgcacttttatcccaattgggttctaacccagcaagcgtcagaaagaaatctatttcttgcattgcatcacttgctccaagtttatcagatgatttgttagcaaaggcaactttgcaagttgtccagttgctgaaaaatagaggtgcaaaatctgaaattacccgaacaaatatccagatgattggttctctaagtcgttctgttgggtaccgttttgggccacaccttgctgaaactgttcctttgcttataagctattgtacaagtgcatctgaaaatgatgaagagctccgtgaatacagcttgcaggctcttgagagctttatgctcaggtgcccaagggatatatccccatattgtgagggcatcttgaatcttgctttggaatatgtgagctatgatcctaatttcactgatagcatggatgaggatactgatgaggaagcgaaggaagaggatgatgacgatgagagtgcaaatgagtacacagatgatgaggatgcaagctggaaagtccgtagggcatcagcaaagtgcctatctgcaattatagtgtctcgtcctgaaatgttgtcgaagatgtttctagaggcttgtccaaagttaattgaacgatttcgggaaagagaggagaatgtaaagatggatatatttaacaccttcattgagctgttacgccaaactggtaatgttacgaaaggacaaggcgacatcgatgagtccagccctcgctggttgctgaagcaagaggtcccaaaagttgtcaagtctatcaacaggcagttacgtgaaaaatcaatcaagacaaaggttggggcattttcagtactgaaggagcttgtggttgtattaccagactgtcttgctgatcatttcgggtcacttgttcctgggattgagaaggctttgaatgacaagtcttctacctccaacctgaagattgaagcccttgtattaacaaggcttgttatggcttcacattcaccatctgtgtttcatccatacatcaaggctctttctgcacctatactgtctgctatcagagatagatattataaagtcactgctgaggctttgcgggtgtgtggagagctagtccgtgtccttcgtccaaatctcgagacaacctcagttgattttaagccatacattggtccaatctataatgcaatactgggacgtttggccaatcaagatcaggatcaggaggtaaaagaatgcgccatatcttgcatgagtttggtggtctctacttttggtgatggtcttgaaagagaattaccagcatgccttcccatactcgttgacaggatgggtaatgaaattacaagacttacagctgtcaagttattgcgaattcacctctacgtattgatctctcgtgtgtcctggatcatgttgtttctgagctcacagctttccttcgcaaggccaacagagctcttaggcaggcgacgttgggaactctaaattctttggttgtcacatatggtggtcagattggctcttcttcgtatgagacaataatcgcggaactttcaaccctcataagtgacatggatttgcatatgaccgctcttgcattggaactttgttgcacaataatggttgacagaaaatctattcaaaacgttggtttagctgttagagataaagttttgcctcaggcccttgttttgatcaggagtgccctgttgcaagggcaggcactgcaggctcttcagaggttttttgcatcacttgttcaatctgcaaatactagctttgatgctttgttggagtcccttatttctgctgctaagccatcacattcaggtagtcttgctaagcaagcactgtcttctattgctaagtgtgttgctgttctatgcttagcagctggtgaccagaagtgtgcatctacaattgaaatgcttaaaggcattttgaaagacgacagcactactaactctgctaaacaacacatggccttattatgtctgggagaaattgggaggaggaaggacctcagcaatcatgttcaaattgagaacatcgtcattgaatcgtttcaatcaccttttgaggagattaagtccgcagcatcctatgcacttggaaacattgctgttggcaacctctccaagtatttaccatttattttggatcagattgacaatcaacagaagaagcaatatctgttgctccattcacttaaagaggtaatcgtgcgacaatctgttgatcatactggccagagtgagctacaggattcaaacattgagaagatattggcattgctcttcaatcactgtgaaagtgaggaggagggagttcggaatgttgttgcagagtgtttaggaaaaatttctctaattgaaccaaaaaaactagtccctgctttggaggtacgcacgtctagcccagcagcaaatacaagagctacggttgctattgctataaaatattcaattgttgaacgacctgagaaaatagatgaaatcatgtactccaagatatctactttcttgatgttgattaaagacagcgataggcatgtgagaagagcagcagttctggctttgagcacagcagcgcacaacaagccaaatttgattaaaggtcttcttccagagatattacctcttctatacgaccaaactgttattaagcaagagttaatcaggacagttgatcttgggcctttcaaacatgttgtagatgatggtcttgaactcaggaaagctgcctttgaatgtgtggatactttattggacagttgtcttgatcaagtgaatccatcgtccttcattgtacctttcctcttgtctggtttaggtgaccattacgacgtgaaaatgccttgccatttgattctatcaaagctagcagacaagtgcccttccgccgtccttgctgtcctggactccatagttgaaccaatcgagaaaactataagccacaaacccaagggggatgcagtgaagcaggaggttgatcggaacgaggacatgatccgcagcgctctcagggcaatatcttctctaagccgcataagcggcagcgactacagcatacggttcaagaatctgatgaacaagataacggccacccccgcgctcgccgagaagtacaactcggtgcgcggcgaatgagacctgggttcttgtacatggtagaggaataggttaaacacccagagttgtcgcgcgctcgtcaatcctgttgccgcttccccgcatggttgctgaggcaaaagtctgtactctgatgatgacggtggttgatttttgactgctggacatagttgtcttgtacaaaatctggtggtaaattcagtagaattgccgccgatacatttacctggtggttctcttgtcgcagttcagtttcagttgacctatgaagcgctgatgcagatcagactattctggcatctgttcttttttctttttttc

SEQ ID NO: 42130 - DNA, 3836 bp, Zea Mays
ccgccgccgtttcttgattctcccatctacatcttcctcgcagcgccggcgcggcggcgctccatcttccgctccctcccttacttgcgcttggcacgcaggcgacggcggcggcgcccagtctcgtactctcagcggcggcgtcagtggcttcccctcccgcctctcgccagtcgcctcgcgccctcgcctccggtcctgcgcacgccggcctgttaccctgcgacattgttgaattctctgaagtgtgtgctcttgtaaaggcttgctaaaatggcaaatttaaacataaccaacatcttggagaagatgacagggaaagataaagactacagatatatggcaacatcagatctgcttagtgaattgaataaagaaagcttcaaagctgatcaagaccttgagccaaagttaacgattactgttcttcaacaacttgaggatgcttcgggagatgtttctggtttagctgttaaatgcttggccccactcgtcaagaaggttggtgaggacagggttgtggagatgaccaataaactttgtgataagttgataaatggaaaggaccagcatcgggataccgctagtatagccctcaagacaatcattgctgaagttactacaccgtcacttgctgaaaagatcttgctttctcttgccccgcaactcatcaagggtgtcaatactgcaaaaagtgctgaaattaaatgcgaatgtcttgatatattggcggatgtgcttcatagatttggcaacttgatcacaaaagatcatgagtacatgctcaatgcacttttatcccaattgggttctaacccagcaagcgtcagaaagaaatctatttcttgcattgcatcacttgctccaagtttatcagatgatttgttagcaaaggcaactttgcaagttgtccagttgctgaaaaatagaggtgcaaaatctgaaattacccgaacaaatatccagatgattggttctctaagtcgttctgttgggtaccgttttgggccacaccttgctgaaactgttcctttgcttataagctattgtacaagtgcatctgaaaatgatgaagagctccgtgaatacagcttgcaggctcttgagagctttatgctcaggtgcccaagggatatatccccatattgtgagggcatcttgaatcttgctttggaatatgtgagctatgatcctaatttcactgatagcatggatgaggatactgatgaggaagcgaaggaagaggatgatgacgatgagagtgcaaatgagtacacagatgatgaggatgcaagctggaaagtccgtagggcatcagcaaagtgcctatctgcaattatagtgtctcgtcctgaaatgttgtcgaagatgtttctagaggcttgtccaaagttaattgaacgatttcgggaaagagaggagaatgtaaagatggatatatttaacaccttcattgagctgttacgccaaactggtaatgttacgaaaggacaaggcgacatcgatgagtccagccctcgctggttgctgaagcaagaggtcccaaaagttgtcaagtctatcaacaggcagttacgtgaaaaatcaatcaagacaaaggtcagtccttcagttttcctgcaattcatggttctggaattgtaagtctgattatattcctaacattttccaggttggggcattttcagtactgaaggagcttgtggttgtattaccagactgtcttgctgatcatttcgggtcacttgttcctgggattgagaaggctttgaatgacaagtcttctacctccaacctgaagattgaagcccttgtattaacaaggcttgttatggcttcacattcaccatctgtgtttcatccatacatcaaggctctttctgcacctatactgtctgctatcagagatagatattataaagtcactgctgaggctttgcgggtgtgtggagagctagtccgtgtccttcgtccaaatctcgagacaacctcagttgattttaagccatacattggtccaatctataatgcaatactgggacgtttggccaatcaagatcaggatcaggaggtaaaagaatgcgccatatcttgcatgagtttggtggtctctacttttggtgatggtcttgaaagagaattaccagcatgccttcccatactcgttgacaggatgggtaatgaaattacaagacttacagctgtcaaggcattttcagttattgcgaattcacctctacgtattgatctctcgtgtgtcctggatcatgttgtttctgagctcacagctttccttcgcaaggccaacagagctcttaggcaggcgacgttgggaactctaaattctttggttgtcacatatggtggtcagattggctcttcttcgtatgagacaataatcgcggaactttcaaccctcataagctggtgaccagaagtgtgcatctacaattgaaatgcttaaaggcattttgaaagacgacagcactactaactctgctaaacaacacatggccttattatgtctgggagaaattgggaggaggaaggacctcagcaatcatgttcaaattgagaacatcgtcattgaatcgtttcaatcaccttttgaggagattaagtccgcagcatcctatgcacttggaaacattgctgttggcaacctctccaagtatttaccatttattttggatcagattgacaatcaacagaagaagcaatatctgttgctccattcacttaaagaggtaatcgtgcgacaatctgttgatcatactggccagagtgagctacaggattcaaacattgagaagatattggcattgctcttcaatcactgtgaaagtgaggaggagggagttcggaatgttgttgcagagtgtttaggaaaaatttctctaattgaaccaaaaaaactagtccctgctttggagcatgtgagaagagcagcagttctggctttgagcacagcagcgcacaacaagccaaatttgattaaaggtcttcttccagagatattacctcttctatacgaccaaactgttattaagcaagagttaatcaggacagttgatcttgggcctttcaaacatgttgtagatgatggtcttgaactcaggaaagctgcctttgaatgtgtggatactttattggacagttgtcttgatcaagtgaatccatcgtccttcattgtacctttcctcttgtctggtttaggtgaccattacgacgtgaaaatgccttgccatttgattctatcaaagctagcagacaagtgcccttccgccgtccttgctgtcctggactccatagttgaaccaatcgagaaaactataagccacaaacccaagggggatgcagtgaagcaggaggttgatcggaacgaggacatgatccgcagcgctctcagggcaatatcttctctaagccgcataagcggcagcgactacagcatacggttcaagaatctgatgaacaagataacggccacccccgcgctcgccgagaagtacaactcggtgcgcggcgaatgagacctgggttcttgtacatggtagaggaataggttaaacacccagagttgtcgcgcgctcgtcaatcctgttgccgcttccccgcatggttgctgaggcaaaagtctgtactctgatgatgacggtggttgatttttgactgctggacatagttgtcttgtacaaaatctggtggtaaattcagtagaattgccgccgatacatttacctggtggttctcttgtcgcagttcagtttcagttgacctatgaagcgctgatgcagatcagactattctggcatctgttcttttttctttttttc

SEQ ID NO: 42131 - DNA, 4220 bp, Zea Mays
ccgccgccgtttcttgattctcccatctacatcttcctcgcagcgccggcgcggcggcgctccatcttccgctccctcccttacttgcgcttggcacgcaggcgacggcggcggcgcccagtctcgtactctcagcggcggcgtcagtggcttcccctcccgcctctcgccagtcgcctcgcgccctcgcctccggtcctgcgcacgccggcctgttaccctgcgacattgttgaattctctgaagtgtgtgctcttgtaaaggcttgctaaaatggcaaatttaaacataaccaacatcttggagaagatgacagggaaagataaagactacagatatatggcaacatcagatctgcttagtgaattgaataaagaaagcttcaaagctgatcaagaccttgagccaaagttaacgattactgttcttcaacaacttgaggatgcttcgggagatgtttctggtttagctgttaaatgcttggccccactcgtcaagaaggttggtgaggacagggttgtggagatgaccaataaactttgtgataagttgataaatggaaaggaccagcatcgggataccgctagtatagccctcaagacaatcattgctgaagttactacaccgtcacttgctgaaaagatcttgctttctcttgccccgcaactcatcaagggtgtcaatactgcaaaaagtgctgaaattaaatgcgaatgtcttgatatattggcggatgtgcttcatagatttggcaacttgatcacaaaagatcatgagtacatgctcaatgcacttttatcccaattgggttctaacccagcaagcgtcagaaagaaatctatttcttgcattgcatcacttgctccaagtttatcagatgatttgttagcaaaggcaactttgcaagttgtccagttgctgaaaaatagaggtgcaaaatctgaaattacccgaacaaatatccagatgattggttctctaagtcgttctgttgggtaccgttttgggccacaccttgctgaaactgttcctttgcttataagctattgtacaagtgcatctgaaaatgatgaagagctccgtgaatacagcttgcaggctcttgagagctttatgctcaggtgcccaagggatatatccccatattgtgagggcatcttgaatcttgctttggaatatgtgagctatgatcctaatttcactgatagcatggatgaggatactgatgaggaagcgaaggaagaggatgatgacgatgagagtgcaaatgagtacacagatgatgaggatgcaagctggaaagtccgtagggcatcagcaaagtgcctatctgcaattatagtgtctcgtcctgaaatgttgtcgaagatgtttctagaggcttgtccaaagttaattgaacgatttcgggaaagagaggagaatgtaaagatggatatatttaacaccttcattgagctgttacgccaaactggtaatgttacgaaaggacaaggcgacatcgatgagtccagccctcgctggttgctgaagcaagaggtcccaaaagttgtcaagtctatcaacaggcagttacgtgaaaaatcaatcaagacaaagtactgaaggagcttgtggttgtattaccagactgtcttgctgatcatttcgggtcacttgttcctgggattgagaaggctttgaatgacaagtcttctacctccaacctgaagattgaagcccttgtattaacaaggcttgttatggcttcacattcaccatctgtgtttcatccatacatcaaggctctttctgcacctatactgtctgctatcagagatagatattataaagtcactgctgaggctttgcgggtgtgtggagagctagtccgtgtccttcgtccaaatctcgagacaacctcagttgattttaagccatacattggtccaatctataatgcaatactgggacgtttggccaatcaagatcaggatcaggaggtaaaagaatgcgccatatcttgcatgagtttggtggtctctacttttggtgatggtcttgaaagagaattaccagcatgccttcccatactcgttgacaggatgggtaatgaaattacaagacttacagctgtcaaggcattttcagttattgcgaattcacctctacgtattgatctctcgtgtgtcctggatcatgttgtttctgagctcacagctttccttcgcaaggccaacagagctcttaggcaggcgacgttgggaactctaaattctttggttgtcacatatggtggtcagattggctcttcttcgtatgagacaataatcgcggaactttcaaccctcataagtgacatggatttgcatatgaccgctcttgcattggaactttgttgcacaataatggttgacagaaaatctattcaaaacgttggtttagctgttagagataaagttttgcctcaggcccttgttttgatcaggagtgccctgttgcaagggcaggcactgcaggctcttcagaggttttttgcatcacttgttcaatctgcaaatactagctttgatgctttgttggagtcccttatttctgctgctaagccatcacattcaggtagtcttgctaagcaagcactgtcttctattgctaagtgtgttgctgttctatgcttagcagctggtgaccagaagtgtgcatctacaattgaaatgcttaaaggcattttgaaagacgacagcactactaactctgctaaacaacacatggccttattatgtctgggagaaattgggaggaggaaggacctcagcaatcatgttcaaattgagaacatcgtcattgaatcgtttcaatcaccttttgaggagattaagtccgcagcatcctatgcacttggaaacattgctgttggcaacctctccaagtatttaccatttattttggatcagattgacaatcaacagaagaagcaatatctgttgctccattcacttaaagaggtaatcgtgcgacaatctgttgatcatactggccagagtgagctacaggattcaaacattgagaagatattggcattgctcttcaatcactgtgaaagtgaggaggagggagttcggaatgttgttgcagagtgtttaggaaaaatttctctaattgaaccaaaaaaactagtccctgctttggaggtacgcacgtctagcccagcagcaaatacaagagctacggttgctattgctataaaatattcaattgttgaacgacctgagaaaatagatgaaatcatgtactccaagatatctactttcttgatgttgattaaagacagcgataggcatgtgagaagagcagcagttctggctttgagcacagcagcgcacaacaagccaaatttgattaaaggtcttcttccagagatattacctcttctatacgaccaaactgttattaagcaagagttaatcaggacagttgatcttgggcctttcaaacatgttgtagatgatggtcttgaactcaggaaagctgcctttgaatgtgtggatactttattggacagttgtcttgatcaagtgaatccatcgtccttcattgtacctttcctcttgtctggtttaggtgaccattacgacgtgaaaatgccttgccatttgattctatcaaagctagcagacaagtgcccttccgccgtccttgctgtcctggactccatagttgaaccaatcgagaaaactataagccacaaacccaagggggatgcagtgaagcaggaggttgatcggaacgaggacatgatccgcagcgctctcagggcaatatcttctctaagccgcataagcggcagcgactacagcatacggttcaagaatctgatgaacaagataacggccacccccgcgctcgccgagaagtacaactcggtgcgcggcgaatgagacctgggttcttgtacatggtagaggaataggttaaacacccagagttgtcgcgcgctcgtcaatcctgttgccgcttccccgcatggttgctgaggcaaaagtctgtactctgatgatgacggtggttgatttttgactgctggacatagttgtcttgtacaaaatctggtggtaaattcagtagaattgccgccgatacatttacctggtggttctcttgtcgcagttcagtttcagttgacctatgaagcgctgatgcagatcagactattctggcatctgttcttttttctttttttc

SEQ ID NO: 42132 - DNA, 3910 bp, Zea Mays
ccgccgccgtttcttgattctcccatctacatcttcctcgcagcgccggcgcggcggcgctccatcttccgctccctcccttacttgcgcttggcacgcaggcgacggcggcggcgcccagtctcgtactctcagcggcggcgtcagtggcttcccctcccgcctctcgccagtcgcctcgcgccctcgcctccggtcctgcgcacgccggcctgttaccctgcgacattgttgaattctctgaagtgtgtgctcttgtaaaggcttgctaaaatggcaaatttaaacataaccaacatcttggagaagatgacagggaaagataaagactacagatatatggcaacatcagatctgcttagtgaattgaataaagaaagcttcaaagctgatcaagaccttgagccaaagttaacgattactgttcttcaacaacttgaggatgcttcgggagatgtttctggtttagctgttaaatgcttggccccactcgtcaagaaggttggtgaggacagggttgtggagatgaccaataaactttgtgataagttgataaatggaaaggaccagcatcgggataccgctagtatagccctcaagacaatcattgctgaagttactacaccgtcacttgctgaaaagatcttgctttctcttgccccgcaactcatcaagggtgtcaatactgcaaaaagtgctgaaattaaatgcgaatgtcttgatatattggcggatgtgcttcatagatttggcaacttgatcacaaaagatcatgagtacatgctcaatgcacttttatcccaattgggttctaacccagcaagcgtcagaaagaaatctatttcttgcattgcatcacttgctccaagtttatcagatgatttgttagcaaaggcaactttgcaagttgtccagttgctgaaaaatagaggtgcaaaatctgaaattacccgaacaaatatccagatgattggttctctaagtcgttctgttgggtaccgttttgggccacaccttgctgaaactgttcctttgcttataagctattgtacaagtgcatctgaaaatgatgaagagctccgtgaatacagcttgcaggctcttgagagctttatgctcaggtgcccaagggatatatccccatattgtgagggcatcttgaatcttgctttggaatatgtgagctatgatcctaatttcactgatagcatggatgaggatactgatgaggaagcgaaggaagaggatgatgacgatgagagtgcaaatgagtacacagatgatgaggatgcaagctggaaagtccgtagggcatcagcaaagtgcctatctgcaattatagtgtctcgtcctgaaatgttgtcgaagatgtttctagaggcttgtccaaagttaattgaacgatttcgggaaagagaggagaatgtaaagatggatatatttaacaccttcattgagctgttacgccaaactggtaatgttacgaaaggacaaggcgacatcgatgagtccagccctcgctggttgctgaagcaagaggtcccaaaagttgtcaagtctatcaacaggcagttacgtgaaaaatcaatcaagacaaaggttggggcattttcagtactgaaggagcttgtggttgtattaccagactgtcttgctgatcatttcgggtcacttgttcctgggattgagaaggctttgaatgacaagtcttctacctccaacctgaagattgaagcccttgtattaacaaggcttgttatggcttcacattcaccatctgtgtttcatccatacatcaaggctctttctgcacctatactgtctgctatcagagatagatattataaagtcactgctgaggctttgcgggtgtgtggagagctagtccgtgtccttcgtccaaatctcgagacaacctcagttgattttaagccatacattggtccaatctataatgcaatactgggacgtttggccaatcaagatcaggatcaggaggtaaaagaatgcgccatatcttgcatgagtttggtggtctctacttttggtgatggtcttgaaagagaattaccagcatgccttcccatactcgttgacaggatgggtaatgaaattacaagacttacagctgtcaaggcattttcagttattgcgaattcacctctacgtattgatctctcgtgtgtcctggatcatgttgtttctgagctcacagctttccttcgcaaggccaacagagctcttaggcaggcgacgttgggaactctaaattctttggttgtcacatatggtggtcagattggctcttcttcgtatgagacaataatcgcggaactttcaaccctcataagctggtgaccagaagtgtgcatctacaattgaaatgcttaaaggcattttgaaagacgacagcactactaactctgctaaacaacacatggccttattatgtctgggagaaattgggaggaggaaggacctcagcaatcatgttcaaattgagaacatcgtcattgaatcgtttcaatcaccttttgaggagattaagtccgcagcatcctatgcacttggaaacattgctgttggcaacctctccaagtatttaccatttattttggatcagattgacaatcaacagaagaagcaatatctgttgctccattcacttaaagaggtaatcgtgcgacaatctgttgatcatactggccagagtgagctacaggattcaaacattgagaagatattggcattgctcttcaatcactgtgaaagtgaggaggagggagttcggaatgttgttgcagagtgtttaggaaaaatttctctaattgaaccaaaaaaactagtccctgctttggaggtacgcacgtctagcccagcagcaaatacaagagctacggttgctattgctataaaatattcaattgttgaacgacctgagaaaatagatgaaatcatgtactccaagatatctactttcttgatgttgattaaagacagcgataggcatgtgagaagagcagcagttctggctttgagcacagcagcgcacaacaagccaaatttgattaaaggtcttcttccagagatattacctcttctatacgaccaaactgttattaagcaagagttaatcaggacagttgatcttgggcctttcaaacatgttgtagatgatggtcttgaactcaggaaagctgcctttgaatgtgtggatactttattggacagttgtcttgatcaagtgaatccatcgtccttcattgtacctttcctcttgtctggtttaggtgaccattacgacgtgaaaatgccttgccatttgattctatcaaagctagcagacaagtgcccttccgccgtccttgctgtcctggactccatagttgaaccaatcgagaaaactataagccacaaacccaagggggatgcagtgaagcaggaggttgatcggaacgaggacatgatccgcagcgctctcagggcaatatcttctctaagccgcataagcggcagcgactacagcatacggttcaagaatctgatgaacaagataacggccacccccgcgctcgccgagaagtacaactcggtgcgcggcgaatgagacctgggttcttgtacatggtagaggaataggttaaacacccagagttgtcgcgcgctcgtcaatcctgttgccgcttccccgcatggttgctgaggcaaaagtctgtactctgatgatgacggtggttgatttttgactgctggacatagttgtcttgtacaaaatctggtggtaaattcagtagaattgccgccgatacatttacctggtggttctcttgtcgcagttcagtttcagttgacctatgaagcgctgatgcagatcagactattctggcatctgttcttttttctttttttc

SEQ ID NO: 42133 - DNA, 3622 bp, Zea Mays
ccgccgccgtttcttgattctcccatctacatcttcctcgcagcgccggcgcggcggcgctccatcttccgctccctcccttacttgcgcttggcacgcaggcgacggcggcggcgcccagtctcgtactctcagcggcggcgtcagtggcttcccctcccgcctctcgccagtcgcctcgcgccctcgcctccggtcctgcgcacgccggcctgttaccctgcgacattgttgaattctctgaagtgtgtgctcttgtaaaggcttgctaaaatggcaaatttaaacataaccaacatcttggagaagatgacagggaaagataaagactacagatatatggcaacatcagatctgcttagtgaattgaataaagaaagcttcaaagctgatcaagaccttgagccaaagttaacgattactgttcttcaacaacttgaggatgcttcgggagatgtttctggtttagctgttaaatgcttggccccactcgtcaagaaggttggtgaggacagggttgtggagatgaccaataaactttgtgataagttgataaatggaaaggaccagcatcgggataccgctagtatagccctcaagacaatcattgctgaagttactacaccgtcacttgctgaaaagatcttgctttctcttgccccgcaactcatcaagggtgtcaatactgcaaaaagtgctgaaattaaatgcgaatgtcttgatatattggcggatgtgcttcatagatttggcaacttgatcacaaaagatcatgagtacatgctcaatgcacttttatcccaattgggttctaacccagcaagcgtcagaaagaaatctatttcttgcattgcatcacttgctccaagtttatcagatgatttgttagcaaaggcaactttgcaagttgtccagttgctgaaaaatagaggtgcaaaatctgaaattacccgaacaaatatccagatgattggttctctaagtcgttctgttgggtaccgttttgggccacaccttgctgaaactgttcctttgcttataagctattgtacaagtgcatctgaaaatgatgaagagctccgtgaatacagcttgcaggctcttgagagctttatgctcaggtgcccaagggatatatccccatattgtgagggcatcttgaatcttgctttggaatatgtgagctatgatcctaatttcactgatagcatggatgaggatactgatgaggaagcgaaggaagaggatgatgacgatgagagtgcaaatgagtacacagatgatgaggatgcaagctggaaagtccgtagggcatcagcaaagtgcctatctgcaattatagtgtctcgtcctgaaatgttgtcgaagatgtttctagaggcttgtccaaagttaattgaacgatttcgggaaagagaggagaatgtaaagatggatatatttaacaccttcattgagctgttacgccaaactggtaatgttacgaaaggacaaggcgacatcgatgagtccagccctcgctggttgctgaagcaagaggtcccaaaagttgtcaagtctatcaacaggcagttacgtgaaaaatcaatcaagacaaaggttggggcattttcagtactgaaggagcttgtggttgtattaccagactgtcttgctgatcatttcgggtcacttgttcctgggattgagaaggctttgaatgacaagtcttctacctccaacctgaagattgaagcccttgtattaacaaggcttgttatggcttcacattcaccatctgtgtttcatccatacatcaaggctctttctgcacctatactgtctgctatcagagatagatattataaagtcactgctgaggctttgcgggtgtgtggagagctagtccgtgtccttcgtccaaatctcgagacaacctcagttgattttaagccatacattggtccaatctataatgcaatactgggacgtttggccaatcaagatcaggatcaggaggtaaaagaatgcgccatatcttgcatgagtttggtggtctctacttttggtgatggtcttgaaagagaattaccagcatgccttcccatactcgttgacaggatgggtaatgaaattacaagacttacagctgtcaaggcattttcagttattgcgaattcacctctacgtattgatctctcgtgtgtcctggatcatgttgtttctgagctcacagctttccttcgcaaggccaacagagctcttaggcaggcgacgttgggaactctaaattctttggttgtcacatatggtggtcagattggctcttcttcgtatgagacaataatcgcggaactttcaaccctcataagctggtgaccagaagtgtgcatctacaattgaaatgcttaaaggcattttgaaagacgacagcactactaactctgctaaacaacacatggccttattatgtctgggagaaattgggaggaggaaggacctcagcaatcatgttcaaattgagaacatcgtcattgaatcgtttcaatcaccttttgaggagattaagtccgcagcatcctatgcacttggaaacattgctgttggcaacctctccaagtatttaccatttattttggatcagattgacaatcaacagaagaagcaatatctgttgctccattcacttaaagaggtaatcgtgcgacaatctgttgatcatactggccagagtgagctacaggattcaaacattgagaagatattggcattgctcttcaatcactgtgaaagtgaggaggagggagttcggaatgttgttgcagagtgtttaggaaaaatttctctaattgaaccaaaaaaactagtccctgctttggaggtacgcacgtctagcccagcagcaaatacaagagctacggttgctattgctataaaatattcaattgttgaacgacctgagaaaatagatgaaatcatgtactccaagatatctactttcttgatgttgattaaagacagcgataggcatgtgagaagagcagcagttctggctttgagcacagcagcgcacaacaagccaaatttgattaaaggtcttcttccagagatattacctcttctatacgaccaaactgttattaagcaagagttaatcaggacagttgatcttgggcctttcaaacatgttgtagatgatggtcttgaactcaggaaagctgcctttgaatgtgtggatactttattggacagttgtcttgatcaagtgaatccatcgtccttcattgtacctttcctcttgtctggtttaggtgaccattacgacgtgaaaatgccttgccatttgattctatcaaagctagcagacaagtgcccttccgccgtccttgctgtcctggactccatagttgaaccaatcgagaaaactataagccacaaacccaagggggatgcagtgaagcaggaggttgatcggaacgaggacatgatccgcagcgctctcagggcaatatcttctctaagccgcataaggtttcagtcattgttgaccaccacacttgcacttctagtggtcgaaggaagaccacaacaccaaccagctcatgggttgcctccttagcgcttcccatccttaccaacaaac

SEQ ID NO: 42134 - DNA, 1252 bp, Zea Mays
tgatgaaataggtgcattaccctgcaaggatgctataccaggagagcgaatattagtttgtaaccgatcgaaccctattatgaaggttggtagtttatataaggatatgaaagaatttagattggctataaggcaatacgcgattaacaatgagtttgagttaggaattgagtcaagcgctccattcagatatcgtggttactgtaaaggttgtgattgcccttggagaattaatgcgagacccgaagttgctggttcccccactatagttgtgagtattttttagtacttgtttttttgatcattgaactttcttcggaccatgttgtgatgctaaaacggtgtaaatgatttattttatgcaggtttcagtcattgttgaccaccacacttgcacttctagtggtcgaaggaagaccacaacaccaaccagctcatgggttgcctccttagcgcttcccatccttaccaacaaaccgcatatgggagctaaagaattgcagaccctgttacaagagcagcacaattgcagtattgcttatgataccgtctggaaagggaaagaaaaggccctaacagagttatatggcagctgggaggatagcttcagactattgtttagttggaaggaagctgtattggaggttatgccagattcagtgatcttgtagttgaggctgggaaactttatttcagtagattcttttgtgctttcggcccttgtctgcaaggatttcgtgaaggttgtaggccctatttgagtattgactcaactgcactcaatggtagatggagtggtcacttaccctctgctactagtgttgacgagcacaattggatgtttccagtagcatttggtttctttgagtctgagacgaaagagagttgggtttggttcatgaaacagttacataaggcaattggagaccttcctctactagcaatttgttcagatgcttgcaaaggactaactggagcggtggaggaaatattccctaatgctgagaagagagaatgctttcgccatctaatgcaaaattatgtgaagcatttctctagttccgaacacatgtatcctgctgcacgggcttacagaagcactgtatttgagcaccattttgctaatgtaagggatgtgatgggagtcaagaactggctagatgagtggcatcctttattgtggtatagatgtggtttcaacccagcgataaggtgtgattacataacaaataacattgcagaggttttcaac

SEQ ID NO: 42135 - DNA, 2633 bp, Zea Mays
cagcgctttaggttcaatatatatataaaaaaattgcatcaaaagctgcatcatcctttagtccccttgggaagtattctcgccagtgtcttgtgctccatgtcctttgcattccctcctttgtgtagctgctgtactatactccacagtactttttcggtgagcaggtggccatggagctacttgagctgtgctgtattgtgtgtactcctcttcctacatgtgttgtccagctgctagcatatgctttgctgccccccctcgatcgatctcctctcctctataaatccagctcctgctctttcttctacctccatctccttcacgccttctcgctagctgttctttcctcctctctcaaccctaaccctagatctctgctaccttcctcctcccctccagctagcacaagtctgttcatcttgctgtctttgttgctcatcgtgctccagttctgttcctagctcgctacatatagcgttatactgcatgcccaaaacggaacacatgtttgtgctctcctggccggccagtctcttcattccttgcacagttgcaaatacagttgtgtgacagagataaacagagagtcaaatacgtacataaagagggagccggcccaagggaggaagctatagccaaactggtgtgtggattacaattttgtgtgcttctcctcaccggccagtttgccagaataatggcagcagcttgctcagctccgagaagaaaccagctgtgaggttatcaggaacttgtatggtttcaatttgtttgtggtttttaacacatggcagatcgatcatcctttgcctcaaatgaagtacacatatcgctagtagctcgccttctgcatgctttgggatatgtatgcttcaatataccatcgtgcgtacgtcgtgtgatccctgaattccagaaacatacacacaacatttttttaccatcgatctttattttgatctagactgtattattaatctgaattgagtatatacattgtcatttgtcaacgtgatcatgctttggtttgatttatttctgttttttacatgctcgcttttcttatctgtcaatcctttctactgcttcttctgccctctctacagtgaacatcattcatatatataggcatctttccgcttattattactgttgttttcaaatgaaactgccacgcatttagctaggattggtgctgcaaatgtaaaacacacaaccaaggcccagttcctactggactacattacattacatgaatcaacaaattaacccgttaaaaggcgggtgtctgggttttcattaatttcttttgttccttgattttttttcagttcagttcaatccttaggactagtttggcaaccctattttttcatgggatttccaatttcccaaggaaaaataaactaatttcccttagaaaaatgaaaaacccttagaaaaatagtgttcccaaactagcccttatactgtatatagttatatattagtgtttctccaatgcatggggcttatcatatgatcagtacgtggaaggagctgcttgtagctagctagcacagtgaacagtgcgcgaaggaatttctctcaaaaggttttcgagggaccacacacatcttttttcccaaaaggttaattttgaacgacagagaaagtacacatacatataatccttgtagtcattgtatatgcggtagattaagtgatgatatcatattcatatatgtcgtttaaatttactccctctgatacaaattataagacattttaacttttttcagattcatggacattattatatatgtacttaaatatatatacattatgtctagatacataatgaaaacaacgtatgcagaaaaattgggacaccttatatatagtttattagaacagagagaaagagagagtagttgtttgtgtgtaatgcatgcctagctagtggtttttgattgaaagatcttgtaccggttctccggttggtgttaagactgtctccagcaacgtcctctatatccgtttaatatagtctcctctaaaagatttcatcccatatatcttctttctttccaacaacgttttctaaatcacgtactctatacgtaaatacatatattaaagacatttttaaatttttaatttttgtacagacgtatttgtcatattcttaaatgtattgtacatattttaatttttctaaaccggttgttttaagtatgcaaatggatagaggatcgtttagagaaactatatagagagagaatccaacagcgttcactaaatttagaggatcgtttagaggatgctactgaagagagtagatgacgacctcatcatctaaatttagggtagtgaaggcatctactgtacatgtaatattcctccatataggcatcattttagtgacccttcccccaccgcgcttgttgcggcatgcaggttggcattaggttgccttggtggttaattatgttagcggtttattgttatggcgtgtctcagtttatgttgtggagtgtgtgtcatgttgtcgcttctgctgttgttgtgtggatgcatgcatgtgttttgtgttgtttgtgtaataagtttcttgttcgatattaatacatatggccgccaaatttctc

SEQ ID NO: 42136 - DNA, 1488 bp, Zea Mays
cacctgggtcccgtcttgcacggcgacgacctcgcataattgcggtgacagagacagggaacaggacggatggcagctgcttctgcttggacgatggacgaaccgcgaacgcctgtgcgtgcgacgatgttggacgcctacgggacaacgcatcagtgtctcagttatcgaaagtgatgtaactgaagctcgctggatcattgatgcatccgagtgttagcgacctagtcggaaacggggaagaggaggagatcggggcctcggcggcgacggccggcgaggacagtttcagtttcagtagagaagggaaattgtattagaaacccaatctgggccagatacattcttgttcttgggccggacgcggtaacctcttcttctgggcttgcttgtacttacaccgtggaaaaaagaatcgcgtcttcaatccaaaattgcacacaaagcagtttcctcacatgtacttgaaccttttgactcaacaatgatgttgcgcctacaaacgaagcaattaaatccatctgtgcctgcctgcctacactacacatgtcttccacacctccaaccaactcaggtcactaccagccagcctgaccagtctttgacgaagggatcaaggatcactcgcgatccgacaccccggtgaacgccatggaggcctgcgtggactcgttcgacagcaagggcgaggagtgcgccatgagggaggacaggaacgtcgaggaggacgtaggcggcgtggccacgttgtcgctcgctttcctcgtgctcctgaccttgaggtccatgaagtcgctgattatggcgggcttgctgaccgtctccggctcgacgtcccactcgcccgtcagcatggcgacgaccctcggcatgtcgggccggtgcctcgtcacgtcctgcgtgcacagcagcccgaccttcaggaacctgcaggcctgcgccacgtccaggtcgccgccgcccaaggacctgtctatgatcctctccagactcccctgctcgtagtgcatccatgtctgcaagaggagagccccgttggtgatctctgggaactgtggcagtaaagaacaaaaagctgtgtttagaaggtttgtgtcgtacgatgagttttcaggaaaaatccaaaaaaggtaactccttccgtctcaaaatatagttctttctatcccacttttttttccctgtccacattcattcaaatgataataatacaacattcatatgttacttaatgaatatgtgattagtttaaaacgagttatattttggtaccgagggagctgaaaacaaagctcctggtggtctatagcaccagttttaagtgtgcggcattggccatacccatactagctacattaattctgagaagagaaattttgaaatgccattgacaaagagaaacattgactacagttctgcgcacccgaatcatgcatcatcattgtcgtactcattttcagataatagaaagtagtgctataaatcaac

SEQ ID NO: 42137 - DNA, 294 bp, Zea Mays
ctcgtgttttccaatcaaactggatattgctgtggctggagcctgatcataaatagtataaaaagggttaggacatacagtatatatgaattaaccgaagttttttttttggaccaaagaccagggccaacttatatcgaaagtttaaacagaaactgcaacggttggcctattatattactttgtgatgaatagttaaagaaaaatagtatatgcttatgcattatttggtttaaatctataagaatagttactatgccatacctagaagtgtttgtgcaaggctattatttt

SEQ ID NO: 42138 - DNA, 678 bp, Zea Mays
ccgccgccgccgccgagacagatcccgcgagagtctacaacgcgagggaagagagcacgccgcgccttgtcggttatgatcggaacaacccacccgcaggcagtacagaaggacggcaccaggaaaaagcgccggcccccaaaggctcggcgaaggcctccgtcggtttccccacgaggtgccgcgccgtgccgccacggggcgcggacgcagcagcggcgagctttcgcgaggggttgggggaagccgggaaggagaggagaagccggggcgacgacggcccgtggggggcgcgcggactgtggactcgtggcgtggtgccggatggctccaagtggtacgcacgcgcggtatttgacttgtcgtccgcggtgcgggaagggaggccggaggggaggggtgctgtggactggggtggaggtggagccgtggaggtggaagaggcggccggggcgcctcggctttgaaaggtggacggagcagaggggaggagggtcaactcaaaccgttgaccacgtggagaggtaaggcgtcgcgtggtggccgtgtgtacactgtacaactgtacacgcggttcggtggacccgtccggtgctggctctggtggtcgcggttgaaccaggtcaattgaattgaatttgaccgagacaacgtttggggtggctgacctgactagac

SEQ ID NO: 42139 - DNA, 691 bp, Zea Mays
gttgaatctcttctcagggttccatgaccatgatcacccatcgccagcaggtgaccaacaattttccagatacggctggtactttacctgatgtacctgcaaggctgcaacaagtcaaagcctcgtgcatctcgagctgtcgtcgatagatatgtgtgagctgacggtctctgctcgtgttactgttgtcgatagacatccaaaaagggcacagatttttgggaggcaacagagatttctaccttccccaccgcgaaaagccggccaagattggcggggatggcaatacccgtccgggatccaaacccgggggcccagccgaagatatgatgaaagcgatggagagatcaccagagaagctaccggggttcgctcctacggacgccctgcccagagtcgcagagcgtcgacaagaacgggcgagctgtgctcgcccgcgtgtcacgccgccattgccatcgcactccacgtgctcccactcagaatcttgtcacgatccaccgcgcggaggcggagcaggcagccaccaaaccggtcgatcccagaaggcccggcgcggcggcggcggccccaggtgaggtggatcggagcagggatagtggatccgtgaactgtgatggcgagagcggcgtcgcattcagctcaccgatgcaccactgacctcagggaacgggaggccatccttttcttc

SEQ ID NO: 42140 - DNA, 10935 bp, Zea Mays
attttgtaatttcctccctcaactctctcctataccgagaaacaacccctgaccattgcttcccttctttccagaagaactccggagtccggatctctcccctcgcactcctcgatctgactgttcaagaaaaaaaaccccttgatcggaagaaaaccgaccgggaacattttatcctgtcctgttgcaattcccctcacgcgatctcgccgtgtccacttctatcactacctggccacctggggatcgggttgggctggattggatttccgaaccgaatcctgcgggctcgcctcgcgtcgccgtcctcttcgccgcggaggtgatgcgctgttgccgccgccgccgccgctagcgccggatcgggggcgatgaacatcgtcaagggcgtcgccgatctcctccgcaagtcgacgcccgcctcgccgggggccggcgccggcgggggcggcggaggcggagaccgaggaggcgtcgggtccccatccgccgacaggctcgccgccccgccatccccaagggtccgcttcagtgacaatggtgaggaaggagtccttaatgcgctttggcacaagtatgagagtggcattgacaaggctgagaagaagaagactctgcaaacatttgtcatgcattttgtaaaagcatttaaagattgggagccaggctatattgagcaatcaatcgatcatgaatcgttatcagatgatacaattttaggatgctctactggtcatccttctgaggtcatccttattctcattcaagagatttctcaaataacttcatctatcactgagagcagcagctgtccagaatcctctgctaacatttcggagttattgggtgacctgggattaaacgcagaaggtttgacaattttagagtgcttgacaattctcacgcgctcagtgcataactgtaaagtgtttagttattatggaggtgtgcagaaggtcactgcacttttgaaagccgcagttgtaaagctgaagaccttgaccagcttgcttgccgcagatgaacaactgtcaaataaaactgtagagaacatgaggacgatgcaaaaggttcttgtgtacattgttacaataatttcaaacttcatggatctggaaccaaatacaacaaggatttcacagtttatactaaacagctccaggcataccctatcgagcaactatttggccacagttgctccaaatacttccaaaagcatggtttttgatagaaattggcagaaaaaggccattgtttcagttatggaagctggtggtgtcaattggttagtagaacttctaagggttattcgaagattgaatttgaaagagcagtggactgacttgtcactccactttataactttgtactctctgaggtcaactatatctgaaaatgttcgtgcacaaaatcatttcagaagtatagggggactggaggttctattagatggactgggactgccatcaagcaaattttcagtctcgaagcagtcttttgttcccagtgatgaaaggagtggcattctccagctccagatactatatttggaaattctgagggaagcagtcttcggtaatgtcaataatctgcaatttttgtgtgaaaatgggcggatacataaatttgcaaacagtatctgttggcctgcatttatgcttcaggagtatcatcagcaaaaaattcttaatgctcaggccatcctgaaagctgataaagaaagcactgggccttcaccaacattggaatctttctcaaatcctgtagatattcttgatacatcagaatggaacgagtattctgtaaaattaagcataacactttgctcatttctccttcctcccaaggagatcaaatactgccctgctccaactgatgttacccaaatttcactatccatctcattggcttactgggagcaatgtgcaaggtggattataaaggttctttcaacagttttcccgtgcatgaaagcttgtgctagtgaaactgatttgcctaaccatataaggattttagcaaataccatgcagcattacatgctttgcacgtttaggaaggttcttatttcagcaccagctctacttaaatcttttcgagaggagggtctctgggatctgatattttcagagaaatttttctactttggatcatctttggactacattcaacagaatgatcaacttattgatgctcccaaatcaatcgattccaaaagtttcagtgaaaccgatgtcaacgttcttcaagcagaagctatttccttcttggagtttgctgcaacactcaatgaaaactcaaataacttgccagaatgcttagcattggtaggtgcacttgaacattgtacctatgatcctggattggccggtggtattgttaagagctttcacgtgatcctacaacttgcaactgaacaaactctagcttctttcaagtcaattgatgtgctcactagagtcctgaaggttgcatgccttcaagcacaagaaataaggaagctgtcccaagatgacttaaatcaaaatggttctcaatccagaaatgctcagacgacttattcagatgagagaattaagaacacttgtgcatttgtgaaactggctttcaaccttttcaaggagtatgccacaatatctgacattggaaggattacagttttatgcaatgctaattgcatcgagtgtttatttgatttgttccaagaagaatacctcaggaaacacatattggagcaagtacttgccttatttaggttaccttcgtcatcagcacaacaccacgcagcaaagatgctactatgctccaaatatcttgagactttcactcgtgcaaaagaaaaggaaaaggcttttgcagaattgtcaattgatctattagtcaatatgagagaggtcataatgatagaccgtgtgtattatcaaaatctgtttcgcaatggggagtgcttcttgcatatagtctctttgctgaatggaacttttgatgaagcagttggggagcaattggttcttaatgtccttcggacactgactgctctacttgctgaaaatgatgagtcaaaggctgccttcagattgctggtcggtgcaggttatcaaacactgcaaagcttgctattggacttctgtaagtggattccaagtcctaaactcctggatgccctacttgacatgcttgtcgatgggacatttgacataaatgaaaaagcaacaataaagaatgaagatgtgattatgctattaataaatgttctgcaaaagagcagcacttcactccagcattatgggcttatggtcttgcaacagttgctcaaggggtccattacaaatagaacttcttgtttcagagcagggttgcttagtttccttcttgattggtttaaagttgagaaagggaatgacattgtaatgaaaatcgcagaaataattcagatcattggtggacacagtatttgtggaaaggatattcgaaaattttttgccctccttcgtgacgaggagattattgcaaagcagcagcacagttcattgcttttgacaagtgttagtcacatgctcaaggaaaagggtcctgaagctttctttgagtttagtggtcatgactctggcattgaaattaaatcatcagttcaatggccttacaataaaggtttatctttctgttgctggctaagggtggaaagtttccctgagaagggtttgatgggtctttactctttcttcactgaaaatggaaaaggatgtttagctatgattgggaataatactctaatctatgagtctgtcaatccaaagcatcagtgtgttttgttatctctaagcctccctatcaagcaatggaaattcctttgtgttactcatacaattgggagaaccttctctggagggagtcagctgagatgctatgtagatggcgatctagtatcaagtgaaaagtgcaggtacacaaaagtaaatgaactaatgactcgctgtagtgttggtacagaattgatgcccatcggtgaagaaccttcttctcttggctttgagaacactcttgcttttactggtcaaatgggccctgtttatgcattttccgatgctctctcccctgaacaaataaggggcatttataacctaggaccaagttacatgtactctttccttggtgatcagaatttgcttacaaatgatgactcacggtacaagggaatacttgatgcaaaggatggcatttcatcgaaaatgatttttggcttgaatgcacaggctagtaacaatcggactttgtttaatgtatcatctgcactggatggtcttgacaagagtaagtttgaggcaaccaccatgggtgggacaaaattatgctcccggcgcctgctgcaagaaataatctattgtgttggtggcgtttctgtatttttccctcttctgatccactttgatgatgctgtggttcagaatggagagtttgccaccagagatcaattggctggtcaagttattgagcttgttgcatctgttctagatggaaatatagcaaatcagcaacagatgcatcttctttctggattttctattttagggttcctgttccagtctgtttcaccgcagctgctaaatatcaagactctttcagcatcgaaatacatgtttactattttgaagacctctaatattctattgagagatgctctttcacagttttacttgaatccacatatctgggcatatgcaacctatcaagtacagagagaactttttttgtttctgatacaatattttgaagctgatgggaaatttttaccagtattatgtgcgctccctaggatcattgatgtcataaaacagttctactcggaaaagctagatccaaggttttctaagcctttgctggtaagcaaaaaggtgactggggagagaccaagcatggaagaaattcgcaagatccgacttctcctgttgagtctggcagaaatgagcttaaagctaaaggtttctcaacatgatatcagagctcttgtttcctttcttgaacgaagtcaagatgttgcatgtgttgaggatatactccatatgattatccgcgccctttcacagaactcgcttgtaccatctttcttggagcaagtaaattcacttggtggttgttacattttcatcaatcttcttaagagggaatttgagccaatccgcctattgggccttcagcttcttggaaagcttttggttggggttccatctgagaaaagagggccaaaaatttttggcctccctgtaggacgacctagatccattgctgaagatataaggaaaggggcaacagcagcacctcaactgtttttttattcaatatctgatagacttttcaaatttccactttcagatcatttatgtgctagtctttttgatgttcttcttggtggagccagtcctaagcaggttttacagaaacgttcccaatctgatgctttaaaagataggagcatggctcctttttttgtccctcagattctggtttgcatttttaaatatattcaatcttgtcgagatgcttcagtgcgtacaaagattttaagtgatcttcttgatttgctggattcaaatcctgtgaatgttgaatcccttatggagtatggttggagctcttggcttgaaacatctgcgaagcttgatgtacttaggaactacaaatcgaattctgtagccaaggctgacggtttggagaccaatgagctgattcttgtgaggaacatgtattcgttggttctctcctattgcatattctctgtgaaaggtggctggcatcaactggaagatacaacaaatttccttctactgaaaattgagcaggggcagttaccaaattcctccatgctccgagacatttttgaagatctcattggaagccttcttgagacatcttctgaagaaagtgttttcaattctcagccatgccgtgataatatcttgtatcttttaaatcttagtcatgaactctttgttgaccaaattggaattaaactcttgtttccttcacctgacatgtctgcacatttgtcatctgatgacatcaactcggcagttctagaaattatgaatactgagggcaatggtctgcttacaagtcttccttggagtaatatattatttaatgatggagaaaagttgactgatgattggtggagcttttttgacaagatatggacgcttctgtgctatttgaatggcaaaggccaaaccagattaacaccaaagggtttaaatacagctggaccatctattgggcaacgggcccgcggattagtagagtccctcaatatcccagctgcagaaatggctgctgtagttgtaacaggaggcatcagtagcgcattaggtggaaagactaacaaagttgctgacaaagctatgatgctaagaggggagagatttccaagaattatcttccatctcatcattatgtatctctgcaaagctggcttagaaaacgcatccaaatgtgttcagcaatttatatcactgctccctaatattatctctgaagatgatcagtgcaaaaatagactgcatttcttgatttggtccttactaagggtaagatcccagtatgggcaacttgatgatggtgcacgtttccatgtcatgtcacacttgattcttgaaactgtgatctatggaaagtctatgcttacaactaatatagtaggcagagatgattctactgaagcaaataacagtaaggaggctgggttcattcttaatcttgtacagaaggaccgggttctcactgcggctactgatgaggcaaagtacatgaaggatgcaattgctgatcgcatgaagctggtccaggaactccattctaaacttgatgaacgctcaattcaagacgttgaacaactgcaaagttttgaggatgatgtacagtttgccaagactgctgctatagctgcggacgacagtagaaaagcagctttccagctagcatttgacgaggatcagcaaattgttgcagacaagtggattcatattctccgtgctctgagtgatgagagggggccatggtctgctgctccttttccaaataatattgtgacatactggaaacttgacaaaactgaagataaatggcggcgccgactgaagctcaagcggaactataagtttgatgagtgcctttgtcatccatcatccatcaaatctagtaacgataatgctgccccaactgttgacccatctgctaatgccaagataacagaaaaaatgaagcacttacttttgaaaggagtgcgtggaattacaggggatatcagttctgaatcatgtgaggatagcaacgacatgattgatcctccccagaatgtcccgccagagaaccacactgttagtgatacttctgattctgcagattcctcagattatcctgctattgttcaaaatagaaaagaaagttcatcaaccagtagtgataatgattatatcgaggtgctatcatcagttcactgtgttcttgtaacccccaaaagaaaactagctgggcaattgactatcacacgaaatgccctacatttttcttttgaatttctagttgaagggactgggggatcatctgttttcgacagatttcatgataaaaaagattcagactccaagaatgagatgggaggtgtggaaaaactgaagggcaatcttgatggaggacgaggcaatgctgctgaatctagcgacactcaaattaaaaatcaatctggtaaaatcaaacaccatagaaggtggaaaataactaggataaaagcagttcattggacacggtacctactacaatatactgccacagagatattctttgatgatgcaaacgcaccagtatttcttaacttttcatcccaaaatgatgctaaaagtgttgggtctcttttagtttccctgaggaatgatgctttgttccccaaaggaacaaccagagacaagaatagtttaatttcctttgttgacagaaaggttgcccttgaaatgtctgagagtgctagggaaagttggagaagaagagaaataagcaactttgagtaccttatgattctcaacactcttgctggacgatcttacaacgatttaactcaatatcctatatttccttggatattggctgactactcttcagaaaagcttgattttaacaaatcatctacattcagggacctttcaaaaccagtaggtgccttggatgcaaagcgctttaaggcttttgaagatagatatcttaattttgttgatccggatataccaagtttttactatggatcccactactctagcatgggaattgttctttattaccttctaaggcttgagccttttactgcgctgcaccgcaatcttcagggtggtaagtttgaccatgcagatcgtctatttcagagcattgaaagcacatacagcaactgcctatcaaatacaagtgatgtcaaagagcttatacctgaattcttttacatgcctgagtttcttgagaattcaaattcatatcaccttggcataaagcaggatggtgaaccattaggtgatgttggtctccctccatgggcaaagggttccccagaagaatttattcatatcagtcgagaagcccttgaaagtgaatatgtaagctctaatctacatcattggattgatctcatatttggttacaagcagcgaggcaagcctgcagttgaggcagcaaacatattttattatctgacatatgagggtgccgttgatttggagaacatggatgatatgttacaaaagtccgctattgaggaccaaattgcaaattttggacaaacaccaattcaaatttttcggaagaaacacccaaggagaggtcctcctataccaattgtgcatccactatattttgcgccacaatcgataacagtgacttctgttgtcccgaccatagtcacccctttatctgtattattcattggtttgttggactcaaacgttgtcatgatgaatgaggggctcatactctctgtaaagctttggctaacaacacagttgcagtctggtggaaacttcacattttctggatcactggaacctttcttcggaattggttctgatgttatttctccgaggaaaattggcacttctttggctgaaaatgttgagtttggaagacaatgcttagcaactgttcaaattcgtggtgacaattacttaattttgtgtggtaattgggagaatagtttccagatcatatctctaagtgatggaaaaattgtgcagagcatccggcagcataaagatgtagttagttgtgtggcagtttcatctgacggaagtgtgattgcaacgggaagctatgacacaactgttatgatctggtatgcatttcaagggagatcaaatgacaaaagatataggaatgcaaattacgatctatcaactaaggatcatgtcatcattgaaagcccttgccatatcttatgtggccatgatgatattatcacatgcttatttgtcagcacggaattagacattgttatcagtgggtcaaaggacgggacttgtatgttccatacactgcgtgaggggacatatgttcgatcgattcgacatccgtcaggtgctggtttgtcaaaaatggtaacatcacagcatggcaggttagtgatatactctgatagtgacctttctttgcatatgtattccataaatggaaagcatattgcttcttcggaatccaattgtcgtctcaattgcatggagctaagttgctgtggagagtttatggtatgtgctggtgatcatggtcaaattgttctccgctccatgcattctcttgatgttgtttggaggtacgagggagctgggaaaacaataacttccttagttgtgactcctgaggagtgcttcttggcgggaaccaaggatggtagcttgattgttttttcaatagaaaaccctttgcttcgtaaaaacgccatgcaacggcacaaggcaaaaccttccattggtggttagaggtgtagatcaaaacagtaccagaacttcttgctgcatttcaaataaaggttatcaatccgcaataattataacagagaagattctataactcctgtataaatgtacatacgtcatcagatcgagtttaccattctgaagagtgcatgtgccgatcacaatcaagaggataattcttctaactgcaaaacacatactatggtaactaaagtagattgatgtttcatgttcaagacaagagcaaggggataggaccttcaatatgatactcttgatatttgtagggtggtagctagttagtaatgggggtgcatttgagtgtaatataaacttattttgtgggggcattcttgctagataagagcgagccacagttttcctagatagaatttttaggtaaataggttgccactgacctgtaactattaatctgaacattgtaaatggaactgatgcgggttcataatagaaggcttgcaactttggaaaagatataattaaatcttatgagccgtctgaatttgtcactgaaaagctactaatgtgttgtatgagtgcacaacttgatgttgatttatcgttcgaacatggtagcgtcaatttcacaagcctaccaatatttcgagataacagttacaaaccgatactaatttttccctatttcccatctcgtcctactatgagctacttctgttcaaaaaaaaaccttgtgactttaaacaaattcagacaaattagtattgaactcagattatcatggggcccttagatctcttataaaattataggttttcacataatcatatggataattacttggcttagataattttgcaggtagcagccatgtagataaggattgggtaaatagagaaaagatgcgccagttgagttttgatacatgtggaccacattgtctgtctggggagataaa

SEQ ID NO: 42141 - DNA, 10940 bp, Zea Mays
attttgtaatttcctccctcaactctctcctataccgagaaacaacccctgaccattgcttcccttctttccagaagaactccggagtccggatctctcccctcgcactcctcgatctgactgttcaagaaaaaaaaccccttgatcggaagaaaaccgaccgggaacattttatcctgtcctgttgcaattcccctcacgcgatctcgccgtgtccacttctatcactacctggccacctggggatcgggttgggctggattggatttccgaaccgaatcctgcgggctcgcctcgcgtcgccgtcctcttcgccgcggaggtgatgcgctgttgccgccgccgccgccgctagcgccggatcgggggcgatgaacatcgtcaagggcgtcgccgatctcctccgcaagtcgacgcccgcctcgccgggggccggcgccggcgggggcggcggaggcggagaccgaggaggcgtcgggtccccatccgccgacaggctcgccgccccgccatccccaagggtccgcttcagtgacaatggtgaggaaggagtccttaatgcgctttggcacaagtatgagagtggcattgacaaggctgagaagaagaagactctgcaaacatttgtcatgcattttgtaaaagcatttaaagattgggagccaggctatattgagcaatcaatcgatcatgaatcgttatcagatgatacaattttaggatgctctactggtcatccttctgaggtcatccttattctcattcaagagatttctcaaataacttcatctatcactgagagcagcagctgtccagaatcctctgctaacatttcggagttattgggtgacctgggattaaacgcagaaggtttgacaattttagagtgcttgacaattctcacgcgctcagtgcataactgtaaagtgtttagttattatggaggtgtgcagaaggtcactgcacttttgaaagccgcagttgtaaagctgaagaccttgaccagcttgcttgccgcagatgaacaactgtcaaataaaactgtagagaacatgaggacgatgcaaaaggttcttgtgtacattgttacaataatttcaaacttcatggatctggaaccaaatacaacaaggatttcacagtttatactaaacagctccaggcataccctatcgagcaactatttggccacagttgctccaaatacttccaaaagcatggtttttgatagaaattggcagaaaaaggccattgtttcagttatggaagctggtggtgtcaattggttagtagaacttctaagggttattcgaagattgaatttgaaagagcagtggactgacttgtcactccactttataactttgtactctctgaggtcaactatatctgaaaatgttcgtgcacaaaatcatttcagaagtatagggggactggaggttctattagatggactgggactgccatcaagcaaattttcagtctcgaagcagtcttttgttcccagtgatgaaaggagtggcattctccagctccagatactatatttggaaattctgagggaagcagtcttcggtaatgtcaataatctgcaatttttgtgtgaaaatgggcggatacataaatttgcaaacagtatctgttggcctgcatttatgcttcaggagtatcatcagcaaaaaattcttaatgctcaggccatcctgaaagctgataaagaaagcactgggccttcaccaacattggaatctttctcaaatcctgtagatattcttgatacatcagaatggaacgagtattctgtaaaattaagcataacactttgctcatttctccttcctcccaaggagatcaaatactgccctgctccaactgatgttacccaaatttcactatccatctcattggcttactgggagcaatgtgcaaggtggattataaaggttctttcaacagttttcccgtgcatgaaagcttgtgctagtgaaactgatttgcctaaccatataaggattttagcaaataccatgcagcattacatgctttgcacgtttaggaaggttcttatttcagcaccagctctacttaaatcttttcgagaggagggtctctgggatctgatattttcagagaaatttttctactttggatcatctttggactacattcaacagaatgatcaacttattgatgctcccaaatcaatcgattccaaaagtttcagtgaaaccgatgtcaacgttcttcaagcagaagctatttccttcttggagtttgctgcaacactcaatgaaaactcaaataacttgaatgcttagcattggtaggtgcacttgaacattgtacctatgatcctggattggccggtggtattgttaagagctttcacgtgatcctacaacttgcaactgaacaaactctagcttctttcaagtcaattgatgtgctcactagagtcctgaaggttgcatgccttcaagcacaagaaataaggaagctgtcccaagatgacttaaatcaaaatggttctcaatccagaaatgctcagacgacttattcagatgagagaattaagaacacttgtgcatttgtgaaactggctttcaaccttttcaaggagtatgccacaatatctgacattggaaggattacagttttatgcaatgctaattgcatcgagtgtttatttgatttgttccaagaagaatacctcaggaaacacatattggagcaagtacttgccttatttaggttaccttcgtcatcagcacaacaccacgcagcaaagatgctactatgctccaaatatcttgagactttcactcgtgcaaaagaaaaggaaaaggcttttgcagaattgtcaattgatctattagtcaatatgagagaggtcataatgatagaccgtgtgtattatcaaaatctgtttcgcaatggggagtgcttcttgcatatagtctctttgctgaatggaacttttgatgaagcagttggggagcaattggttcttaatgtccttcggacactgactgctctacttgctgaaaatgatgagtcaaaggctgccttcagattgctggtcggtgcaggttatcaaacactgcaaagcttgctattggacttctgtaagtggattccaagtcctaaactcctggatgccctacttgacatgcttgtcgatgggacatttgacataaatgaaaaagcaacaataaagaatgaagatgtgattatgctattaataaatgttctgcaaaagagcagcacttcactccagcattatgggcttatggtcttgcaacagttgctcaaggggtccattacaaatagaacttcttgtttcagagcagggttgcttagtttccttcttgattggtttaaagttgagaaagggaatgacattgtaatgaaaatcgcagaaataattcagatcattggtggacacagtatttgtggaaaggatattcgaaaattttttgccctccttcgtgacgaggagattattgcaaagcagcagcacagttcattgcttttgacaagtgttagtcacatgctcaaggaaaagggtcctgaagctttctttgagtttagtggtcatgactctggcattgaaattaaatcatcagttcaatggccttacaataaaggtttatctttctgttgctggctaagggtggaaagtttccctgagaagggtttgatgggtctttactctttcttcactgaaaatggaaaaggatgtttagctatgattgggaataatactctaatctatgagtctgtcaatccaaagcatcagtgtgttttgttatctctaagcctccctatcaagcaatggaaattcctttgtgttactcatacaattgggagaaccttctctggagggagtcagctgagatgctatgtagatggcgatctagtatcaagtgaaaagtgcaggtacacaaaagtaaatgaactaatgactcgctgtagtgttggtacagaattgatgcccatcggtgaagaaccttcttctcttggctttgagaacactcttgcttttactggtcaaatgggccctgtttatgcattttccgatgctctctcccctgaacaaataaggggcatttataacctaggaccaagttacatgtactctttccttggtgatcagaatttgcttacaaatgatgactcacggtacaagggaatacttgatgcaaaggatggcatttcatcgaaaatgatttttggcttgaatgcacaggctagtaacaatcggactttgtttaatgtatcatctgcactggatggtcttgacaagagtaagtttgaggcaaccaccatgggtgggacaaaattatgctcccggcgcctgctgcaagaaataatctattgtgttggtggcgtttctgtatttttccctcttctgatccactttgatgatgctgtggttcagaatggagagtttgccaccagagatcaattggctggtcaagttattgagcttgttgcatctgttctagatggaaatatagcaaatcagcaacagatgcatcttctttctggattttctattttagggttcctgttccagtctgtttcaccgcagctgctaaatatcaagactctttcagcatcgaaatacatgtttactattttgaagacctctagcatgtcagatattctattgagagatgctctttcacagttttacttgaatccacatatctgggcatatgcaacctatcaagtacagagagaactttttttgtttctgatacaatattttgaagctgatgggaaatttttaccagtattatgtgcgctccctaggatcattgatgtcataaaacagttctactcggaaaagctagatccaaggttttctaagcctttgctggtaagcaaaaaggtgactggggagagaccaagcatggaagaaattcgcaagatccgacttctcctgttgagtctggcagaaatgagcttaaagctaaaggtttctcaacatgatatcagagctcttgtttcctttcttgaacgaagtcaagatgttgcatgtgttgaggatatactccatatgattatccgcgccctttcacagaactcgcttgtaccatctttcttggagcaagtaaattcacttggtggttgttacattttcatcaatcttcttaagagggaatttgagccaatccgcctattgggccttcagcttcttggaaagcttttggttggggttccatctgagaaaagagggccaaaaatttttggcctccctgtaggacgacctagatccattgctgaagatataaggaaaggggcaacagcagcacctcaactgtttttttattcaatatctgatagacttttcaaatttccactttcagatcatttatgtgctagtctttttgatgttcttcttggtggagccagtcctaagcaggttttacagaaacgttcccaatctgatgctttaaaagataggagcatggctcctttttttgtccctcagattctggtttgcatttttaaatatattcaatcttgtcgagatgcttcagtgcgtacaaagattttaagtgatcttcttgatttgctggattcaaatcctgtgaatgttgaatcccttatggagtatggttggagctcttggcttgaaacatctgcgaagcttgatgtacttaggaactacaaatcgaattctgtagccaaggctgacggtttggagaccaatgagctgattcttgtgaggaacatgtattcgttggttctctcctattgcatattctctgtgaaaggtggctggcatcaactggaagatacaacaaatttccttctactgaaaattgagcaggggcagttaccaaattcctccatgctccgagacatttttgaagatctcattggaagccttcttgagacatcttctgaagaaagtgttttcaattctcagccatgccgtgataatatcttgtatcttttaaatcttagtcatgaactctttgttgaccaaattggaattaaactcttgtttccttcacctgacatgtctgcacatttgtcatctgatgacatcaactcggcagttctagaaattatgaatactgagggcaatggtctgcttacaagtcttccttggagtaatatattatttaatgatggagaaaagttgactgatgattggtggagcttttttgacaagatatggacgcttctgtgctatttgaatggcaaaggccaaaccagattaacaccaaagggtttaaatacagctggaccatctattgggcaacgggcccgcggattagtagagtccctcaatatcccagctgcagaaatggctgctgtagttgtaacaggaggcatcagtagcgcattaggtggaaagactaacaaagttgctgacaaagctatgatgctaagaggggagagatttccaagaattatcttccatctcatcattatgtatctctgcaaagctggcttagaaaacgcatccaaatgtgttcagcaatttatatcactgctccctaatattatctctgaagatgatcagtgcaaaaatagactgcatttcttgatttggtccttactaagggtaagatcccagtatgggcaacttgatgatggtgcacgtttccatgtcatgtcacacttgattcttgaaactgtgatctatggaaagtctatgcttacaactaatatagtaggcagagatgattctactgaagcaaataacagtaaggaggctgggttcattcttaatcttgtacagaaggaccgggttctcactgcggctactgatgaggcaaagtacatgaaggatgcaattgctgatcgcatgaagctggtccaggaactccattctaaacttgatgaacgctcaattcaagacgttgaacaactgcaaagttttgaggatgatgtacagtttgccaagactgctgctatagctgcggacgacagtagaaaagcagctttccagctagcatttgacgaggatcagcaaattgttgcagacaagtggattcatattctccgtgctctgagtgatgagagggggccatggtctgctgctccttttccaaataatattgtgacatactggaaacttgacaaaactgaagataaatggcggcgccgactgaagctcaagcggaactataagtttgatgagtgcctttgtcatccatcatccatcaaatctagtaacgataatgctgccccaactgttgacccatctgctaatgccaagataacagaaaaaatgaagcacttacttttgaaaggagtgcgtggaattacaggggatatcagttctgaatcatgtgaggatagcaacgacatgattgatcctccccagaatgtcccgccagagaaccacactgttagtgatacttctgattctgcagattcctcagattatcctgctattgttcaaaatagaaaagaaagttcatcaaccagtagtgataatgattatatcgaggtgctatcatcagttcactgtgttcttgtaacccccaaaagaaaactagctgggcaattgactatcacacgaaatgccctacatttttcttttgaatttctagttgaagggactgggggatcatctgttttcgacagatttcatgataaaaaagattcagactccaagaatgagatgggaggtgtggaaaaactgaagggcaatcttgatggaggacgaggcaatgctgctgaatctagcgacactcaaattaaaaatcaatctggtaaaatcaaacaccatagaaggtggaaaataactaggataaaagcagttcattggacacggtacctactacaatatactgccacagagatattctttgatgatgcaaacgcaccagtatttcttaacttttcatcccaaaatgatgctaaaagtgttgggtctcttttagtttccctgaggaatgatgctttgttccccaaaggaacaaccagagacaagaatagtttaatttcctttgttgacagaaaggttgcccttgaaatgtctgagagtgctagggaaagttggagaagaagagaaataagcaactttgagtaccttatgattctcaacactcttgctggacgatcttacaacgatttaactcaatatcctatatttccttggatattggctgactactcttcagaaaagcttgattttaacaaatcatctacattcagggacctttcaaaaccagtaggtgccttggatgcaaagcgctttaaggcttttgaagatagatatcttaattttgttgatccggatataccaagtttttactatggatcccactactctagcatgggaattgttctttattaccttctaaggcttgagccttttactgcgctgcaccgcaatcttcagggtggtaagtttgaccatgcagatcgtctatttcagagcattgaaagcacatacagcaactgcctatcaaatacaagtgatgtcaaagagcttatacctgaattcttttacatgcctgagtttcttgagaattcaaattcatatcaccttggcataaagcaggatggtgaaccattaggtgatgttggtctccctccatgggcaaagggttccccagaagaatttattcatatcagtcgagaagcccttgaaagtgaatatgtaagctctaatctacatcattggattgatctcatatttggttacaagcagcgaggcaagcctgcagttgaggcagcaaacatattttattatctgacatatgagggtgccgttgatttggagaacatggatgatatgttacaaaagtccgctattgaggaccaaattgcaaattttggacaaacaccaattcaaatttttcggaagaaacacccaaggagaggtcctcctataccaattgtgcatccactatattttgcgccacaatcgataacagtgacttctgttgtcccgaccatagtcacccctttatctgtattattcattggtttgttggactcaaacgttgtcatgatgaatgaggggctcatactctctgtaaagctttggctaacaacacagttgcagtctggtggaaacttcacattttctggatcactggaacctttcttcggaattggttctgatgttatttctccgaggaaaattggcacttctttggctgaaaatgttgagtttggaagacaatgcttagcaactgttcaaattcgtggtgacaattacttaattttgtgtggtaattgggagaatagtttccagatcatatctctaagtgatggaaaaattgtgcagagcatccggcagcataaagatgtagttagttgtgtggcagtttcatctgacggaagtgtgattgcaacgggaagctatgacacaactgttatgatctggtatgcatttcaagggagatcaaatgacaaaagatataggaatgcaaattacgatctatcaactaaggatcatgtcatcattgaaagcccttgccatatcttatgtggccatgatgatattatcacatgcttatttgtcagcacggaattagacattgttatcagtgggtcaaaggacgggacttgtatgttccatacactgcgtgaggggacatatgttcgatcgattcgacatccgtcaggtgctggtttgtcaaaaatggtaacatcacagcatggcaggttagtgatatactctgatagtgacctttctttgcatatgtattccataaatggaaagcatattgcttcttcggaatccaattgtcgtctcaattgcatggagctaagttgctgtggagagtttatggtatgtgctggtgatcatggtcaaattgttctccgctccatgcattctcttgatgttgtttggaggtacgagggagctgggaaaacaataacttccttagttgtgactcctgaggagtgcttcttggcgggaaccaaggatggtagcttgattgttttttcaatagaaaaccctttgcttcgtaaaaacgccatgcaacggcacaaggcaaaaccttccattggtggttagaggtgtagatcaaaacagtaccagaacttcttgctgcatttcaaataaaggttatcaatccgcaataattataacagagaagattctataactcctgtataaatgtacatacgtcatcagatcgagtttaccattctgaagagtgcatgtgccgatcacaatcaagaggataattcttctaactgcaaaacacatactatggtaactaaagtagattgatgtttcatgttcaagacaagagcaaggggataggaccttcaatatgatactcttgatatttgtagggtggtagctagttagtaatgggggtgcatttgagtgtaatataaacttattttgtgggggcattcttgctagataagagcgagccacagttttcctagatagaatttttaggtaaataggttgccactgacctgtaactattaatctgaacattgtaaatggaactgatgcgggttcataatagaaggcttgcaactttggaaaagatataattaaatcttatgagccgtctgaatttgtcactgaaaagctactaatgtgttgtatgagtgcacaacttgatgttgatttatcgttcgaacatggtagcgtcaatttcacaagcctaccaatatttcgagataacagttacaaaccgatactaatttttccctatttcccatctcgtcctactatgagctacttctgttcaaaaaaaaaccttgtgactttaaacaaattcagacaaattagtattgaactcagattatcatggggcccttagatctcttataaaattataggttttcacataatcatatggataattacttggcttagataattttgcaggtagcagccatgtagataaggattgggtaaatagagaaaagatgcgccagttgagttttgatacatgtggaccacattgtctgtctggggagataaa

SEQ ID NO: 42142 - DNA, 10449 bp, Zea Mays
attttgtaatttcctccctcaactctctcctataccgagaaacaacccctgaccattgcttcccttctttccagaagaactccggagtccggatctctcccctcgcactcctcgatctgactgttcaagaaaaaaaaccccttgatcggaagaaaaccgaccgggaacattttatcctgtcctgttgcaattcccctcacgcgatctcgccgtgtccacttctatcactacctggccacctggggatcgggttgggctggattggatttccgaaccgaatcctgcgggctcgcctcgcgtcgccgtcctcttcgccgcggaggtgatgcgctgttgccgccgccgccgccgctagcgccggatcgggggcgatgaacatcgtcaagggcgtcgccgatctcctccgcaagtcgacgcccgcctcgccgggggccggcgccggcgggggcggcggaggcggagaccgaggaggcgtcgggtccccatccgccgacaggctcgccgccccgccatccccaagggtccgcttcagtgacaatggtgaggaaggagtccttaatgcgctttggcacaagtatgagagtggcattgacaaggctgagaagaagaagactctgcaaacatttgtcatgcattttgtaaaagcatttaaagattgggagccaggctatattgagcaatcaatcgatcatgaatcgttatcagatgatacaattttaggatgctctactggtcatccttctgaggtcatccttattctcattcaagagatttctcaaataacttcatctatcactgagagcagcagctgtccagaatcctctgctaacatttcggagttattgggtgacctgggattaaacgcagaaggtttgacaattttagagtgcttgacaattctcacgcgctcagtgcataactgtaaagtgtttagttattatggaggtgtgcagaaggtcactgcacttttgaaagccgcagttgtaaagctgaagaccttgaccagcttgcttgccgcagatgaacaactgtcaaataaaactgtagagaacatgaggacgatgcaaaaggttcttgtgtacattgttacaataatttcaaacttcatggatctggaaccaaatacaacaaggatttcacagtttatactaaacagctccaggcataccctatcgagcaactatttggccacagttgctccaaatacttccaaaagcatggtttttgatagaaattggcagaaaaaggccattgtttcagttatggaagctggtggtgtcaattggttagtagaacttctaagggttattcgaagattgaatttgaaagagcagtggactgacttgtcactccactttataactttgtactctctgaggtcaactatatctgaaaatgttcgtgcacaaaatcatttcagaagtatagggggactggaggttctattagatggactgggactgccatcaagcaaattttcagtctcgaagcagtcttttgttcccagtgatgaaaggattttagcaaataccatgcagcattacatgctttgcacgtttaggaaggttcttatttcagcaccagctctacttaaatcttttcgagaggagggtctctgggatctgatattttcagagaaatttttctactttggatcatctttggactacattcaacagaatgatcaacttattgatgctcccaaatcaatcgattccaaaagtttcagtgaaaccgatgtcaacgttcttcaagcagaagctatttccttcttggagtttgctgcaacactcaatgaaaactcaaataacttgccagaatgcttagcattggtaggtgcacttgaacattgtacctatgatcctggattggccggtggtattgttaagagctttcacgtgatcctacaacttgcaactgaacaaactctagcttctttcaagtcaattgatgtgctcactagagtcctgaaggttgcatgccttcaagcacaagaaataaggaagctgtcccaagatgacttaaatcaaaatggttctcaatccagaaatgctcagacgacttattcagatgagagaattaagaacacttgtgcatttgtgaaactggctttcaaccttttcaaggagtatgccacaatatctgacattggaaggattacagttttatgcaatgctaattgcatcgagtgtttatttgatttgttccaagaagaatacctcaggaaacacatattggagcaagtacttgccttatttaggttaccttcgtcatcagcacaacaccacgcagcaaagatgctactatgctccaaatatcttgagactttcactcgtgcaaaagaaaaggaaaaggcttttgcagaattgtcaattgatctattagtcaatatgagagaggtcataatgatagaccgtgtgtattatcaaaatctgtttcgcaatggggagtgcttcttgcatatagtctctttgctgaatggaacttttgatgaagcagttggggagcaattggttcttaatgtccttcggacactgactgctctacttgctgaaaatgatgagtcaaaggctgccttcagattgctggtcggtgcaggttatcaaacactgcaaagcttgctattggacttctgtaagtggattccaagtcctaaactcctggatgccctacttgacatgcttgtcgatgggacatttgacataaatgaaaaagcaacaataaagaatgaagatgtgattatgctattaataaatgttctgcaaaagagcagcacttcactccagcattatgggcttatggtcttgcaacagttgctcaaggggtccattacaaatagaacttcttgtttcagagcagggttgcttagtttccttcttgattggtttaaagttgagaaagggaatgacattgtaatgaaaatcgcagaaataattcagatcattggtggacacagtatttgtggaaaggatattcgaaaattttttgccctccttcgtgacgaggagattattgcaaagcagcagcacagttcattgcttttgacaagtgttagtcacatgctcaaggaaaagggtcctgaagctttctttgagtttagtggtcatgactctggcattgaaattaaatcatcagttcaatggccttacaataaaggtttatctttctgttgctggctaagggtggaaagtttccctgagaagggtttgatgggtctttactctttcttcactgaaaatggaaaaggatgtttagctatgattgggaataatactctaatctatgagtctgtcaatccaaagcatcagtgtgttttgttatctctaagcctccctatcaagcaatggaaattcctttgtgttactcatacaattgggagaaccttctctggagggagtcagctgagatgctatgtagatggcgatctagtatcaagtgaaaagtgcaggtacacaaaagtaaatgaactaatgactcgctgtagtgttggtacagaattgatgcccatcggtgaagaaccttcttctcttggctttgagaacactcttgcttttactggtcaaatgggccctgtttatgcattttccgatgctctctcccctgaacaaataaggggcatttataacctaggaccaagttacatgtactctttccttggtgatcagaatttgcttacaaatgatgactcacggtacaagggaatacttgatgcaaaggatggcatttcatcgaaaatgatttttggcttgaatgcacaggctagtaacaatcggactttgtttaatgtatcatctgcactggatggtcttgacaagagtaagtttgaggcaaccaccatgggtgggacaaaattatgctcccggcgcctgctgcaagaaataatctattgtgttggtggcgtttctgtatttttccctcttctgatccactttgatgatgctgtggttcagaatggagagtttgccaccagagatcaattggctggtcaagttattgagcttgttgcatctgttctagatggaaatatagcaaatcagcaacagatgcatcttctttctggattttctattttagggttcctgttccagtctgtttcaccgcagctgctaaatatcaagactctttcagcatcgaaatacatgtttactattttgaagacctctagcatgtcagatattctattgagagatgctctttcacagttttacttgaatccacatatctgggcatatgcaacctatcaagtacagagagaactttttttgtttctgatacaatattttgaagctgatgggaaatttttaccagtattatgtgcgctccctaggatcattgatgtcataaaacagttctactcggaaaagctagatccaaggttttctaagcctttgctggtaagcaaaaaggtgactggggagagaccaagcatggaagaaattcgcaagatccgacttctcctgttgagtctggcagaaatgagcttaaagctaaaggtttctcaacatgatatcagagctcttgtttcctttcttgaacgaagtcaagatgttgcatgtgttgaggatatactccatatgattatccgcgccctttcacagaactcgcttgtaccatctttcttggagcaagtaaattcacttggtggttgttacattttcatcaatcttcttaagagggaatttgagccaatccgcctattgggccttcagcttcttggaaagcttttggttggggttccatctgagaaaagagggccaaaaatttttggcctccctgtaggacgacctagatccattgctgaagatataaggaaaggggcaacagcagcacctcaactgtttttttattcaatatctgatagacttttcaaatttccactttcagatcatttatgtgctagtctttttgatgttcttcttggtggagccagtcctaagcaggttttacagaaacgttcccaatctgatgctttaaaagataggagcatggctcctttttttgtccctcagattctggtttgcatttttaaatatattcaatcttgtcgagatgcttcagtgcgtacaaagattttaagtgatcttcttgatttgctggattcaaatcctgtgaatgttgaatcccttatggagtatggttggagctcttggcttgaaacatctgcgaagcttgatgtacttaggaactacaaatcgaattctgtagccaaggctgacggtttggagaccaatgagctgattcttgtgaggaacatgtattcgttggttctctcctattgcatattctctgtgaaaggtggctggcatcaactggaagatacaacaaatttccttctactgaaaattgagcaggggcagttaccaaattcctccatgctccgagacatttttgaagatctcattggaagccttcttgagacatcttctgaagaaagtgttttcaattctcagccatgccgtgataatatcttgtatcttttaaatcttagtcatgaactctttgttgaccaaattggaattaaactcttgtttccttcacctgacatgtctgcacatttgtcatctgatgacatcaactcggcagttctagaaattatgaatactgagggcaatggtctgcttacaagtcttccttggagtaatatattatttaatgatggagaaaagttgactgatgattggtggagcttttttgacaagatatggacgcttctgtgctatttgaatggcaaaggccaaaccagattaacaccaaagggtttaaatacagctggaccatctattgggcaacgggcccgcggattagtagagtccctcaatatcccagctgcagaaatggctgctgtagttgtaacaggaggcatcagtagcgcattaggtggaaagactaacaaagttgctgacaaagctatgatgctaagaggggagagatttccaagaattatcttccatctcatcattatgtatctctgcaaagctggcttagaaaacgcatccaaatgtgttcagcaatttatatcactgctccctaatattatctctgaagatgatcagtgcaaaaatagactgcatttcttgatttggtccttactaagggtaagatcccagtatgggcaacttgatgatggtgcacgtttccatgtcatgtcacacttgattcttgaaactgtgatctatggaaagtctatgcttacaactaatatagtaggcagagatgattctactgaagcaaataacagtaaggaggctgggttcattcttaatcttgtacagaaggaccgggttctcactgcggctactgatgaggcaaagtacatgaaggatgcaattgctgatcgcatgaagctggtccaggaactccattctaaacttgatgaacgctcaattcaagacgttgaacaactgcaaagttttgaggatgatgtacagtttgccaagactgctgctatagctgcggacgacagtagaaaagcagctttccagctagcatttgacgaggatcagcaaattgttgcagacaagtggattcatattctccgtgctctgagtgatgagagggggccatggtctgctgctccttttccaaataatattgtgacatactggaaacttgacaaaactgaagataaatggcggcgccgactgaagctcaagcggaactataagtttgatgagtgcctttgtcatccatcatccatcaaatctagtaacgataatgctgccccaactgttgacccatctgctaatgccaagataacagaaaaaatgaagcacttacttttgaaaggagtgcgtggaattacaggggatatcagttctgaatcatgtgaggatagcaacgacatgattgatcctccccagaatgtcccgccagagaaccacactgttagtgatacttctgattctgcagattcctcagattatcctgctattgttcaaaatagaaaagaaagttcatcaaccagtagtgataatgattatatcgaggtgctatcatcagttcactgtgttcttgtaacccccaaaagaaaactagctgggcaattgactatcacacgaaatgccctacatttttcttttgaatttctagttgaagggactgggggatcatctgttttcgacagatttcatgataaaaaagattcagactccaagaatgagatgggaggtgtggaaaaactgaagggcaatcttgatggaggacgaggcaatgctgctgaatctagcgacactcaaattaaaaatcaatctggtaaaatcaaacaccatagaaggtggaaaataactaggataaaagcagttcattggacacggtacctactacaatatactgccacagagatattctttgatgatgcaaacgcaccagtatttcttaacttttcatcccaaaatgatgctaaaagtgttgggtctcttttagtttccctgaggaatgatgctttgttccccaaaggaacaaccagagacaagaatagtttaatttcctttgttgacagaaaggttgcccttgaaatgtctgagagtgctagggaaagttggagaagaagagaaataagcaactttgagtaccttatgattctcaacactcttgctggacgatcttacaacgatttaactcaatatcctatatttccttggatattggctgactactcttcagaaaagcttgattttaacaaatcatctacattcagggacctttcaaaaccagtaggtgccttggatgcaaagcgctttaaggcttttgaagatagatatcttaattttgttgatccggatataccaagtttttactatggatcccactactctagcatgggaattgttctttattaccttctaaggcttgagccttttactgcgctgcaccgcaatcttcagggtggtaagtttgaccatgcagatcgtctatttcagagcattgaaagcacatacagcaactgcctatcaaatacaagtgatgtcaaagagcttatacctgaattcttttacatgcctgagtttcttgagaattcaaattcatatcaccttggcataaagcaggatggtgaaccattaggtgatgttggtctccctccatgggcaaagggttccccagaagaatttattcatatcagtcgagaagcccttgaaagtgaatatgtaagctctaatctacatcattggattgatctcatatttggttacaagcagcgaggcaagcctgcagttgaggcagcaaacatattttattatctgacatatgagggtgccgttgatttggagaacatggatgatatgttacaaaagtccgctattgaggaccaaattgcaaattttggacaaacaccaattcaaatttttcggaagaaacacccaaggagaggtcctcctataccaattgtgcatccactatattttgcgccacaatcgataacagtgacttctgttgtcccgaccatagtcacccctttatctgtattattcattggtttgttggactcaaacgttgtcatgatgaatgaggggctcatactctctgtaaagctttggctaacaacacagttgcagtctggtggaaacttcacattttctggatcactggaacctttcttcggaattggttctgatgttatttctccgaggaaaattggcacttctttggctgaaaatgttgagtttggaagacaatgcttagcaactgttcaaattcgtggtgacaattacttaattttgtgtggtaattgggagaatagtttccagatcatatctctaagtgatggaaaaattgtgcagagcatccggcagcataaagatgtagttagttgtgtggcagtttcatctgacggaagtgtgattgcaacgggaagctatgacacaactgttatgatctggtatgcatttcaagggagatcaaatgacaaaagatataggaatgcaaattacgatctatcaactaaggatcatgtcatcattgaaagcccttgccatatcttatgtggccatgatgatattatcacatgcttatttgtcagcacggaattagacattgttatcagtgggtcaaaggacgggacttgtatgttccatacactgcgtgaggggacatatgttcgatcgattcgacatccgtcaggtgctggtttgtcaaaaatggtaacatcacagcatggcaggttagtgatatactctgatagtgacctttctttgcatatgtattccataaatggaaagcatattgcttcttcggaatccaattgtcgtctcaattgcatggagctaagttgctgtggagagtttatggtatgtgctggtgatcatggtcaaattgttctccgctccatgcattctcttgatgttgtttggaggtacgagggagctgggaaaacaataacttccttagttgtgactcctgaggagtgcttcttggcgggaaccaaggatggtagcttgattgttttttcaatagaaaaccctttgcttcgtaaaaacgccatgcaacggcacaaggcaaaaccttccattggtggttagaggtgtagatcaaaacagtaccagaacttcttgctgcatttcaaataaaggttatcaatccgcaataattataacagagaagattctataactcctgtataaatgtacatacgtcatcagatcgagtttaccattctgaagagtgcatgtgccgatcacaatcaagaggataattcttctaactgcaaaacacatactatggtaactaaagtagattgatgtttcatgttcaagacaagagcaaggggataggaccttcaatatgatactcttgatatttgtagggtggtagctagttagtaatgggggtgcatttgagtgtaatataaacttattttgtgggggcattcttgctagataagagcgagccacagttttcctagatagaatttttaggtaaataggttgccactgacctgtaactattaatctgaacattgtaaatggaactgatgcgggttcataatagaaggcttgcaactttggaaaagatataattaaatcttatgagccgtctgaatttgtcactgaaaagctactaatgtgttgtatgagtgcacaacttgatgttgatttatcgttcgaacatggtagcgtcaatttcacaagcctaccaatatttcgagataacagttacaaaccgatactaatttttccctatttcccatctcgtcctactatgagctacttctgttcaaaaaaaaaccttgtgactttaaacaaattcagacaaattagtattgaactcagattatcatggggcccttagatctcttataaaattataggttttcacataatcatatggataattacttggcttagataattttgcaggtagcagccatgtagataaggattgggtaaatagagaaaagatgcgccagttgagttttgatacatgtggaccacattgtctgtctggggagataaa

SEQ ID NO: 42143 - DNA, 10722 bp, Zea Mays
attttgtaatttcctccctcaactctctcctataccgagaaacaacccctgaccattgcttcccttctttccagaagaactccggagtccggatctctcccctcgcactcctcgatctgactgttcaagaaaaaaaaccccttgatcggaagaaaaccgaccgggaacattttatcctgtcctgttgcaattcccctcacgcgatctcgccgtgtccacttctatcactacctggccacctggggatcgggttgggctggattggatttccgaaccgaatcctgcgggctcgcctcgcgtcgccgtcctcttcgccgcggaggtgatgcgctgttgccgccgccgccgccgctagcgccggatcgggggcgatgaacatcgtcaagggcgtcgccgatctcctccgcaagtcgacgcccgcctcgccgggggccggcgccggcgggggcggcggaggcggagaccgaggaggcgtcgggtccccatccgccgacaggctcgccgccccgccatccccaagggtccgcttcagtgacaatggtgaggaaggagtccttaatgcgctttggcacaagtatgagagtggcattgacaaggctgagaagaagaagactctgcaaacatttgtcatgcattttgtaaaagcatttaaagattgggagccaggctatattgagcaatcaatcgatcatgaatcgttatcagatgatacaattttaggatgctctactggtcatccttctgaggtcatccttattctcattcaagagatttctcaaataacttcatctatcactgagagcagcagctgtccagaatcctctgctaacatttcggagttattgggtgacctgggattaaacgcagaaggtttgacaattttagagtgcttgacaattctcacgcgctcagtgcataactgtaaagtgtttagttattatggaggtgtgcagaaggtcactgcacttttgaaagccgcagttgtaaagctgaagaccttgaccagcttgcttgccgcagatgaacaactgtcaaataaaactgtagagaacatgaggacgatgcaaaaggttcttgtgtacattgttacaataatttcaaacttcatggatctggaaccaaatacaacaaggatttcacagtttatactaaacagctccaggcataccctatcgagcaactatttggccacagttgctccaaatacttccaaaagcatggtttttgatagaaattggcagaaaaaggccattgtttcagttatggaagctggtggtgtcaattggttagtagaacttctaagggttattcgaagattgaatttgaaagagcagtggactgacttgtcactccactttataactttgtactctctgaggtcaactatatctgaaaatgttcgtgcacaaaatcatttcagaagtatagggggactggaggttctattagatggactgggactgccatcaagcaaattttcagtctcgaagcagtcttttgttcccagtgatgaaaggagtggcattctccagctccagatactatatttggaaattctgagggaagcagtcttcggtaatgtcaataatctgcaatttttgtgtgaaaatgggcggatacataaatttgcaaacagtatctgttggcctgcatttatgcttcaggagtatcatcagcaaaaaattcttaatgctcaggccatcctgaaagctgataaagaaagcactgggccttcaccaacattggaatctttctcaaatcctgtagatattcttgatacatcagaatggaacgagtattctgtaaaattaagcataacactttgctcatttctccttcctcccaaggagatcaaatactgccctgctccaactgatgttacccaaatttcactatccatctcattggcttactgggagcaatgtgcaaggtggattataaaggttctttcaacagttttcccgtgcatgaaagcttgtgctagtgaaactgatttgcctaaccatataaggattttagcaaataccatgcagcattacatgctttgcacgtttaggaaggttcttatttcagcaccagctctacttaaatcttttcgagaggagggtctctgggatctgatattttcagagaaatttttctactttggatcatctttggactacattcaacagaatgatcaacttattgatgctcccaaatcaatcgattccaaaagtttcagtgaaaccgatgtcaacgttcttcaagcagaagctatttccttcttggagtttgctgcaacactcaatgaaaactcaaataacttgccagaatgcttagcattggtaggtgcacttgaacattgtacctatgatcctggattggccggtggtattgttaagagctttcacgtgatcctacaacttgcaactgaacaaactctagcttctttcaagtcaattgatgtgctcactagagtcctgaaggttgcatgccttcaagcacaagaaataaggaagctgtcccaagatgacttaaatcaaaatggttctcaatccagaaatgctcagacgacttattcagatgagagaattaagaacacttgtgcatttgtgaaactggctttcaaccttttcaaggagtatgccacaatatctgacattggaaggattacagttttatgcaatgctaattgcatcgagtgtttatttgatttgttccaagaagaatacctcaggaaacacatattggagcaagtacttgccttatttaggttaccttcgtcatcagcacaacaccacgcagcaaagatgctactatgctccaaatatcttgagactttcactcgtgcaaaagaaaaggaaaaggcttttgcagaattgtcaattgatctattagtcaatatgagagaggtcataatgatagaccgtgtgtattatcaaaatctgtttcgcaatggggagtgcttcttgcatatagtctctttgctgaatggaacttttgatgaagcagttggggagcaattggttcttaatgtccttcggacactgactgctctacttgctgaaaatgatgagtcaaaggctgccttcagattgctggtcggtgcaggttatcaaacactgcaaagcttgctattggacttctgtaagtggattccaagtcctaaactcctggatgccctacttgacatgcttgtcgatgggacatttgacataaatgaaaaagcaacaataaagaatgaagatgtgattatgctattaataaatgttctgcaaaagagcagcacttcactccagcattatgggcttatggtcttgcaacagttgctcaaggggtccattacaaatagaacttcttgtttcagagcagggttgcttagtttccttcttgattggtttaaagttgagaaagggaatgacattgtaatgaaaatcgcagaaataattcagatcattggtggacacagtatttgtggaaaggatattcgaaaattttttgccctccttcgtgacgaggagattattgcaaagcagcagcacagttcattgcttttgacaagtgttagtcacatgctcaaggaaaagggtcctgaagctttctttgagtttagtggtcatgactctggcattgaaattaaatcatcagttcaatggccttacaataaaggtttatctttctgttgctggctaagggtggaaagtttccctgagaagggtttgatgggtctttactctttcttcactgaaaatggaaaaggatgtttagctatgattgggaataatactctaatctatgagtctgtcaatccaaagcatcagtgtgttttgttatctctaagcctccctatcaagcaatggaaattcctttgtgttactcatacaattgggagaaccttctctggagggagtcagctgagatgctatgtagatggcgatctagtatcaagtgaaaagtgcaggtacacaaaagtaaatgaactaatgactcgctgtagtgttggtacagaattgatgcccatcggtgaagaaccttcttctcttggctttgagaacactcttgcttttactggtcaaatgggccctgtttatgcattttccgatgctctctcccctgaacaaataaggggcatttataacctaggaccaagttacatgtactctttccttggtgatcagaatttgcttacaaatgatgactcacggtacaagggaatacttgatgcaaaggatggcatttcatcgaaaatgatttttggcttgaatgcacaggctagtaacaatcggactttgtttaatgtatcatctgcactggatggtcttgacaagagtaagtttgaggcaaccaccatgggtgggacaaaattatgctcccggcgcctgctgcaagaaataatctattgtgttggtggcgtttctgtatttttccctcttctgatccactttgatgatgctgtggttcagaatggagagtttgccaccagagatcaattggctggtcaagttattgagcttgttgcatctgttctagatggaaatatagcaaatcagcaacagatgcatcttctttctggattttctattttagggttcctgttccagtctgtttcaccgcagctgctaaatatcaagactctttcagcatcgaaatacatgtttactattttgaagacctctagcatgtcagatattctattgagagatgctctttcacagttttacttgaatccacatatctgggcatatgcaacctatcaagtacagagagaactttttttgctaaaggtttctcaacatgatatcagagctcttgtttcctttcttgaacgaagtcaagatgttgcatgtgttgaggatatactccatatgattatccgcgccctttcacagaactcgcttgtaccatctttcttggagcaagtaaattcacttggtggttgttacattttcatcaatcttcttaagagggaatttgagccaatccgcctattgggccttcagcttcttggaaagcttttggttggggttccatctgagaaaagagggccaaaaatttttggcctccctgtaggacgacctagatccattgctgaagatataaggaaaggggcaacagcagcacctcaactgtttttttattcaatatctgatagacttttcaaatttccactttcagatcatttatgtgctagtctttttgatgttcttcttggtggagccagtcctaagcaggttttacagaaacgttcccaatctgatgctttaaaagataggagcatggctcctttttttgtccctcagattctggtttgcatttttaaatatattcaatcttgtcgagatgcttcagtgcgtacaaagattttaagtgatcttcttgatttgctggattcaaatcctgtgaatgttgaatcccttatggagtatggttggagctcttggcttgaaacatctgcgaagcttgatgtacttaggaactacaaatcgaattctgtagccaaggctgacggtttggagaccaatgagctgattcttgtgaggaacatgtattcgttggttctctcctattgcatattctctgtgaaaggtggctggcatcaactggaagatacaacaaatttccttctactgaaaattgagcaggggcagttaccaaattcctccatgctccgagacatttttgaagatctcattggaagccttcttgagacatcttctgaagaaagtgttttcaattctcagccatgccgtgataatatcttgtatcttttaaatcttagtcatgaactctttgttgaccaaattggaattaaactcttgtttccttcacctgacatgtctgcacatttgtcatctgatgacatcaactcggcagttctagaaattatgaatactgagggcaatggtctgcttacaagtcttccttggagtaatatattatttaatgatggagaaaagttgactgatgattggtggagcttttttgacaagatatggacgcttctgtgctatttgaatggcaaaggccaaaccagattaacaccaaagggtttaaatacagctggaccatctattgggcaacgggcccgcggattagtagagtccctcaatatcccagctgcagaaatggctgctgtagttgtaacaggaggcatcagtagcgcattaggtggaaagactaacaaagttgctgacaaagctatgatgctaagaggggagagatttccaagaattatcttccatctcatcattatgtatctctgcaaagctggcttagaaaacgcatccaaatgtgttcagcaatttatatcactgctccctaatattatctctgaagatgatcagtgcaaaaatagactgcatttcttgatttggtccttactaagggtaagatcccagtatgggcaacttgatgatggtgcacgtttccatgtcatgtcacacttgattcttgaaactgtgatctatggaaagtctatgcttacaactaatatagtaggcagagatgattctactgaagcaaataacagtaaggaggctgggttcattcttaatcttgtacagaaggaccgggttctcactgcggctactgatgaggcaaagtacatgaaggatgcaattgctgatcgcatgaagctggtccaggaactccattctaaacttgatgaacgctcaattcaagacgttgaacaactgcaaagttttgaggatgatgtacagtttgccaagactgctgctatagctgcggacgacagtagaaaagcagctttccagctagcatttgacgaggatcagcaaattgttgcagacaagtggattcatattctccgtgctctgagtgatgagagggggccatggtctgctgctccttttccaaataatattgtgacatactggaaacttgacaaaactgaagataaatggcggcgccgactgaagctcaagcggaactataagtttgatgagtgcctttgtcatccatcatccatcaaatctagtaacgataatgctgccccaactgttgacccatctgctaatgccaagataacagaaaaaatgaagcacttacttttgaaaggagtgcgtggaattacaggggatatcagttctgaatcatgtgaggatagcaacgacatgattgatcctccccagaatgtcccgccagagaaccacactgttagtgatacttctgattctgcagattcctcagattatcctgctattgttcaaaatagaaaagaaagttcatcaaccagtagtgataatgattatatcgaggtgctatcatcagttcactgtgttcttgtaacccccaaaagaaaactagctgggcaattgactatcacacgaaatgccctacatttttcttttgaatttctagttgaagggactgggggatcatctgttttcgacagatttcatgataaaaaagattcagactccaagaatgagatgggaggtgtggaaaaactgaagggcaatcttgatggaggacgaggcaatgctgctgaatctagcgacactcaaattaaaaatcaatctggtaaaatcaaacaccatagaaggtggaaaataactaggataaaagcagttcattggacacggtacctactacaatatactgccacagagatattctttgatgatgcaaacgcaccagtatttcttaacttttcatcccaaaatgatgctaaaagtgttgggtctcttttagtttccctgaggaatgatgctttgttccccaaaggaacaaccagagacaagaatagtttaatttcctttgttgacagaaaggttgcccttgaaatgtctgagagtgctagggaaagttggagaagaagagaaataagcaactttgagtaccttatgattctcaacactcttgctggacgatcttacaacgatttaactcaatatcctatatttccttggatattggctgactactcttcagaaaagcttgattttaacaaatcatctacattcagggacctttcaaaaccagtaggtgccttggatgcaaagcgctttaaggcttttgaagatagatatcttaattttgttgatccggatataccaagtttttactatggatcccactactctagcatgggaattgttctttattaccttctaaggcttgagccttttactgcgctgcaccgcaatcttcagggtggtaagtttgaccatgcagatcgtctatttcagagcattgaaagcacatacagcaactgcctatcaaatacaagtgatgtcaaagagcttatacctgaattcttttacatgcctgagtttcttgagaattcaaattcatatcaccttggcataaagcaggatggtgaaccattaggtgatgttggtctccctccatgggcaaagggttccccagaagaatttattcatatcagtcgagaagcccttgaaagtgaatatgtaagctctaatctacatcattggattgatctcatatttggttacaagcagcgaggcaagcctgcagttgaggcagcaaacatattttattatctgacatatgagggtgccgttgatttggagaacatggatgatatgttacaaaagtccgctattgaggaccaaattgcaaattttggacaaacaccaattcaaatttttcggaagaaacacccaaggagaggtcctcctataccaattgtgcatccactatattttgcgccacaatcgataacagtgacttctgttgtcccgaccatagtcacccctttatctgtattattcattggtttgttggactcaaacgttgtcatgatgaatgaggggctcatactctctgtaaagctttggctaacaacacagttgcagtctggtggaaacttcacattttctggatcactggaacctttcttcggaattggttctgatgttatttctccgaggaaaattggcacttctttggctgaaaatgttgagtttggaagacaatgcttagcaactgttcaaattcgtggtgacaattacttaattttgtgtggtaattgggagaatagtttccagatcatatctctaagtgatggaaaaattgtgcagagcatccggcagcataaagatgtagttagttgtgtggcagtttcatctgacggaagtgtgattgcaacgggaagctatgacacaactgttatgatctggtatgcatttcaagggagatcaaatgacaaaagatataggaatgcaaattacgatctatcaactaaggatcatgtcatcattgaaagcccttgccatatcttatgtggccatgatgatattatcacatgcttatttgtcagcacggaattagacattgttatcagtgggtcaaaggacgggacttgtatgttccatacactgcgtgaggggacatatgttcgatcgattcgacatccgtcaggtgctggtttgtcaaaaatggtaacatcacagcatggcaggttagtgatatactctgatagtgacctttctttgcatatgtattccataaatggaaagcatattgcttcttcggaatccaattgtcgtctcaattgcatggagctaagttgctgtggagagtttatggtatgtgctggtgatcatggtcaaattgttctccgctccatgcattctcttgatgttgtttggaggtacgagggagctgggaaaacaataacttccttagttgtgactcctgaggagtgcttcttggcgggaaccaaggatggtagcttgattgttttttcaatagaaaaccctttgcttcgtaaaaacgccatgcaacggcacaaggcaaaaccttccattggtggttagaggtgtagatcaaaacagtaccagaacttcttgctgcatttcaaataaaggttatcaatccgcaataattataacagagaagattctataactcctgtataaatgtacatacgtcatcagatcgagtttaccattctgaagagtgcatgtgccgatcacaatcaagaggataattcttctaactgcaaaacacatactatggtaactaaagtagattgatgtttcatgttcaagacaagagcaaggggataggaccttcaatatgatactcttgatatttgtagggtggtagctagttagtaatgggggtgcatttgagtgtaatataaacttattttgtgggggcattcttgctagataagagcgagccacagttttcctagatagaatttttaggtaaataggttgccactgacctgtaactattaatctgaacattgtaaatggaactgatgcgggttcataatagaaggcttgcaactttggaaaagatataattaaatcttatgagccgtctgaatttgtcactgaaaagctactaatgtgttgtatgagtgcacaacttgatgttgatttatcgttcgaacatggtagcgtcaatttcacaagcctaccaatatttcgagataacagttacaaaccgatactaatttttccctatttcccatctcgtcctactatgagctacttctgttcaaaaaaaaaccttgtgactttaaacaaattcagacaaattagtattgaactcagattatcatggggcccttagatctcttataaaattataggttttcacataatcatatggataattacttggcttagataattttgcaggtagcagccatgtagataaggattgggtaaatagagaaaagatgcgccagttgagttttgatacatgtggaccacattgtctgtctggggagataaa

SEQ ID NO: 42144 - DNA, 10836 bp, Zea Mays
attttgtaatttcctccctcaactctctcctataccgagaaacaacccctgaccattgcttcccttctttccagaagaactccggagtccggatctctcccctcgcactcctcgatctgactgttcaagaaaaaaaaccccttgatcggaagaaaaccgaccgggaacattttatcctgtcctgttgcaattcccctcacgcgatctcgccgtgtccacttctatcactacctggccacctggggatcgggttgggctggattggatttccgaaccgaatcctgcgggctcgcctcgcgtcgccgtcctcttcgccgcggaggtgatgcgctgttgccgccgccgccgccgctagcgccggatcgggggcgatgaacatcgtcaagggcgtcgccgatctcctccgcaagtcgacgcccgcctcgccgggggccggcgccggcgggggcggcggaggcggagaccgaggaggcgtcgggtccccatccgccgacaggctcgccgccccgccatccccaagggtccgcttcagtgacaatggtgaggaaggagtccttaatgcgctttggcacaagtatgagagtggcattgacaaggctgagaagaagaagactctgcaaacatttgtcatgcattttgtaaaagcatttaaagattgggagccaggctatattgagcaatcaatcgatcatgaatcgttatcagatgatacaattttaggatgctctactggtcatccttctgaggtcatccttattctcattcaagagatttctcaaataacttcatctatcactgagagcagcagctgtccagaatcctctgctaacatttcggagttattgggtgacctgggattaaacgcagaaggtttgacaattttagagtgcttgacaattctcacgcgctcagtgcataactgtaaagtgtttagttattatggaggtgtgcagaaggtcactgcacttttgaaagccgcagttgtaaagctgaagaccttgaccagcttgcttgccgcagatgaacaactgtcaaataaaactgtagagaacatgaggacgatgcaaaaggttcttgtgtacattgttacaataatttcaaacttcatggatctggaaccaaatacaacaaggatttcacagtttatactaaacagctccaggcataccctatcgagcaactatttggccacagttgctccaaatacttccaaaagcatggtttttgatagaaattggcagaaaaaggccattgtttcagttatggaagctggtggtgtcaattggttagtagaacttctaagggttattcgaagattgaatttgaaagagcagtggactgacttgtcactccactttataactttgtactctctgaggtcaactatatctgaaaatgttcgtgcacaaaatcatttcagaagtatagggggactggaggttctattagatggactgggactgccatcaagcaaattttcagtctcgaagcagtcttttgttcccagtgatgaaaggagtggcattctccagctccagatactatatttggaaattctgagggaagcagtcttcggtaatgtcaataatctgcaatttttgtgtgaaaatgggcggatacataaatttgcaaacagtatctgttggcctgcatttatgcttcaggagtatcatcagcaaaaaattcttaatgctcaggccatcctgaaagctgataaagaaagcactgggccttcaccaacattggaatctttctcaaatcctgtagatattcttgatacatcagaatggaacgagtattctgtaaaattaagcataacactttgctcatttctccttcctcccaaggagatcaaatactgccctgctccaactgatgttacccaaatttcactatccatctcattggcttactgggagcaatgtgcaaggtggattataaaggttctttcaacagttttcccgtgcatgaaagcttgtgctagtgaaactgatttgcctaaccatataaggattttagcaaataccatgcagcattacatgctttgcacgtttaggaaggttcttatttcagcaccagctctacttaaatcttttcgagaggagggtctctgggatctgatattttcagagaaatttttctactttggatcatctttggactacattcaacagaatgatcaacttattgatgctcccaaatcaatcgattccaaaagtttcagtgaaaccgatgtcaacgttcttcaagcagaagctatttccttcttggagtttgctgcaacactcaatgaaaactcaaataacttgccagaatgcttagcattggtaggtgcacttgaacattgtacctatgatcctggattggccggtggtattgttaagagctttcacgtgatcctacaacttgcaactgaacaaactctagcttctttcaagtcaattgatgtgctcactagagtcctgaaggttgcatgccttcaagcacaagaaataaggaagctgtcccaagatgacttaaatcaaaatggttctcaatccagaaatgctcagacgacttattcagatgagagaattaagaacacttgtgcatttgtgaaactggctttcaaccttttcaaggagtatgccacaatatctgacattggaaggattacagttttatgcaatgctaattgcatcgagtgtttatttgatttgttccaagaagaatacctcaggaaacacatattggagcaagtacttgccttatttaggttaccttcgtcatcagcacaacaccacgcagcaaagatgctactatgctccaaatatcttgagactttcactcgtgcaaaagaaaaggaaaaggcttttgcagaattgtcaattgatctattagtcaatatgagagaggtcataatgatagaccgtgtgtattatcaaaatctgtttcgcaatggggagtgcttcttgcatatagtctctttgctgaatggaacttttgatgaagcagttggggagcaattggttcttaatgtccttcggacactgactgctctacttgctgaaaatgatgagtcaaaggctgccttcagattgctggtcggtgcaggttatcaaacactgcaaagcttgctattggacttctgtaagtggattccaagtcctaaactcctggatgccctacttgacatgcttgtcgatgggacatttgacataaatgaaaaagcaacaataaagaatgaagatgtgattatgctattaataaatgttctgcaaaagagcagcacttcactccagcattatgggcttatggtcttgcaacagttgctcaaggggtccattacaaatagaacttcttgtttcagagcagggttgcttagtttccttcttgattggtttaaagttgagaaagggaatgacattgtaatgaaaatcgcagaaataattcagatcattggtggacacagtatttgtggaaaggatattcgaaaattttttgccctccttcgtgacgaggagattattgcaaagcagcagcacagttcattgcttttgacaagtgttagtcacatgctcaaggaaaagggtcctgaagctttctttgagtttagtggtcatgactctggcattgaaattaaatcatcagttcaatggccttacaataaaggtttatctttctgttgctggctaagggtggaaagtttccctgagaagggtttgatgggtctttactctttcttcactgaaaatggaaaaggatgtttagctatgattgggaataatactctaatctatgagtctgtcaatccaaagcatcagtgtgttttgttatctctaagcctccctatcaagcaatggaaattcctttgtgttactcatacaattgggagaaccttctctggagggagtcagctgagatgctatgtagatggcgatctagtatcaagtgaaaagtgcaggtacacaaaagtaaatgaactaatgactcgctgtagtgttggtacagaattgatgcccatcggtgaagaaccttcttctcttggctttgagaacactcttgcttttactggtcaaatgggccctgtttatgcattttccgatgctctctcccctgaacaaataaggggcatttataacctaggaccaagttacatgtactctttccttggtgatcagaatttgcttacaaatgatgactcacggtacaagggaatacttgatgcaaaggatggcatttcatcgaaaatgatttttggcttgaatgcacaggctagtaacaatcggactttgtttaatgtatcatctgcactggatggtcttgacaagagtaagtttgaggcaaccaccatgggtgggacaaaattatgctcccggcgcctgctgcaagaaataatctattgtgttggtggcgtttctgtatttttccctcttctgatccactttgatgatgctgtggttcagaatggagagtttgccaccagagatcaattggctggtcaagttattgagcttgttgcatctgttctagatggaaatatagcaaatcagcaacagatgcatcttctttctggattttctattttagggttcctgttccagtctgtttcaccgcagctgctaaatatcaagactctttcagcatcgaaatacatgtttactattttgaagacctctagcatgtcagatattctattgagagatgctctttcacagttttacttgaatccacatatctgggcatatgcaacctatcaagtacagagagaactttttttgtttctgatacaatattttgaagctgatgggaaatttttaccagtattatgtgcgctccctaggatcattgatgtcataaaacagttctactcggaaaagctagatccaaggttttctaagcctttgctggtaagcaaaaaggtgactggggagagaccaagcatggaagaaattcgcaagatccgacttctcctgttgagtctggcagaaatgagcttaaagctaaaggtttctcaacatgatatcagagctcttgtttcctttcttgaacgaagtcaagatgttgcatgtgttgaggatatactccatatgattatccgcgccctttcacagaactcgcttgtaccatctttcttggagcaagtaaattcacttggtggttgttacattttcatcaatcttcttaagagggaatttgagccaatccgcctattgggccttcagcttcttggaaagcttttggttggggttccatctgagaaaagagggccaaaaatttttggcctccctgtaggacgacctagatccattgctgaagatataaggaaaggggcaacagcagcacctcaactgtttttttattcaatatctgatagacttttcaaatttccactttcagatcatttatgtgctagtctttttgatgttcttcttggtggagccagtcctaagcaggttttacagaaacgttcccaatctgatgctttaaaagataggagcatggctcctttttttgtccctcagattctggtttgcatttttaaatatattcaatcttgtcgagatgcttcagtgcgtacaaagattttaagtgatcttcttgatttgctggattcaaatcctgtgaatgttgaatcccttatggagtatggttggagctcttggcttgaaacatctgcgaagcttgatgtacttaggaactacaaatcgaattctgtagccaaggctgacggtttggagaccaatgagctgattcttgtgaggaacatgtattcgttggttctctcctattgcatattctctgtgaaaggtggctggcatcaactggaagatacaacaaatttccttctactgaaaattgagcaggggcagttaccaaattcctccatgctccgagacatttttgaagatctcattggaagccttcttgagacatcttctgaagaaagtgttttcaattctcagccatgccgtgataatatcttgtatcttttaaatcttagtcatgaactctttgttgaccaaattggaattaaactcttgtttccttcacctgacatgtctgcacatttgtcatctgatgacatcaactcggcagttctagaaattatgaatactgagggcaatggtctgcttacaagtcttccttggagtaatatattatttaatgatggagaaaagttgactgatgattggtggagcttttttgacaagatatggacgcttctgtgctatttgaatggcaaaggccaaaccagattaacaccaaagggtttaaatacagctggaccatctattgggcaacgggcccgcggattagtagagtccctcaatatcccagctgcagaaatggctgctgtagttgtaacaggaggcatcagtagcgcattaggtggaaagactaacaaagttgctgacaaagctatgatgctaagaggggagagatttccaagaattatcttccatctcatcattatgtatctctgcaaagctggcttagaaaacgcatccaaatgtgttcagcaatttatatcactgctccctaatattatctctgaagatgatcagtgcaaaaatagactgcatttcttgatttggtccttactaagggtaagatcccagtatgggcaacttgatgatggtgcacgtttccatgtcatgtcacacttgattcttgaaactgtgatctatggaaagtctatgcttacaactaatatagtaggcagagatgattctactgaagcaaataacagtaaggaggctgggttcattcttaatcttgtacagaaggaccgggttctcactgcggctactgatgaggcaaagtacatgaaggatgcaattgctgatcgcatgaagctggtccaggaactccattctaaacttgatgaacgctcaattcaagacgttgaacaactgcaaagttttgaggatgatgtacagtttgccaagactgctgctatagctgcggacgacagtagaaaagcagctttccagctagcatttgacgaggatcagcaaattgttgcagacaagtggattcatattctccgtgctctgagtgatgagagggggccatggtctgctgctccttttccaaataatattgtgacatactggaaacttgacaaaactgaagataaatggcggcgccgactgaagctcaagcggaactataagtttgatgagtgcctttgtcatccatcatccatcaaatctagtaacgataatgctgccccaactgttgacccatctgctaatgccaagataacagaaaaaatgaagcacttacttttgaaaggagtgcgtggaattacaggggatatcagttctgaatcatgtgaggatagcaacgacatgattgatcctccccagaatgtcccgccagagaaccacactgttagtgatacttctgattctgcagattcctcagattatcctgctattgttcaaaatagaaaagaaagttcatcaaccagtagtgataatgattatatcgaggtgctatcatcagttcactgtgttcttgtaacccccaaaagaaaactagctgggcaattgactatcacacgaaatgccctacatttttcttttgaatttctagttgaagggactgggggatcatctgttttcgacagatttcatgataaaaaagattcagactccaagaatgagatgggaggtgtggaaaaactgaagggcaatcttgatggaggacgaggcaatgctgctgaatctagcgacactcaaattaaaaatcaatctggtaaaatcaaacaccatagaaggtggaaaataactaggataaaagcagttcattggacacggtacctactacaatatactgccacagagatattctttgatgatgcaaacgcaccagtatttcttaacttttcatcccaaaatgatgctaaaagtgttgggtctcttttagtttccctgaggaatgatgctttgttccccaaaggaacaaccagagacaagaatagtttaatttcctttgttgacagaaaggttgcccttgaaatgtctgagagtgctagggaaagttggagaagaagagaaataagcaactttgagtaccttatgattctcaacactcttgctggacgatcttacaacgatttaactcaatatcctatatttccttggatattggctgactactcttcagaaaagcttgattttaacaaatcatctacattcagggacctttcaaaaccagtaggtgccttggatgcaaagcgctttaaggcttttgaagatagatatcttaattttgttgatccggatataccaagtttttactatggatcccactactctagcatgggaattgttctttattaccttctaaggcttgagccttttactgcgctgcaccgcaatcttcagggtggtaagtttgaccatgcagatcgtctatttcagagcattgaaagcacatacagcaactgcctatcaaatacaagtgatgtcaaagagcttatacctgaattcttttacatgcctgagtttcttgagaattcaaattcatatcaccttggcataaagcaggatggtgaaccattaggtgatgttggtctccctccatgggcaaagggttccccagaagaatttattcatatcagtcgagaagcccttgaaagtgaatatgtaagctctaatctacatcattggattgatctcatatttggttacaagcagcgaggcaagcctgcagttgaggcagcaaacatattttattatctgacatatgagggtgccgttgatttggagaacatggatgatatgttacaaaagtccgctattgaggaccaaattgcaaattttggacaaacaccaattcaaatttttcggaagaaacacccaaggagaggtcctcctataccaattgtgcatccactatattttgcgccacaatcgataacagtgacttctgttgtcccgaccatagtcacccctttatctgtattattcattggtttgttggactcaaacgttgtcatgatgaatgaggggctcatactctctgtaaagctttggctaacaacacagttgcagtctggtggaaacttcacattttctggatcactggaacctttcttcggaattggttctgatgttatttctccgaggaaaattggcacttctttggctgaaaatgttgagtttggaagacaatgcttagcaactgttcaaattcgtggtgacaattacttaattttgtgtggtaattgggagaatagtttccagatcatatctctaagtgatggaaaaattgtgcagagcatccggcagcataaagatgtagttagttgtgtggcagtttcatctgacggaagtgtgattgcaacgggaagctatgacacaactgttatgatctggtatgcatttcaagggagatcaaatgacaaaagatataggaatgcaaattacgatctatcaactaaggatcatgtcatcattgaaagcccttgccatatcttatgtggccatgatgatattatcacatgcttatttgtcagcacggaattagacattgttatcagtgggtcaaaggacgggacttgtatgttccatacactgcgtgaggggacatatgttcgatcgattcgacatccgtcaggtgctggtttgtcaaaaatggtaacatcacagcatggcagttgctgtggagagtttatggtatgtgctggtgatcatggtcaaattgttctccgctccatgcattctcttgatgttgtttggaggtacgagggagctgggaaaacaataacttccttagttgtgactcctgaggagtgcttcttggcgggaaccaaggatggtagcttgattgttttttcaatagaaaaccctttgcttcgtaaaaacgccatgcaacggcacaaggcaaaaccttccattggtggttagaggtgtagatcaaaacagtaccagaacttcttgctgcatttcaaataaaggttatcaatccgcaataattataacagagaagattctataactcctgtataaatgtacatacgtcatcagatcgagtttaccattctgaagagtgcatgtgccgatcacaatcaagaggataattcttctaactgcaaaacacatactatggtaactaaagtagattgatgtttcatgttcaagacaagagcaaggggataggaccttcaatatgatactcttgatatttgtagggtggtagctagttagtaatgggggtgcatttgagtgtaatataaacttattttgtgggggcattcttgctagataagagcgagccacagttttcctagatagaatttttaggtaaataggttgccactgacctgtaactattaatctgaacattgtaaatggaactgatgcgggttcataatagaaggcttgcaactttggaaaagatataattaaatcttatgagccgtctgaatttgtcactgaaaagctactaatgtgttgtatgagtgcacaacttgatgttgatttatcgttcgaacatggtagcgtcaatttcacaagcctaccaatatttcgagataacagttacaaaccgatactaatttttccctatttcccatctcgtcctactatgagctacttctgttcaaaaaaaaaccttgtgactttaaacaaattcagacaaattagtattgaactcagattatcatggggcccttagatctcttataaaattataggttttcacataatcatatggataattacttggcttagataattttgcaggtagcagccatgtagataaggattgggtaaatagagaaaagatgcgccagttgagttttgatacatgtggaccacattgtctgtctggggagataaa

SEQ ID NO: 42145 - DNA, 10941 bp, Zea Mays
attttgtaatttcctccctcaactctctcctataccgagaaacaacccctgaccattgcttcccttctttccagaagaactccggagtccggatctctcccctcgcactcctcgatctgactgttcaagaaaaaaaaccccttgatcggaagaaaaccgaccgggaacattttatcctgtcctgttgcaattcccctcacgcgatctcgccgtgtccacttctatcactacctggccacctggggatcgggttgggctggattggatttccgaaccgaatcctgcgggctcgcctcgcgtcgccgtcctcttcgccgcggaggtgatgcgctgttgccgccgccgccgccgctagcgccggatcgggggcgatgaacatcgtcaagggcgtcgccgatctcctccgcaagtcgacgcccgcctcgccgggggccggcgccggcgggggcggcggaggcggagaccgaggaggcgtcgggtccccatccgccgacaggctcgccgccccgccatccccaagggtccgcttcagtgacaatggtgaggaaggagtccttaatgcgctttggcacaagtatgagagtggcattgacaaggctgagaagaagaagactctgcaaacatttgtcatgcattttgtaaaagcatttaaagattgggagccaggctatattgagcaatcaatcgatcatgaatcgttatcagatgatacaattttaggatgctctactggtcatccttctgaggtcatccttattctcattcaagagatttctcaaataacttcatctatcactgagagcagcagctgtccagaatcctctgctaacatttcggagttattgggtgacctgggattaaacgcagaaggtttgacaattttagagtgcttgacaattctcacgcgctcagtgcataactgtaaagtgtttagttattatggaggtgtgcagaaggtcactgcacttttgaaagccgcagttgtaaagctgaagaccttgaccagcttgcttgccgcagatgaacaactgtcaaataaaactgtagagaacatgaggacgatgcaaaaggttcttgtgtacattgttacaataatttcaaacttcatggatctggaaccaaatacaacaaggatttcacagtttatactaaacagctccaggcataccctatcgagcaactatttggccacagttgctccaaatacttccaaaagcatggtttttgatagaaattggcagaaaaaggccattgtttcagttatggaagctggtggtgtcaattggttagtagaacttctaagggttattcgaagattgaatttgaaagagcagtggactgacttgtcactccactttataactttgtactctctgaggtcaactatatctgaaaatgttcgtgcacaaaatcatttcagaagtatagggggactggaggttctattagatggactgggactgccatcaagcaaattttcagtctcgaagcagtcttttgttcccagtgatgaaaggagtggcattctccagctccagatactatatttggaaattctgagggaagcagtgtatcctgtcccattatttttaagtgcttatcatcagcaaaaaattcttaatgctcaggccatcctgaaagctgataaagaaagcactgggccttcaccaacattggaatctttctcaaatcctgtagatattcttgatacatcagaatggaacgagtattctgtaaaattaagcataacactttgctcatttctccttcctcccaaggagatcaaatactgccctgctccaactgatgttacccaaatttcactatccatctcattggcttactgggagcaatgtgcaaggtggattataaaggttctttcaacagttttcccgtgcatgaaagcttgtgctagtgaaactgatttgcctaaccatataaggattttagcaaataccatgcagcattacatgctttgcacgtttaggaaggttcttatttcagcaccagctctacttaaatcttttcgagaggagggtctctgggatctgatattttcagagaaatttttctactttggatcatctttggactacattcaacagaatgatcaacttattgatgctcccaaatcaatcgattccaaaagtttcagtgaaaccgatgtcaacgttcttcaagcagaagctatttccttcttggagtttgctgcaacactcaatgaaaactcaaataacttgccagaatgcttagcattggtaggtgcacttgaacattgtacctatgatcctggattggccggtggtattgttaagagctttcacgtgatcctacaacttgcaactgaacaaactctagcttctttcaagtcaattgatgtgctcactagagtcctgaaggttgcatgccttcaagcacaagaaataaggaagctgtcccaagatgacttaaatcaaaatggttctcaatccagaaatgctcagacgacttattcagatgagagaattaagaacacttgtgcatttgtgaaactggctttcaaccttttcaaggagtatgccacaatatctgacattggaaggattacagttttatgcaatgctaattgcatcgagtgtttatttgatttgttccaagaagaatacctcaggaaacacatattggagcaagtacttgccttatttaggttaccttcgtcatcagcacaacaccacgcagcaaagatgctactatgctccaaatatcttgagactttcactcgtgcaaaagaaaaggaaaaggcttttgcagaattgtcaattgatctattagtcaatatgagagaggtcataatgatagaccgtgtgtattatcaaaatctgtttcgcaatggggagtgcttcttgcatatagtctctttgctgaatggaacttttgatgaagcagttggggagcaattggttcttaatgtccttcggacactgactgctctacttgctgaaaatgatgagtcaaaggttatcaaacactgcaaagcttgctattggacttctgtaagtggattccaagtcctaaactcctggatgccctacttgacatgcttgtcgatgggacatttgacataaatgaaaaagcaacaataaagaatgaagatgtgattatgctattaataaatgttctgcaaaaggtccgtttgcccctccctatattcctctgtgtgtgcgcatgcgctttgttgatacttatatgtgtatgtaacattggtgattttcaattggcagagcagcacttcactccagcattatgggcttatggtcttgcaacagttgctcaaggggtccattacaaatagaacttcttgtttcagagcagggttgcttagtttccttcttgattggtttaaagttgagaaagggaatgacattgtaatgaaaatcgcagaaataattcagatcattggtggacacagtatttgtggaaaggatattcgaaaattttttgccctccttcgtgacgaggagattattgcaaagcagcagcacagttcattgcttttgacaagtgttagtcacatgctcaaggaaaagggtcctgaagctttctttgagtttagtggtcatgactctggcattgaaattaaatcatcagttcaatggccttacaataaaggtttatctttctgttgctggctaagggtggaaagtttccctgagaagggtttgatgggtctttactctttcttcactgaaaatggaaaaggatgtttagctatgattgggaataatactctaatctatgagtctgtcaatccaaagcatcagtgtgttttgttatctctaagcctccctatcaagcaatggaaattcctttgtgttactcatacaattgggagaaccttctctggagggagtcagctgagatgctatgtagatggcgatctagtatcaagtgaaaagtgcaggtacacaaaagtaaatgaactaatgactcgctgtagtgttggtacagaattgatgcccatcggtgaagaaccttcttctcttggctttgagaacactcttgcttttactggtcaaatgggccctgtttatgcattttccgatgctctctcccctgaacaaataaggggcatttataacctaggaccaagttacatgtactctttccttggtgatcagaatttgcttacaaatgatgactcacggtacaagggaatacttgatgcaaaggatggcatttcatcgaaaatgatttttggcttgaatgcacaggctagtaacaatcggactttgtttaatgtatcatctgcactggatggtcttgacaagagtaagtttgaggcaaccaccatgggtgggacaaaattatgctcccggcgcctgctgcaagaaataatctattgtgttggtggcgtttctgtatttttccctcttctgatccactttgatgatgctgtggttcagaatggagagtttgccaccagagatcaattggctggtcaagttattgagcttgttgcatctgttctagatggaaatatagcaaatcagcaacagatgcatcttctttctggattttctattttagggttcctgttccagtctgtttcaccgcagctgctaaatatcaagactctttcagcatcgaaatacatgtttactattttgaagacctctagcatgtcagatattctattgagagatgctctttcacagttttacttgaatccacatatctgggcatatgcaacctatcaagtacagagagaactttttttgtttctgatacaatattttgaagctgatgggaaatttttaccagtattatgtgcgctccctaggatcattgatgtcataaaacagttctactcggaaaagctagatccaaggttttctaagcctttgctggtaagcaaaaaggtgactggggagagaccaagcatggaagaaattcgcaagatccgacttctcctgttgagtctggcagaaatgagcttaaagctaaaggtttctcaacatgatatcagagctcttgtttcctttcttgaacgaagtcaagatgttgcatgtgttgaggatatactccatatgattatccgcgccctttcacagaactcgcttgtaccatctttcttggagcaagtaaattcacttggtggttgttacattttcatcaatcttcttaagagggaatttgagccaatccgcctattgggccttcagcttcttggaaagcttttggttggggttccatctgagaaaagagggccaaaaatttttggcctccctgtaggacgacctagatccattgctgaagatataaggaaaggggcaacagcagcacctcaactgtttttttattcaatatctgatagacttttcaaatttccactttcagatcatttatgtgctagtctttttgatgttcttcttggtggagccagtcctaagcaggttttacagaaacgttcccaatctgatgctttaaaagataggagcatggctcctttttttgtccctcagattctggtttgcatttttaaatatattcaatcttgtcgagatgcttcagtgcgtacaaagattttaagtgatcttcttgatttgctggattcaaatcctgtgaatgttgaatcccttatggagtatggttggagctcttggcttgaaacatctgcgaagcttgatgtacttaggaactacaaatcgaattctgtagccaaggctgacggtttggagaccaatgagctgattcttgtgaggaacatgtattcgttggttctctcctattgcatattctctgtgaaaggtggctggcatcaactggaagatacaacaaatttccttctactgaaaattgagcaggggcagttaccaaattcctccatgctccgagacatttttgaagatctcattggaagccttcttgagacatcttctgaagaaagtgttttcaattctcagccatgccgtgataatatcttgtatcttttaaatcttagtcatgaactctttgttgaccaaattggaattaaactcttgtttccttcacctgacatgtctgcacatttgtcatctgatgacatcaactcggcagttctagaaattatgaatactgagggcaatggtctgcttacaagtcttccttggagtaatatattatttaatgatggagaaaagttgactgatgattggtggagcttttttgacaagatatggacgcttctgtgctatttgaatggcaaaggccaaaccagattaacaccaaagggtttaaatacagctggaccatctattgggcaacgggcccgcggattagtagagtccctcaatatcccagctgcagaaatggctgctgtagttgtaacaggaggcatcagtagcgcattaggtggaaagactaacaaagttgctgacaaagctatgatgctaagaggggagagatttccaagaattatcttccatctcatcattatgtatctctgcaaagctggcttagaaaacgcatccaaatgtgttcagcaatttatatcactgctccctaatattatctctgaagatgatcagtgcaaaaatagactgcatttcttgatttggtccttactaagggtaagatcccagtatgggcaacttgatgatggtgcacgtttccatgtcatgtcacacttgattcttgaaactgtgatctatggaaagtctatgcttacaactaatatagtaggcagagatgattctactgaagcaaataacagtaaggaggctgggttcattcttaatcttgtacagaaggaccgggttctcactgcggctactgatgaggcaaagtacatgaaggatgcaattgctgatcgcatgaagctggtccaggaactccattctaaacttgatgaacgctcaattcaagacgttgaacaactgcaaagttttgaggatgatgtacagtttgccaagactgctgctatagctgcggacgacagtagaaaagcagctttccagctagcatttgacgaggatcagcaaattgttgcagacaagtggattcatattctccgtgctctgagtgatgagagggggccatggtctgctgctccttttccaaataatattgtgacatactggaaacttgacaaaactgaagataaatggcggcgccgactgaagctcaagcggaactataagtttgatgagtgcctttgtcatccatcatccatcaaatctagtaacgataatgctgccccaactgttgacccatctgctaatgccaagataacagaaaaaatgaagcacttacttttgaaaggagtgcgtggaattacaggggatatcagttctgaatcatgtgaggatagcaacgacatgattgatcctccccagaatgtcccgccagagaaccacactgttagtgatacttctgattctgcagattcctcagattatcctgctattgttcaaaatagaaaagaaagttcatcaaccagtagtgataatgattatatcgaggtgctatcatcagttcactgtgttcttgtaacccccaaaagaaaactagctgggcaattgactatcacacgaaatgccctacatttttcttttgaatttctagttgaagggactgggggatcatctgttttcgacagatttcatgataaaaaagattcagactccaagaatgagatgggaggtgtggaaaaactgaagggcaatcttgatggaggacgaggcaatgctgctgaatctagcgacactcaaattaaaaatcaatctggtaaaatcaaacaccatagaaggtggaaaataactaggataaaagcagttcattggacacggtacctactacaatatactgccacagagatattctttgatgatgcaaacgcaccagtatttcttaacttttcatcccaaaatgatgctaaaagtgttgggtctcttttagtttccctgaggaatgatgctttgttccccaaaggaacaaccagagacaagaatagtttaatttcctttgttgacagaaaggttgcccttgaaatgtctgagagtgctagggaaagttggagaagaagagaaataagcaactttgagtaccttatgattctcaacactcttgctggacgatcttacaacgatttaactcaatatcctatatttccttggatattggctgactactcttcagaaaagcttgattttaacaaatcatctacattcagggacctttcaaaaccagtaggtgccttggatgcaaagcgctttaaggcttttgaagatagatatcttaattttgttgatccggatataccaagtttttactatggatcccactactctagcatgggaattgttctttattaccttctaaggcttgagccttttactgcgctgcaccgcaatcttcagggtggtaagtttgaccatgcagatcgtctatttcagagcattgaaagcacatacagcaactgcctatcaaatacaagtgatgtcaaagagcttatacctgaattcttttacatgcctgagtttcttgagaattcaaattcatatcaccttggcataaagcaggatggtgaaccattaggtgatgttggtctccctccatgggcaaagggttccccagaagaatttattcatatcagtcgagaagcccttgaaagtgaatatgtaagctctaatctacatcattggattgatctcatatttggttacaagcagcgaggcaagcctgcagttgaggcagcaaacatattttattatctgacatatgagggtgccgttgatttggagaacatggatgatatgttacaaaagtccgctattgaggaccaaattgcaaattttggacaaacaccaattcaaatttttcggaagaaacacccaaggagaggtcctcctataccaattgtgcatccactatattttgcgccacaatcgataacagtgacttctgttgtcccgaccatagtcacccctttatctgtattattcattggtttgttggactcaaacgttgtcatgatgaatgaggggctcatactctctgtaaagctttggctaacaacacagttgcagtctggtggaaacttcacattttctggatcactggaacctttcttcggaattggttctgatgttatttctccgaggaaaattggcacttctttggctgaaaatgttgagtttggaagacaatgcttagcaactgttcaaattcgtggtgacaattacttaattttgtgtggtaattgggagaatagtttccagatcatatctctaagtgatggaaaaattgtgcagagcatccggcagcataaagatgtagttagttgtgtggcagtttcatctgacggaagtgtgattgcaacgggaagctatgacacaactgttatgatctggtatgcatttcaagggagatcaaatgacaaaagatataggaatgcaaattacgatctatcaactaaggatcatgtcatcattgaaagcccttgccatatcttatgtggccatgatgatattatcacatgcttatttgtcagcacggaattagacattgttatcagtgggtcaaaggacgggacttgtatgttccatacactgcgtgaggggacatatgttcgatcgattcgacatccgtcaggtgctggtttgtcaaaaatggtaacatcacagcatggcaggttagtgatatactctgatagtgacctttctttgcatatgtattccataaatggaaagcatattgcttcttcggaatccaattgtcgtctcaattgcatggagctaagttgctgtggagagtttatggtatgtgctggtgatcatggtcaaattgttctccgctccatgcattctcttgatgttgtttggaggtacgagggagctgggaaaacaataacttccttagttgtgactcctgaggagtgcttcttggcgggaaccaaggatggtagcttgattgttttttcaatagaaaaccctttgcttcgtaaaaacgccatgcaacggcacaaggcaaaaccttccattggtggttagaggtgtagatcaaaacagtaccagaacttcttgctgcatttcaaataaaggttatcaatccgcaataattataacagagaagattctataactcctgtataaatgtacatacgtcatcagatcgagtttaccattctgaagagtgcatgtgccgatcacaatcaagaggataattcttctaactgcaaaacacatactatggtaactaaagtagattgatgtttcatgttcaagacaagagcaaggggataggaccttcaatatgatactcttgatatttgtagggtggtagctagttagtaatgggggtgcatttgagtgtaatataaacttattttgtgggggcattcttgctagataagagcgagccacagttttcctagatagaatttttaggtaaataggttgccactgacctgtaactattaatctgaacattgtaaatggaactgatgcgggttcataatagaaggcttgcaactttggaaaagatataattaaatcttatgagccgtctgaatttgtcactgaaaagctactaatgtgttgtatgagtgcacaacttgatgttgatttatcgttcgaacatggtagcgtcaatttcacaagcctaccaatatttcgagataacagttacaaaccgatactaatttttccctatttcccatctcgtcctactatgagctacttctgttcaaaaaaaaaccttgtgactttaaacaaattcagacaaattagtattgaactcagattatcatggggcccttagatctcttataaaattataggttttcacataatcatatggataattacttggcttagataattttgcaggtagcagccatgtagataaggattgggtaaatagagaaaagatgcgccagttgagttttgatacatgtggaccacattgtctgtctggggagataaa

SEQ ID NO: 42146 - DNA, 9963 bp, Zea Mays
ggcagcagctgtccagaatcctctgctaacatttcggagttattgggtgacctgggattaaacgcagaaggtttgacaattttagagtgcttgacaattctcacgcgctcagtgcataactgtaaagtgtttagttattatggaggtgtgcagaaggtcactgcacttttgaaagccgcagttgtaaagctgaagaccttgaccagcttgcttgccgcagatgaacaactgtcaaataaaactgtagagaacatgaggacgatgcaaaaggttcttgtgtacattgttacaataatttcaaacttcatggatctggaaccaaatacaacaaggatttcacagtttatactaaacagctccaggcataccctatcgagcaactatttggccacagttgctccaaatacttccaaaagcatggtttttgatagaaattggcagaaaaaggccattgtttcagttatggaagctggtggtgtcaattggttagtagaacttctaagggttattcgaagattgaatttgaaagagcagtggactgacttgtcactccactttataactttgtactctctgaggtcaactatatctgaaaatgttcgtgcacaaaatcatttcagaagtatagggggactggaggttctattagatggactgggactgccatcaagcaaattttcagtctcgaagcagtcttttgttcccagtgatgaaaggccatcctgaaagctgataaagaaagcactgggccttcaccaacattggaatctttctcaaatcctgtagatattcttgatacatcagaatggaacgagtattctgtaaaattaagcataacactttgctcatttctccttcctcccaaggagatcaaatactgccctgctccaactgatgttacccaaatttcactatccatctcattggcttactgggagcaatgtgcaaggtggattataaaggttctttcaacagttttcccgtgcatgaaagcttgtgctagtgaaactgatttgcctaaccatataaggattttagcaaataccatgcagcattacatgctttgcacgtttaggaaggttcttatttcagcaccagctctacttaaatcttttcgagaggagggtctctgggatctgatattttcagagaaatttttctactttggatcatctttggactacattcaacagaatgatcaacttattgatgctcccaaatcaatcgattccaaaagtttcagtgaaaccgatgtcaacgttcttcaagcagaagctatttccttcttggagtttgctgcaacactcaatgaaaactcaaataacttgccagaatgcttagcattggtaggtgcacttgaacattgtacctatgatcctggattggccggtggtattgttaagagctttcacgtgatcctacaacttgcaactgaacaaactctagcttctttcaagtcaattgatgtgctcactagagtcctgaaggttgcatgccttcaagcacaagaaataaggaagctgtcccaagatgacttaaatcaaaatggttctcaatccagaaatgctcagacgacttattcagatgagagaattaagaacacttgtgcatttgtgaaactggctttcaaccttttcaaggagtatgccacaatatctgacattggaaggattacagttttatgcaatgctaattgcatcgagtgtttatttgatttgttccaagaagaatacctcaggaaacacatattggagcaagtacttgccttatttaggttaccttcgtcatcagcacaacaccacgcagcaaagatgctactatgctccaaatatcttgagactttcactcgtgcaaaagaaaaggaaaaggcttttgcagaattgtcaattgatctattagtcaatatgagagaggtcataatgatagaccgtgtgtattatcaaaatctgtttcgcaatggggagtgcttcttgcatatagtctctttgctgaatggaacttttgatgaagcagttggggagcaattggttcttaatgtccttcggacactgactgctctacttgctgaaaatgatgagtcaaaggctgccttcagattgctggtcggtgcaggttatcaaacactgcaaagcttgctattggacttctgtaagtggattccaagtcctaaactcctggatgccctacttgacatgcttgtcgatgggacatttgacataaatgaaaaagcaacaataaagaatgaagatgtgattatgctattaataaatgttctgcaaaagagcagcacttcactccagcattatgggcttatggtcttgcaacagttgctcaaggggtccattacaaatagaacttcttgtttcagagcagggttgcttagtttccttcttgattggtttaaagttgagaaagggaatgacattgtaatgaaaatcgcagaaataattcagatcattggtggacacagtatttgtggaaaggatattcgaaaattttttgccctccttcgtgacgaggagattattgcaaagcagcagcacagttcattgcttttgacaagtgttagtcacatgctcaaggaaaagggtcctgaagctttctttgagtttagtggtcatgactctggcattgaaattaaatcatcagttcaatggccttacaataaaggtttatctttctgttgctggctaagggtggaaagtttccctgagaagggtttgatgggtctttactctttcttcactgaaaatggaaaaggatgtttagctatgattgggaataatactctaatctatgagtctgtcaatccaaagcatcagtgtgttttgttatctctaagcctccctatcaagcaatggaaattcctttgtgttactcatacaattgggagaaccttctctggagggagtcagctgagatgctatgtagatggcgatctagtatcaagtgaaaagtgcaggtacacaaaagtaaatgaactaatgactcgctgtagtgttggtacagaattgatgcccatcggtgaagaaccttcttctcttggctttgagaacactcttgcttttactggtcaaatgggccctgtttatgcattttccgatgctctctcccctgaacaaataaggggcatttataacctaggaccaagttacatgtactctttccttggtgatcagaatttgcttacaaatgatgactcacggtacaagggaatacttgatgcaaaggatggcatttcatcgaaaatgatttttggcttgaatgcacaggctagtaacaatcggactttgtttaatgtatcatctgcactggatggtcttgacaagagtaagtttgaggcaaccaccatgggtgggacaaaattatgctcccggcgcctgctgcaagaaataatctattgtgttggtggcgtttctgtatttttccctcttctgatccactttgatgatgctgtggttcagaatggagagtttgccaccagagatcaattggctggtcaagttattgagcttgttgcatctgttctagatggaaatatagcaaatcagcaacagatgcatcttctttctggattttctattttagggttcctgttccagtctgtttcaccgcagctgctaaatatcaagactctttcagcatcgaaatacatgtttactattttgaagacctctagcatgtcagatattctattgagagatgctctttcacagttttacttgaatccacatatctgggcatatgcaacctatcaagtacagagagaactttttttgtttctgatacaatattttgaagctgatgggaaatttttaccagtattatgtgcgctccctaggatcattgatgtcataaaacagttctactcggaaaagctagatccaaggttttctaagcctttgctggtaagcaaaaaggtgactggggagagaccaagcatggaagaaattcgcaagatccgacttctcctgttgagtctggcagaaatgagcttaaagctaaaggtttctcaacatgatatcagagctcttgtttcctttcttgaacgaagtcaagatgttgcatgtgttgaggatatactccatatgattatccgcgccctttcacagaactcgcttgtaccatctttcttggagcaagtaaattcacttggtggttgttacattttcatcaatcttcttaagagggaatttgagccaatccgcctattgggccttcagcttcttggaaagcttttggttggggttccatctgagaaaagagggccaaaaatttttggcctccctgtaggacgacctagatccattgctgaagatataaggaaaggggcaacagcagcacctcaactgtttttttattcaatatctgatagacttttcaaatttccactttcagatcatttatgtgctagtctttttgatgttcttcttggtggagccagtcctaagcaggttttacagaaacgttcccaatctgatgctttaaaagataggagcatggctcctttttttgtccctcagattctggtttgcatttttaaatatattcaatcttgtcgagatgcttcagtgcgtacaaagattttaagtgatcttcttgatttgctggattcaaatcctgtgaatgttgaatcccttatggagtatggttggagctcttggcttgaaacatctgcgaagcttgatgtacttaggaactacaaatcgaattctgtagccaaggctgacggtttggagaccaatgagctgattcttgtgaggaacatgtattcgttggttctctcctattgcatattctctgtgaaaggtggctggcatcaactggaagatacaacaaatttccttctactgaaaattgagcaggggcagttaccaaattcctccatgctccgagacatttttgaagatctcattggaagccttcttgagacatcttctgaagaaagtgttttcaattctcagccatgccgtgataatatcttgtatcttttaaatcttagtcatgaactctttgttgaccaaattggaattaaactcttgtttccttcacctgacatgtctgcacatttgtcatctgatgacatcaactcggcagttctagaaattatgaatactgagggcaatggtctgcttacaagtcttccttggagtaatatattatttaatgatggagaaaagttgactgatgattggtggagcttttttgacaagatatggacgcttctgtgctatttgaatggcaaaggccaaaccagattaacaccaaagggtttaaatacagctggaccatctattgggcaacgggcccgcggattagtagagtccctcaatatcccagctgcagaaatggctgctgtagttgtaacaggaggcatcagtagcgcattaggtggaaagactaacaaagttgctgacaaagctatgatgctaagaggggagagatttccaagaattatcttccatctcatcattatgtatctctgcaaagctggcttagaaaacgcatccaaatgtgttcagcaatttatatcactgctccctaatattatctctgaagatgatcagtgcaaaaatagactgcatttcttgatttggtccttactaagggtaagatcccagtatgggcaacttgatgatggtgcacgtttccatgtcatgtcacacttgattcttgaaactgtgatctatggaaagtctatgcttacaactaatatagtaggcagagatgattctactgaagcaaataacagtaaggaggctgggttcattcttaatcttgtacagaaggaccgggttctcactgcggctactgatgaggcaaagtacatgaaggatgcaattgctgatcgcatgaagctggtccaggaactccattctaaacttgatgaacgctcaattcaagacgttgaacaactgcaaagttttgaggatgatgtacagtttgccaagactgctgctatagctgcggacgacagtagaaaagcagctttccagctagcatttgacgaggatcagcaaattgttgcagacaagtggattcatattctccgtgctctgagtgatgagagggggccatggtctgctgctccttttccaaataatattgtgacatactggaaacttgacaaaactgaagataaatggcggcgccgactgaagctcaagcggaactataagtttgatgagtgcctttgtcatccatcatccatcaaatctagtaacgataatgctgccccaactgttgacccatctgctaatgccaagataacagaaaaaatgaagcacttacttttgaaaggagtgcgtggaattacaggggatatcagttctgaatcatgtgaggatagcaacgacatgattgatcctccccagaatgtcccgccagagaaccacactgttagtgatacttctgattctgcagattcctcagattatcctgctattgttcaaaatagaaaagaaagttcatcaaccagtagtgataatgattatatcgaggtgctatcatcagttcactgtgttcttgtaacccccaaaagaaaactagctgggcaattgactatcacacgaaatgccctacatttttcttttgaatttctagttgaagggactgggggatcatctgttttcgacagatttcatgataaaaaagattcagactccaagaatgagatgggaggtgtggaaaaactgaagggcaatcttgatggaggacgaggcaatgctgctgaatctagcgacactcaaattaaaaatcaatctggtaaaatcaaacaccatagaaggtggaaaataactaggataaaagcagttcattggacacggtacctactacaatatactgccacagagatattctttgatgatgcaaacgcaccagtatttcttaacttttcatcccaaaatgatgctaaaagtgttgggtctcttttagtttccctgaggaatgatgctttgttccccaaaggaacaaccagagacaagaatagtttaatttcctttgttgacagaaaggttgcccttgaaatgtctgagagtgctagggaaagttggagaagaagagaaataagcaactttgagtaccttatgattctcaacactcttgctggacgatcttacaacgatttaactcaatatcctatatttccttggatattggctgactactcttcagaaaagcttgattttaacaaatcatctacattcagggacctttcaaaaccagtaggtgccttggatgcaaagcgctttaaggcttttgaagatagatatcttaattttgttgatccggatataccaagtttttactatggatcccactactctagcatgggaattgttctttattaccttctaaggcttgagccttttactgcgctgcaccgcaatcttcagggtggtaagtttgaccatgcagatcgtctatttcagagcattgaaagcacatacagcaactgcctatcaaatacaagtgatgtcaaagagcttatacctgaattcttttacatgcctgagtttcttgagaattcaaattcatatcaccttggcataaagcaggatggtgaaccattaggtgatgttggtctccctccatgggcaaagggttccccagaagaatttattcatatcagtcgagaagcccttgaaagtgaatatgtaagctctaatctacatcattggattgatctcatatttggttacaagcagcgaggcaagcctgcagttgaggcagcaaacatattttattatctgacatatgagggtgccgttgatttggagaacatggatgatatgttacaaaagtccgctattgaggaccaaattgcaaattttggacaaacaccaattcaaatttttcggaagaaacacccaaggagaggtcctcctataccaattgtgcatccactatattttgcgccacaatcgataacagtgacttctgttgtcccgaccatagtcacccctttatctgtattattcattggtttgttggactcaaacgttgtcatgatgaatgaggggctcatactctctgtaaagctttggctaacaacacagttgcagtctggtggaaacttcacattttctggatcactggaacctttcttcggaattggttctgatgttatttctccgaggaaaattggcacttctttggctgaaaatgttgagtttggaagacaatgcttagcaactgttcaaattcgtggtgacaattacttaattttgtgtggtaattgggagaatagtttccagatcatatctctaagtgatggaaaaattgtgcagagcatccggcagcataaagatgtagttagttgtgtggcagtttcatctgacggaagtgtgattgcaacgggaagctatgacacaactgttatgatctggtatgcatttcaagggagatcaaatgacaaaagatataggaatgcaaattacgatctatcaactaaggatcatgtcatcattgaaagcccttgccatatcttatgtggccatgatgatattatcacatgcttatttgtcagcacggaattagacattgttatcagtgggtcaaaggacgggacttgtatgttccatacactgcgtgaggggacatatgttcgatcgattcgacatccgtcaggtgctggtttgtcaaaaatggtaacatcacagcatggcaggttagtgatatactctgatagtgacctttctttgcatatgtattccataaatggaaagcatattgcttcttcggaatccaattgtcgtctcaattgcatggagctaagttgctgtggagagtttatggtatgtgctggtgatcatggtcaaattgttctccgctccatgcattctcttgatgttgtttggaggtacgagggagctgggaaaacaataacttccttagttgtgactcctgaggagtgcttcttggcgggaaccaaggatggtagcttgattgttttttcaatagaaaaccctttgcttcgtaaaaacgccatgcaacggcacaaggcaaaaccttccattggtggttagaggtgtagatcaaaacagtaccagaacttcttgctgcatttcaaataaaggttatcaatccgcaataattataacagagaagattctataactcctgtataaatgtacatacgtcatcagatcgagtttaccattctgaagagtgcatgtgccgatcacaatcaagaggataattcttctaactgcaaaacacatactatggtaactaaagtagattgatgtttcatgttcaagacaagagcaaggggataggaccttcaatatgatactcttgatatttgtagggtggtagctagttagtaatgggggtgcatttgagtgtaatataaacttattttgtgggggcattcttgctagataagagcgagccacagttttcctagatagaatttttaggtaaataggttgccactgacctgtaactattaatctgaacattgtaaatggaactgatgcgggttcataatagaaggcttgcaactttggaaaagatataattaaatcttatgagccgtctgaatttgtcactgaaaagctactaatgtgttgtatgagtgcacaacttgatgttgatttatcgttcgaacatggtagcgtcaatttcacaagcctaccaatatttcgagataacagttacaaaccgatactaatttttccctatttcccatctcgtcctactatgagctacttctgttcaaaaaaaaaccttgtgactttaaacaaattcagacaaattagtattgaactcagattatcatggggcccttagatctcttataaaattataggttttcacataatcatatggataattacttggcttagataattttgcaggtagcagccatgtagataaggattgggtaaatagagaaaagatgcgccagttgagttttgatacatgtggaccacattgtctgtctggggagataaa

SEQ ID NO: 42147 - DNA, 10002 bp, Zea Mays
attttgtcgtttaaacgtcgttttaataacaatgccctgaatgttgatgactaatccgaaaaagcttagatcttttctacactattttaattttctgcgcaggagggtgaatctgaatcacttctgtttcatttcccaaccgactccaaacctgaactgtattgcctagtacaacatttgtgttccttttacatttggctagctactaaaagttggtttgttaataaaacttgtcaggtgtagatttgtttgttcagaggtatttccctctatttgtcatcatattttttgtgaggtcagagagagtaagatgtaccttgataccatcaccagcagcactgtgtcttctcttggtttacataattcgaagagttgctggcttaaaacagcggtgtgggtcgtgtttcctacttgttttagtcggtgatccgtagaacttctaagggttattcgaagattgaatttgaaagagcagtggactgacttgtcactccactttataactttgtactctctgaggtcaactatatctgaaaatgttcgtgcacaaaatcatttcagaagtatagggggactggaggttctattagatggactgggactgccatcaagcaaattttcagtctcgaagcagtcttttgttcccagtgatgaaaggagtggcattctccagctccagatactatatttggaaattctgagggaagcagtcttcggtaatgtcaataatctgcaatttttgtgtgaaaatgggcggatacataaatttgcaaacagtatctgttggcctgcatttatgcttcaggagtatcatcagcaaaaaattcttaatgctcaggccatcctgaaagctgataaagaaagcactgggccttcaccaacattggaatctttctcaaatcctgtagatattcttgatacatcagaatggaacgagtattctgtaaaattaagcataacactttgctcatttctccttcctcccaaggagatcaaatactgccctgctccaactgatgttacccaaatttcactatccatctcattggcttactgggagcaatgtgcaaggtggattataaaggttctttcaacagttttcccgtgcatgaaagcttgtgctagtgaaactgatttgcctaaccatataaggattttagcaaataccatgcagcattacatgctttgcacgtttaggaaggttcttatttcagcaccagctctacttaaatcttttcgagaggagggtctctgggatctgatattttcagagaaatttttctactttggatcatctttggactacattcaacagaatgatcaacttattgatgctcccaaatcaatcgattccaaaagtttcagtgaaaccgatgtcaacgttcttcaagcagaagctatttccttcttggagtttgctgcaacactcaatgaaaactcaaataacttgccagaatgcttagcattggtaggtgcacttgaacattgtacctatgatcctggattggccggtggtattgttaagagctttcacgtgatcctacaacttgcaactgaacaaactctagcttctttcaagtcaattgatgtgctcactagagtcctgaaggttgcatgccttcaagcacaagaaataaggaagctgtcccaagatgacttaaatcaaaatggttctcaatccagaaatgctcagacgacttattcagatgagagaattaagaacacttgtgcatttgtgaaactggctttcaaccttttcaaggagtatgccacaatatctgacattggaaggattacagttttatgcaatgctaattgcatcgagtgtttatttgatttgttccaagaagaatacctcaggaaacacatattggagcaagtacttgccttatttaggttaccttcgtcatcagcacaacaccacgcagcaaagatgctactatgctccaaatatcttgagactttcactcgtgcaaaagaaaaggaaaaggcttttgcagaattgtcaattgatctattagtcaatatgagagaggtcataatgatagaccgtgtgtattatcaaaatctgtttcgcaatggggagtgcttcttgcatatagtctctttgctgaatggaacttttgatgaagcagttggggagcaattggttcttaatgtccttcggacactgactgctctacttgctgaaaatgatgagtcaaaggctgccttcagattgctggtcggtgcaggttatcaaacactgcaaagcttgctattggacttctgtaagtggattccaagtcctaaactcctggatgccctacttgacatgcttgtcgatgggacatttgacataaatgaaaaagcaacaataaagaatgaagatgtgattatgctattaataaatgttctgcaaaagagcagcacttcactccagcattatgggcttatggtcttgcaacagttgctcaaggggtccattacaaatagaacttcttgtttcagagcagggttgcttagtttccttcttgattggtttaaagttgagaaagggaatgacattgtaatgaaaatcgcagaaataattcagatcattggtggacacagtatttgtggaaaggatattcgaaaattttttgccctccttcgtgacgaggagattattgcaaagcagcagcacagttcattgcttttgacaagtgttagtcacatgctcaaggaaaagggtcctgaagctttctttgagtttagtggtcatgactctggcattgaaattaaatcatcagttcaatggccttacaataaaggtttatctttctgttgctggctaagggtggaaagtttccctgagaagggtttgatgggtctttactctttcttcactgaaaatggaaaaggatgtttagctatgattgggaataatactctaatctatgagtctgtcaatccaaagcatcagtgtgttttgttatctctaagcctccctatcaagcaatggaaattcctttgtgttactcatacaattgggagaaccttctctggagggagtcagctgagatgctatgtagatggcgatctagtatcaagtgaaaagtgcaggtacacaaaagtaaatgaactaatgactcgctgtagtgttggtacagaattgatgcccatcggtgaagaaccttcttctcttggctttgagaacactcttgcttttactggtcaaatgggccctgtttatgcattttccgatgctctctcccctgaacaaataaggggcatttataacctaggaccaagttacatgtactctttccttggtgatcagaatttgcttacaaatgatgactcacggtacaagggaatacttgatgcaaaggatggcatttcatcgaaaatgatttttggcttgaatgcacaggctagtaacaatcggactttgtttaatgtatcatctgcactggatggtcttgacaagagtaagtttgaggcaaccaccatgggtgggacaaaattatgctcccggcgcctgctgcaagaaataatctattgtgttggtggcgtttctgtatttttccctcttctgatccactttgatgatgctgtggttcagaatggagagtttgccaccagagatcaattggctggtcaagttattgagcttgttgcatctgttctagatggaaatatagcaaatcagcaacagatgcatcttctttctggattttctattttagggttcctgttccagtctgtttcaccgcagctgctaaatatcaagactctttcagcatcgaaatacatgtttactattttgaagacctctagcatgtcagatattctattgagagatgctctttcacagttttacttgaatccacatatctgggcatatgcaacctatcaagatcattgatgtcataaaacagttctactcggaaaagctagatccaaggttttctaagcctttgctggtaagcaaaaaggtgactggggagagaccaagcatggaagaaattcgcaagatccgacttctcctgttgagtctggcagaaatgagcttaaagctaaaggtttctcaacatgatatcagagctcttgtttcctttcttgaacgaagtcaagatgttgcatgtgttgaggatatactccatatgattatccgcgccctttcacagaactcgcttgtaccatctttcttggagcaagtaaattcacttggtggttgttacattttcatcaatcttcttaagagggaatttgagccaatccgcctattgggccttcagcttcttggaaagcttttggttggggttccatctgagaaaagagggccaaaaatttttggcctccctgtaggacgacctagatccattgctgaagatataaggaaaggggcaacagcagcacctcaactgtttttttattcaatatctgatagacttttcaaatttccactttcagatcatttatgtgctagtctttttgatgttcttcttggtggagccagtcctaagcaggttttacagaaacgttcccaatctgatgctttaaaagataggagcatggctcctttttttgtccctcagattctggtttgcatttttaaatatattcaatcttgtcgagatgcttcagtgcgtacaaagattttaagtgatcttcttgatttgctggattcaaatcctgtgaatgttgaatcccttatggagtatggttggagctcttggcttgaaacatctgcgaagcttgatgtacttaggaactacaaatcgaattctgtagccaaggctgacggtttggagaccaatgagctgattcttgtgaggaacatgtattcgttggttctctcctattgcatattctctgtgaaaggtggctggcatcaactggaagatacaacaaatttccttctactgaaaattgagcaggggcagttaccaaattcctccatgctccgagacatttttgaagatctcattggaagccttcttgagacatcttctgaagaaagtgttttcaattctcagccatgccgtgataatatcttgtatcttttaaatcttagtcatgaactctttgttgaccaaattggaattaaactcttgtttccttcacctgacatgtctgcacatttgtcatctgatgacatcaactcggcagttctagaaattatgaatactgagggcaatggtctgcttacaagtcttccttggagtaatatattatttaatgatggagaaaagttgactgatgattggtggagcttttttgacaagatatggacgcttctgtgctatttgaatggcaaaggccaaaccagattaacaccaaagggtttaaatacagctggaccatctattgggcaacgggcccgcggattagtagagtccctcaatatcccagctgcagaaatggctgctgtagttgtaacaggaggcatcagtagcgcattaggtggaaagactaacaaagttgctgacaaagctatgatgctaagaggggagagatttccaagaattatcttccatctcatcattatgtatctctgcaaagctggcttagaaaacgcatccaaatgtgttcagcaatttatatcactgctccctaatattatctctgaagatgatcagtgcaaaaatagactgcatttcttgatttggtccttactaagggtaagatcccagtatgggcaacttgatgatggtgcacgtttccatgtcatgtcacacttgattcttgaaactgtgatctatggaaagtctatgcttacaactaatatagtaggcagagatgattctactgaagcaaataacagtaaggaggctgggttcattcttaatcttgtacagaaggaccgggttctcactgcggctactgatgaggcaaagtacatgaaggatgcaattgctgatcgcatgaagctggtccaggaactccattctaaacttgatgaacgctcaattcaagacgttgaacaactgcaaagttttgaggatgatgtacagtttgccaagactgctgctatagctgcggacgacagtagaaaagcagctttccagctagcatttgacgaggatcagcaaattgttgcagacaagtggattcatattctccgtgctctgagtgatgagagggggccatggtctgctgctccttttccaaataatattgtgacatactggaaacttgacaaaactgaagataaatggcggcgccgactgaagctcaagcggaactataagtttgatgagtgcctttgtcatccatcatccatcaaatctagtaacgataatgctgccccaactgttgacccatctgctaatgccaagataacagaaaaaatgaagcacttacttttgaaaggagtgcgtggaattacaggggatatcagttctgaatcatgtgaggatagcaacgacatgattgatcctccccagaatgtcccgccagagaaccacactgttagtgatacttctgattctgcagattcctcagattatcctgctattgttcaaaatagaaaagaaagttcatcaaccagtagtgataatgattatatcgaggtgctatcatcagttcactgtgttcttgtaacccccaaaagaaaactagctgggcaattgactatcacacgaaatgccctacatttttcttttgaatttctagttgaagggactgggggatcatctgttttcgacagatttcatgataaaaaagattcagactccaagaatgagatgggaggtgtggaaaaactgaagggcaatcttgatggaggacgaggcaatgctgctgaatctagcgacactcaaattaaaaatcaatctggtaaaatcaaacaccatagaaggtggaaaataactaggataaaagcagttcattggacacggtacctactacaatatactgccacagagatattctttgatgatgcaaacgcaccagtatttcttaacttttcatcccaaaatgatgctaaaagtgttgggtctcttttagtttccctgaggaatgatgctttgttccccaaaggaacaaccagagacaagaatagtttaatttcctttgttgacagaaaggttgcccttgaaatgtctgagagtgctagggaaagttggagaagaagagaaataagcaactttgagtaccttatgattctcaacactcttgctggacgatcttacaacgatttaactcaatatcctatatttccttggatattggctgactactcttcagaaaagcttgattttaacaaatcatctacattcagggacctttcaaaaccagtaggtgccttggatgcaaagcgctttaaggcttttgaagatagatatcttaattttgttgatccggatataccaagtttttactatggatcccactactctagcatgggaattgttctttattaccttctaaggcttgagccttttactgcgctgcaccgcaatcttcagggtggtaagtttgaccatgcagatcgtctatttcagagcattgaaagcacatacagcaactgcctatcaaatacaagtgatgtcaaagagcttatacctgaattcttttacatgcctgagtttcttgagaattcaaattcatatcaccttggcataaagcaggatggtgaaccattaggtgatgttggtctccctccatgggcaaagggttccccagaagaatttattcatatcagtcgagaagcccttgaaagtgaatatgtaagctctaatctacatcattggattgatctcatatttggttacaagcagcgaggcaagcctgcagttgaggcagcaaacatattttattatctgacatatgagggtgccgttgatttggagaacatggatgatatgttacaaaagtccgctattgaggaccaaattgcaaattttggacaaacaccaattcaaatttttcggaagaaacacccaaggagaggtcctcctataccaattgtgcatccactatattttgcgccacaatcgataacagtgacttctgttgtcccgaccatagtcacccctttatctgtattattcattggtttgttggactcaaacgttgtcatgatgaatgaggggctcatactctctgtaaagctttggctaacaacacagttgcagtctggtggaaacttcacattttctggatcactggaacctttcttcggaattggttctgatgttatttctccgaggaaaattggcacttctttggctgaaaatgttgagtttggaagacaatgcttagcaactgttcaaattcgtggtgacaattacttaattttgtgtggtaattgggagaatagtttccagatcatatctctaagtgatggaaaaattgtgcagagcatccggcagcataaagatgtagttagttgtgtggcagtttcatctgacggaagtgtgattgcaacgggaagctatgacacaactgttatgatctggtatgcatttcaagggagatcaaatgacaaaagatataggaatgcaaattacgatctatcaactaaggatcatgtcatcattgaaagcccttgccatatcttatgtggccatgatgatattatcacatgcttatttgtcagcacggaattagacattgttatcagtgggtcaaaggacgggacttgtatgttccatacactgcgtgaggggacatatgttcgatcgattcgacatccgtcaggtgctggtttgtcaaaaatggtaacatcacagcatggcaggttagtgatatactctgatagtgacctttctttgcatatgtattccataaatggaaagcatattgcttcttcggaatccaattgtcgtctcaattgcatggagctaagttgctgtggagagtttatggtatgtgctggtgatcatggtcaaattgttctccgctccatgcattctcttgatgttgtttggaggtacgagggagctgggaaaacaataacttccttagttgtgactcctgaggagtgcttcttggcgggaaccaaggatggtagcttgattgttttttcaatagaaaaccctttgcttcgtaaaaacgccatgcaacggcacaaggcaaaaccttccattggtggttagaggtgtagatcaaaacagtaccagaacttcttgctgcatttcaaataaaggttatcaatccgcaataattataacagagaagattctataactcctgtataaatgtacatacgtcatcagatcgagtttaccattctgaagagtgcatgtgccgatcacaatcaagaggataattcttctaactgcaaaacacatactatggtaactaaagtagattgatgtttcatgttcaagacaagagcaaggggataggaccttcaatatgatactcttgatatttgtagggtggtagctagttagtaatgggggtgcatttgagtgtaatataaacttattttgtgggggcattcttgctagataagagcgagccacagttttcctagatagaatttttaggtaaataggttgccactgacctgtaactattaatctgaacattgtaaatggaactgatgcgggttcataatagaaggcttgcaactttggaaaagatataattaaatcttatgagccgtctgaatttgtcactgaaaagctactaatgtgttgtatgagtgcacaacttgatgttgatttatcgttcgaacatggtagcgtcaatttcacaagcctaccaatatttcgagataacagttacaaaccgatactaatttttccctatttcccatctcgtcctactatgagctacttctgttcaaaaaaaaaccttgtgactttaaacaaattcagacaaattagtattgaactcagattatcatggggcccttagatctcttataaaattataggttttcacataatcatatggataattacttggcttagataattttgcaggtagcagccatgtagataaggattgggtaaatagagaaaagatgcgccagttgagttttgatacatgtggaccacattgtctgtctggggagataaa

SEQ ID NO: 42148 - DNA, 9780 bp, Zea Mays
gagagtaagatgtaccttgataccatcaccagcagcactgtgtcttctcttggtttacataattcgaagagttgctggcttaaaacagcggtgtgggtcgtgtttcctacttgttttagtcggtgatccgtagaacttctaagggttattcgaagattgaatttgaaagagcagtggactgacttgtcactccactttataactttgtactctctgaggtcaactatatctgaaaatgttcgtgcacaaaatcatttcagaagtatagggggactggaggttctattagatggactgggactgccatcaagcaaattttcagtctcgaagcagtcttttgttcccagtgatgaaaggagtggcattctccagctccagatactatatttggaaattctgagggaagcagtcttcggtaatgtcaataatctgcaatttttgtgtgaaaatgggcggatacataaatttgcaaacagtatctgttggcctgcatttatgcttcaggagtatcatcagcaaaaaattcttaatgctcaggccatcctgaaagctgataaagaaagcactgggccttcaccaacattggaatctttctcaaatcctgtagatattcttgatacatcagaatggaacgagtattctgtaaaattaagcataacactttgctcatttctccttcctcccaaggagatcaaatactgccctgctccaactgatgttacccaaatttcactatccatctcattggcttactgggagcaatgtgcaaggtggattataaaggttctttcaacagttttcccgtgcatgaaagcttgtgctagtgaaactgatttgcctaaccatataaggattttagcaaataccatgcagcattacatgctttgcacgtttaggaaggttcttatttcagcaccagctctacttaaatcttttcgagaggagggtctctgggatctgatattttcagagaaatttttctactttggatcatctttggactacattcaacagaatgatcaacttattgatgctcccaaatcaatcgattccaaaagtttcagtgaaaccgatgtcaacgttcttcaagcagaagctatttccttcttggagtttgctgcaacactcaatgaaaactcaaataacttgaatgcttagcattggtaggtgcacttgaacattgtacctatgatcctggattggccggtggtattgttaagagctttcacgtgatcctacaacttgcaactgaacaaactctagcttctttcaagtcaattgatgtgctcactagagtcctgaaggttgcatgccttcaagcacaagaaataaggaagctgtcccaagatgacttaaatcaaaatggttctcaatccagaaatgctcagacgacttattcagatgagagaattaagaacacttgtgcatttgtgaaactggctttcaaccttttcaaggagtatgccacaatatctgacattggaaggattacagttttatgcaatgctaattgcatcgagtgtttatttgatttgttccaagaagaatacctcaggaaacacatattggagcaagtacttgccttatttaggttaccttcgtcatcagcacaacaccacgcagcaaagatgctactatgctccaaatatcttgagactttcactcgtgcaaaagaaaaggaaaaggcttttgcagaattgtcaattgatctattagtcaatatgagagaggtcataatgatagaccgtgtgtattatcaaaatctgtttcgcaatggggagtgcttcttgcatatagtctctttgctgaatggaacttttgatgaagcagttggggagcaattggttcttaatgtccttcggacactgactgctctacttgctgaaaatgatgagtcaaaggctgccttcagattgctggtcggtgcaggttatcaaacactgcaaagcttgctattggacttctgtaagtggattccaagtcctaaactcctggatgccctacttgacatgcttgtcgatgggacatttgacataaatgaaaaagcaacaataaagaatgaagatgtgattatgctattaataaatgttctgcaaaagagcagcacttcactccagcattatgggcttatggtcttgcaacagttgctcaaggggtccattacaaatagaacttcttgtttcagagcagggttgcttagtttccttcttgattggtttaaagttgagaaagggaatgacattgtaatgaaaatcgcagaaataattcagatcattggtggacacagtatttgtggaaaggatattcgaaaattttttgccctccttcgtgacgaggagattattgcaaagcagcagcacagttcattgcttttgacaagtgttagtcacatgctcaaggaaaagggtcctgaagctttctttgagtttagtggtcatgactctggcattgaaattaaatcatcagttcaatggccttacaataaaggtttatctttctgttgctggctaagggtggaaagtttccctgagaagggtttgatgggtctttactctttcttcactgaaaatggaaaaggatgtttagctatgattgggaataatactctaatctatgagtctgtcaatccaaagcatcagtgtgttttgttatctctaagcctccctatcaagcaatggaaattcctttgtgttactcatacaattgggagaaccttctctggagggagtcagctgagatgctatgtagatggcgatctagtatcaagtgaaaagtgcaggtacacaaaagtaaatgaactaatgactcgctgtagtgttggtacagaattgatgcccatcggtgaagaaccttcttctcttggctttgagaacactcttgcttttactggtcaaatgggccctgtttatgcattttccgatgctctctcccctgaacaaataaggggcatttataacctaggaccaagttacatgtactctttccttggtgatcagaatttgcttacaaatgatgactcacggtacaagggaatacttgatgcaaaggatggcatttcatcgaaaatgatttttggcttgaatgcacaggctagtaacaatcggactttgtttaatgtatcatctgcactggatggtcttgacaagagtaagtttgaggcaaccaccatgggtgggacaaaattatgctcccggcgcctgctgcaagaaataatctattgtgttggtggcgtttctgtatttttccctcttctgatccactttgatgatgctgtggttcagaatggagagtttgccaccagagatcaattggctggtcaagttattgagcttgttgcatctgttctagatggaaatatagcaaatcagcaacagatgcatcttctttctggattttctattttagggttcctgttccagtctgtttcaccgcagctgctaaatatcaagactctttcagcatcgaaatacatgtttactattttgaagacctctagcatgtcagatattctattgagagatgctctttcacagttttacttgaatccacatatctgggcatatgcaacctatcaagtacagagagaactttttttgtttctgatacaatattttgaagctgatgggaaatttttaccagtattatgtgcgctccctaggatcattgatgtcataaaacagttctactcggaaaagctagatccaaggttttctaagcctttgctggtaagcaaaaaggtgactggggagagaccaagcatggaagaaattcgcaagatccgacttctcctgttgagtctggcagaaatgagcttaaagctaaaggtttctcaacatgatatcagagctcttgtttcctttcttgaacgaagtcaagatgttgcatgtgttgaggatatactccatatgattatccgcgccctttcacagaactcgcttgtaccatctttcttggagcaagtaaattcacttggtggttgttacattttcatcaatcttcttaagagggaatttgagccaatccgcctattgggccttcagcttcttggaaagcttttggttggggttccatctgagaaaagagggccaaaaatttttggcctccctgtaggacgacctagatccattgctgaagatataaggaaaggggcaacagcagcacctcaactgtttttttattcaatatctgatagacttttcaaatttccactttcagatcatttatgtgctagtctttttgatgttcttcttggtggagccagtcctaagcaggttttacagaaacgttcccaatctgatgctttaaaagataggagcatggctcctttttttgtccctcagattctggtttgcatttttaaatatattcaatcttgtcgagatgcttcagtgcgtacaaagattttaagtgatcttcttgatttgctggattcaaatcctgtgaatgttgaatcccttatggagtatggttggagctcttggcttgaaacatctgcgaagcttgatgtacttaggaactacaaatcgaattctgtagccaaggctgacggtttggagaccaatgagctgattcttgtgaggaacatgtattcgttggttctctcctattgcatattctctgtgaaaggtggctggcatcaactggaagatacaacaaatttccttctactgaaaattgagcaggggcagttaccaaattcctccatgctccgagacatttttgaagatctcattggaagccttcttgagacatcttctgaagaaagtgttttcaattctcagccatgccgtgataatatcttgtatcttttaaatcttagtcatgaactctttgttgaccaaattggaattaaactcttgtttccttcacctgacatgtctgcacatttgtcatctgatgacatcaactcggcagttctagaaattatgaatactgagggcaatggtctgcttacaagtcttccttggagtaatatattatttaatgatggagaaaagttgactgatgattggtggagcttttttgacaagatatggacgcttctgtgctatttgaatggcaaaggccaaaccagattaacaccaaagggtttaaatacagctggaccatctattgggcaacgggcccgcggattagtagagtccctcaatatcccagctgcagaaatggctgctgtagttgtaacaggaggcatcagtagcgcattaggtggaaagactaacaaagttgctgacaaagctatgatgctaagaggggagagatttccaagaattatcttccatctcatcattatgtatctctgcaaagctggcttagaaaacgcatccaaatgtgttcagcaatttatatcactgctccctaatattatctctgaagatgatcagtgcaaaaatagactgcatttcttgatttggtccttactaagggtaagatcccagtatgggcaacttgatgatggtgcacgtttccatgtcatgtcacacttgattcttgaaactgtgatctatggaaagtctatgcttacaactaatatagtaggcagagatgattctactgaagcaaataacagtaaggaggctgggttcattcttaatcttgtacagaaggaccgggttctcactgcggctactgatgaggcaaagtacatgaaggatgcaattgctgatcgcatgaagctggtccaggaactccattctaaacttgatgaacgctcaattcaagacgttgaacaactgcaaagttttgaggatgatgtacagtttgccaagactgctgctatagctgcggacgacagtagaaaagcagctttccagctagcatttgacgaggatcagcaaattgttgcagacaagtggattcatattctccgtgctctgagtgatgagagggggccatggtctgctgctccttttccaaataatattgtgacatactggaaacttgacaaaactgaagataaatggcggcgccgactgaagctcaagcggaactataagtttgatgagtgcctttgtcatccatcatccatcaaatctagtaacgataatgctgccccaactgttgacccatctgctaatgccaagataacagaaaaaatgaagcacttacttttgaaaggagtgcgtggaattacaggggatatcagttctgaatcatgtgaggatagcaacgacatgattgatcctccccagaatgtcccgccagagaaccacactgttagtgatacttctgattctgcagattcctcagattatcctgctattgttcaaaatagaaaagaaagttcatcaaccagtagtgataatgattatatcgaggtgctatcatcagttcactgtgttcttgtaacccccaaaagaaaactagctgggcaattgactatcacacgaaatgccctacatttttcttttgaatttctagttgaagggactgggggatcatctgttttcgacagatttcatgataaaaaagattcagactccaagaatgagatgggaggtgtggaaaaactgaagggcaatcttgatggaggacgaggcaatgctgctgaatctagcgacactcaaattaaaaatcaatctggtaaaatcaaacaccatagaaggtggaaaataactaggataaaagcagttcattggacacggtacctactacaatatactgccacagagatattctttgatgatgcaaacgcaccagtatttcttaacttttcatcccaaaatgatgctaaaagtgttgggtctcttttagtttccctgaggaatgatgctttgttccccaaaggaacaaccagagacaagaatagtttaatttcctttgttgacagaaaggttgcccttgaaatgtctgagagtgctagggaaagttggagaagaagagaaataagcaactttgagtaccttatgattctcaacactcttgctggacgatcttacaacgatttaactcaatatcctatatttccttggatattggctgactactcttcagaaaagcttgattttaacaaatcatctacattcagggacctttcaaaaccagtaggtgccttggatgcaaagcgctttaaggcttttgaagatagatatcttaattttgttgatccggatataccaagtttttactatggatcccactactctagcatgggaattgttctttattaccttctaaggcttgagccttttactgcgctgcaccgcaatcttcagggtggtaagtttgaccatgcagatcgtctatttcagagcattgaaagcacatacagcaactgcctatcaaatacaagtgatgtcaaagagcttatacctgaattcttttacatgcctgagtttcttgagaattcaaattcatatcaccttggcataaagcaggatggtgaaccattaggtgatgttggtctccctccatgggcaaagggttccccagaagaatttattcatatcagtcgagaagcccttgaaagtgaatatgtaagctctaatctacatcattggattgatctcatatttggttacaagcagcgaggcaagcctgcagttgaggcagcaaacatattttattatctgacatatgagggtgccgttgatttggagaacatggatgatatgttacaaaagtccgctattgaggaccaaattgcaaattttggacaaacaccaattcaaatttttcggaagaaacacccaaggagaggtcctcctataccaattgtgcatccactatattttgcgccacaatcgataacagtgacttctgttgtcccgaccatagtcacccctttatctgtattattcattggtttgttggactcaaacgttgtcatgatgaatgaggggctcatactctctgtaaagctttggctaacaacacagttgcagtctggtggaaacttcacattttctggatcactggaacctttcttcggaattggttctgatgttatttctccgaggaaaattggcacttctttggctgaaaatgttgagtttggaagacaatgcttagcaactgttcaaattcgtggtgacaattacttaattttgtgtggtaattgggagaatagtttccagatcatatctctaagtgatggaaaaattgtgcagagcatccggcagcataaagatgtagttagttgtgtggcagtttcatctgacggaagtgtgattgcaacgggaagctatgacacaactgttatgatctggtatgcatttcaagggagatcaaatgacaaaagatataggaatgcaaattacgatctatcaactaaggatcatgtcatcattgaaagcccttgccatatcttatgtggccatgatgatattatcacatgcttatttgtcagcacggaattagacattgttatcagtgggtcaaaggacgggacttgtatgttccatacactgcgtgaggggacatatgttcgatcgattcgacatccgtcaggtgctggtttgtcaaaaatggtaacatcacagcatggcaggttagtgatatactctgatagtgacctttctttgcatatgtattccataaatggaaagcatattgcttcttcggaatccaattgtcgtctcaattgcatggagctaagttgctgtggagagtttatggtatgtgctggtgatcatggtcaaattgttctccgctccatgcattctcttgatgttgtttggaggtacgagggagctgggaaaacaataacttccttagttgtgactcctgaggagtgcttcttggcgggaaccaaggatggtagcttgattgttttttcaatagaaaaccctttgcttcgtaaaaacgccatgcaacggcacaaggcaaaaccttccattggtggttagaggtgtagatcaaaacagtaccagaacttcttgctgcatttcaaataaaggttatcaatccgcaataattataacagagaagattctataactcctgtataaatgtacatacgtcatcagatcgagtttaccattctgaagagtgcatgtgccgatcacaatcaagaggataattcttctaactgcaaaacacatactatggtaactaaagtagattgatgtttcatgttcaagacaagagcaaggggataggaccttcaatatgatactcttgatatttgtagggtggtagctagttagtaatgggggtgcatttgagtgtaatataaacttattttgtgggggcattcttgctagataagagcgagccacagttttcctagatagaatttttaggtaaataggttgccactgacctgtaactattaatctgaacattgtaaatggaactgatgcgggttcataatagaaggcttgcaactttggaaaagatataattaaatcttatgagccgtctgaatttgtcactgaaaagctactaatgtgttgtatgagtgcacaacttgatgttgatttatcgttcgaacatggtagcgtcaatttcacaagcctaccaatatttcgagataacagttacaaaccgatactaatttttccctatttcccatctcgtcctactatgagctacttctgttcaaaaaaaaaccttgtgactttaaacaaattcagacaaattagtattgaactcagattatcatggggcccttagatctcttataaaattataggttttcacataatcatatggataattacttggcttagataattttgcaggtagcagccatgtagataaggattgggtaaatagagaaaagatgcgccagttgagttttgatacatgtggaccacattgtctgtctggggagataaa

SEQ ID NO: 42149 - DNA, 9562 bp, Zea Mays
gagagtaagatgtaccttgataccatcaccagcagcactgtgtcttctcttggtttacataattcgaagagttgctggcttaaaacagcggtgtgggtcgtgtttcctacttgttttagtcggtgatccgtagaacttctaagggttattcgaagattgaatttgaaagagcagtggactgacttgtcactccactttataactttgtactctctgaggtcaactatatctgaaaatgttcgtgcacaaaatcatttcagaagtatagggggactggaggttctattagatggactgggactgccatcaagcaaattttcagtctcgaagcagtcttttgttcccagtgatgaaaggagtggcattctccagctccagatactatatttggaaattctgagggaagcagtcttcggtaatgtcaataatctgcaatttttgtgtgaaaatgggcggatacataaatttgcaaacagtatctgttggcctgcatttatgcttcaggagtatcatcagcaaaaaattcttaatgctcaggccatcctgaaagctgataaagaaagcactgggccttcaccaacattggaatctttctcaaatcctgtagatattcttgatacatcagaatggaacgagtattctgtaaaattaagcataacactttgctcatttctccttcctcccaaggagatcaaatactgccctgctccaactgatgttacccaaatttcactatccatctcattggcttactgggagcaatgtgcaaggtggattataaaggttctttcaacagttttcccgtgcatgaaagcttgtgctagtgaaactgatttgcctaaccatataaggattttagcaaataccatgcagcattacatgctttgcacgtttaggaaggttcttatttcagcaccagctctacttaaatcttttcgagaggagggtctctgggatctgatattttcagagaaatttttctactttggatcatctttggactacattcaacagaatgatcaacttattgatgctcccaaatcaatcgattccaaaagtttcagtgaaaccgatgtcaacgttcttcaagcagaagctatttccttcttggagtttgctgcaacactcaatgaaaactcaaataacttgccagaatgcttagcattggtaggtgcacttgaacattgtacctatgatcctggattggccggtggtattgttaagagctttcacgtgatcctacaacttgcaactgaacaaactctagcttctttcaagtcaattgatgtgctcactagagtcctgaaggttgcatgccttcaagcacaagaaataaggaagctgtcccaagatgacttaaatcaaaatggttctcaatccagaaatgctcagacgacttattcagatgagagaattaagaacacttgtgcatttgtgaaactggctttcaaccttttcaaggagtatgccacaatatctgacattggaaggattacagttttatgcaatgctaattgcatcgagtgtttatttgatttgttccaagaagaatacctcaggaaacacatattggagcaagtacttgccttatttaggttaccttcgtcatcagcacaacaccacgcagcaaagatgctactatgctccaaatatcttgagactttcactcgtgcaaaagaaaaggaaaaggcttttgcagaattgtcaattgatctattagtcaatatgagagaggtcataatgatagaccgtgtgtattatcaaaatctgtttcgcaatggggagtgcttcttgcatatagtctctttgctgaatggaacttttgatgaagcagttggggagcaattggttcttaatgtccttcggacactgactgctctacttgctgaaaatgatgagtcaaaggctgccttcagattgctggtcggtgcaggttatcaaacactgcaaagcttgctattggacttctgtaagtggattccaagtcctaaactcctggatgccctacttgacatgcttgtcgatgggacatttgacataaatgaaaaagcaacaataaagaatgaagatgtgattatgctattaataaatgttctgcaaaagagcagcacttcactccagcattatgggcttatggtcttgcaacagttgctcaaggggtccattacaaatagaacttcttgtttcagagcagggttgcttagtttccttcttgattggtttaaagttgagaaagggaatgacattgtaatgaaaatcgcagaaataattcagatcattggtggacacagtatttgtggaaaggatattcgaaaattttttgccctccttcgtgacgaggagattattgcaaagcagcagcacagttcattgcttttgacaagtgttagtcacatgctcaaggaaaagggtcctgaagctttctttgagtttagtggtcatgactctggcattgaaattaaatcatcagttcaatggccttacaataaaggtttatctttctgttgctggctaagggtggaaagtttccctgagaagggtttgatgggtctttactctttcttcactgaaaatggaaaaggatgtttagctatgattgggaataatactctaatctatgagtctgtcaatccaaagcatcagtgtgttttgttatctctaagcctccctatcaagcaatggaaattcctttgtgttactcatacaattgggagaaccttctctggagggagtcagctgagatgctatgtagatggcgatctagtatcaagtgaaaagtgcaggtacacaaaagtaaatgaactaatgactcgctgtagtgttggtacagaattgatgcccatcggtgaagaaccttcttctcttggctttgagaacactcttgcttttactggtcaaatgggccctgtttatgcattttccgatgctctctcccctgaacaaataaggggcatttataacctaggaccaagttacatgtactctttccttggtgatcagaatttgcttacaaatgatgactcacggtacaagggaatacttgatgcaaaggatggcatttcatcgaaaatgatttttggcttgaatgcacaggctagtaacaatcggactttgtttaatgtatcatctgcactggatggtcttgacaagagtaagtttgaggcaaccaccatgggtgggacaaaattatgctcccggcgcctgctgcaagaaataatctattgtgttggtggcgtttctgtatttttccctcttctgatccactttgatgatgctgtggttcagaatggagagtttgccaccagagatcaattggctggtcaagttattgagcttgttgcatctgttctagatggaaatatagcaaatcagcaacagatgcatcttctttctggattttctattttagggttcctgttccagtctgtttcaccgcagctgctaaatatcaagactctttcagcatcgaaatacatgtttactattttgaagacctctagcatgtcagatattctattgagagatgctctttcacagttttacttgaatccacatatctgggcatatgcaacctatcaagtacagagagaactttttttgctaaaggtttctcaacatgatatcagagctcttgtttcctttcttgaacgaagtcaagatgttgcatgtgttgaggatatactccatatgattatccgcgccctttcacagaactcgcttgtaccatctttcttggagcaagtaaattcacttggtggttgttacattttcatcaatcttcttaagagggaatttgagccaatccgcctattgggccttcagcttcttggaaagcttttggttggggttccatctgagaaaagagggccaaaaatttttggcctccctgtaggacgacctagatccattgctgaagatataaggaaaggggcaacagcagcacctcaactgtttttttattcaatatctgatagacttttcaaatttccactttcagatcatttatgtgctagtctttttgatgttcttcttggtggagccagtcctaagcaggttttacagaaacgttcccaatctgatgctttaaaagataggagcatggctcctttttttgtccctcagattctggtttgcatttttaaatatattcaatcttgtcgagatgcttcagtgcgtacaaagattttaagtgatcttcttgatttgctggattcaaatcctgtgaatgttgaatcccttatggagtatggttggagctcttggcttgaaacatctgcgaagcttgatgtacttaggaactacaaatcgaattctgtagccaaggctgacggtttggagaccaatgagctgattcttgtgaggaacatgtattcgttggttctctcctattgcatattctctgtgaaaggtggctggcatcaactggaagatacaacaaatttccttctactgaaaattgagcaggggcagttaccaaattcctccatgctccgagacatttttgaagatctcattggaagccttcttgagacatcttctgaagaaagtgttttcaattctcagccatgccgtgataatatcttgtatcttttaaatcttagtcatgaactctttgttgaccaaattggaattaaactcttgtttccttcacctgacatgtctgcacatttgtcatctgatgacatcaactcggcagttctagaaattatgaatactgagggcaatggtctgcttacaagtcttccttggagtaatatattatttaatgatggagaaaagttgactgatgattggtggagcttttttgacaagatatggacgcttctgtgctatttgaatggcaaaggccaaaccagattaacaccaaagggtttaaatacagctggaccatctattgggcaacgggcccgcggattagtagagtccctcaatatcccagctgcagaaatggctgctgtagttgtaacaggaggcatcagtagcgcattaggtggaaagactaacaaagttgctgacaaagctatgatgctaagaggggagagatttccaagaattatcttccatctcatcattatgtatctctgcaaagctggcttagaaaacgcatccaaatgtgttcagcaatttatatcactgctccctaatattatctctgaagatgatcagtgcaaaaatagactgcatttcttgatttggtccttactaagggtaagatcccagtatgggcaacttgatgatggtgcacgtttccatgtcatgtcacacttgattcttgaaactgtgatctatggaaagtctatgcttacaactaatatagtaggcagagatgattctactgaagcaaataacagtaaggaggctgggttcattcttaatcttgtacagaaggaccgggttctcactgcggctactgatgaggcaaagtacatgaaggatgcaattgctgatcgcatgaagctggtccaggaactccattctaaacttgatgaacgctcaattcaagacgttgaacaactgcaaagttttgaggatgatgtacagtttgccaagactgctgctatagctgcggacgacagtagaaaagcagctttccagctagcatttgacgaggatcagcaaattgttgcagacaagtggattcatattctccgtgctctgagtgatgagagggggccatggtctgctgctccttttccaaataatattgtgacatactggaaacttgacaaaactgaagataaatggcggcgccgactgaagctcaagcggaactataagtttgatgagtgcctttgtcatccatcatccatcaaatctagtaacgataatgctgccccaactgttgacccatctgctaatgccaagataacagaaaaaatgaagcacttacttttgaaaggagtgcgtggaattacaggggatatcagttctgaatcatgtgaggatagcaacgacatgattgatcctccccagaatgtcccgccagagaaccacactgttagtgatacttctgattctgcagattcctcagattatcctgctattgttcaaaatagaaaagaaagttcatcaaccagtagtgataatgattatatcgaggtgctatcatcagttcactgtgttcttgtaacccccaaaagaaaactagctgggcaattgactatcacacgaaatgccctacatttttcttttgaatttctagttgaagggactgggggatcatctgttttcgacagatttcatgataaaaaagattcagactccaagaatgagatgggaggtgtggaaaaactgaagggcaatcttgatggaggacgaggcaatgctgctgaatctagcgacactcaaattaaaaatcaatctggtaaaatcaaacaccatagaaggtggaaaataactaggataaaagcagttcattggacacggtacctactacaatatactgccacagagatattctttgatgatgcaaacgcaccagtatttcttaacttttcatcccaaaatgatgctaaaagtgttgggtctcttttagtttccctgaggaatgatgctttgttccccaaaggaacaaccagagacaagaatagtttaatttcctttgttgacagaaaggttgcccttgaaatgtctgagagtgctagggaaagttggagaagaagagaaataagcaactttgagtaccttatgattctcaacactcttgctggacgatcttacaacgatttaactcaatatcctatatttccttggatattggctgactactcttcagaaaagcttgattttaacaaatcatctacattcagggacctttcaaaaccagtaggtgccttggatgcaaagcgctttaaggcttttgaagatagatatcttaattttgttgatccggatataccaagtttttactatggatcccactactctagcatgggaattgttctttattaccttctaaggcttgagccttttactgcgctgcaccgcaatcttcagggtggtaagtttgaccatgcagatcgtctatttcagagcattgaaagcacatacagcaactgcctatcaaatacaagtgatgtcaaagagcttatacctgaattcttttacatgcctgagtttcttgagaattcaaattcatatcaccttggcataaagcaggatggtgaaccattaggtgatgttggtctccctccatgggcaaagggttccccagaagaatttattcatatcagtcgagaagcccttgaaagtgaatatgtaagctctaatctacatcattggattgatctcatatttggttacaagcagcgaggcaagcctgcagttgaggcagcaaacatattttattatctgacatatgagggtgccgttgatttggagaacatggatgatatgttacaaaagtccgctattgaggaccaaattgcaaattttggacaaacaccaattcaaatttttcggaagaaacacccaaggagaggtcctcctataccaattgtgcatccactatattttgcgccacaatcgataacagtgacttctgttgtcccgaccatagtcacccctttatctgtattattcattggtttgttggactcaaacgttgtcatgatgaatgaggggctcatactctctgtaaagctttggctaacaacacagttgcagtctggtggaaacttcacattttctggatcactggaacctttcttcggaattggttctgatgttatttctccgaggaaaattggcacttctttggctgaaaatgttgagtttggaagacaatgcttagcaactgttcaaattcgtggtgacaattacttaattttgtgtggtaattgggagaatagtttccagatcatatctctaagtgatggaaaaattgtgcagagcatccggcagcataaagatgtagttagttgtgtggcagtttcatctgacggaagtgtgattgcaacgggaagctatgacacaactgttatgatctggtatgcatttcaagggagatcaaatgacaaaagatataggaatgcaaattacgatctatcaactaaggatcatgtcatcattgaaagcccttgccatatcttatgtggccatgatgatattatcacatgcttatttgtcagcacggaattagacattgttatcagtgggtcaaaggacgggacttgtatgttccatacactgcgtgaggggacatatgttcgatcgattcgacatccgtcaggtgctggtttgtcaaaaatggtaacatcacagcatggcaggttagtgatatactctgatagtgacctttctttgcatatgtattccataaatggaaagcatattgcttcttcggaatccaattgtcgtctcaattgcatggagctaagttgctgtggagagtttatggtatgtgctggtgatcatggtcaaattgttctccgctccatgcattctcttgatgttgtttggaggtacgagggagctgggaaaacaataacttccttagttgtgactcctgaggagtgcttcttggcgggaaccaaggatggtagcttgattgttttttcaatagaaaaccctttgcttcgtaaaaacgccatgcaacggcacaaggcaaaaccttccattggtggttagaggtgtagatcaaaacagtaccagaacttcttgctgcatttcaaataaaggttatcaatccgcaataattataacagagaagattctataactcctgtataaatgtacatacgtcatcagatcgagtttaccattctgaagagtgcatgtgccgatcacaatcaagaggataattcttctaactgcaaaacacatactatggtaactaaagtagattgatgtttcatgttcaagacaagagcaaggggataggaccttcaatatgatactcttgatatttgtagggtggtagctagttagtaatgggggtgcatttgagtgtaatataaacttattttgtgggggcattcttgctagataagagcgagccacagttttcctagatagaatttttaggtaaataggttgccactgacctgtaactattaatctgaacattgtaaatggaactgatgcgggttcataatagaaggcttgcaactttggaaaagatataattaaatcttatgagccgtctgaatttgtcactgaaaagctactaatgtgttgtatgagtgcacaacttgatgttgatttatcgttcgaacatggtagcgtcaatttcacaagcctaccaatatttcgagataacagttacaaaccgatactaatttttccctatttcccatctcgtcctactatgagctacttctgttcaaaaaaaaaccttgtgactttaaacaaattcagacaaattagtattgaactcagattatcatggggcccttagatctcttataaaattataggttttcacataatcatatggataattacttggcttagataattttgcaggtagcagccatgtagataaggattgggtaaatagagaaaagatgcgccagttgagttttgatacatgtggaccacattgtctgtctggggagataaa

SEQ ID NO: 42150 - DNA, 9710 bp, Zea Mays
gagagtaagatgtaccttgataccatcaccagcagcactgtgtcttctcttggtttacataattcgaagagttgctggcttaaaacagcggtgtgggtcgtgtttcctacttgttttagtcggtgatccgtagaacttctaagggttattcgaagattgaatttgaaagagcagtggactgacttgtcactccactttataactttgtactctctgaggtcaactatatctgaaaatgttcgtgcacaaaatcatttcagaagtatagggggactggaggttctattagatggactgggactgccatcaagcaaattttcagtctcgaagcagtcttttgttcccagtgatgaaaggagtggcattctccagctccagatactatatttggaaattctgagggaagcagtgtatcctgtcccattatttttaagtgcttatcatcagcaaaaaattcttaatgctcaggccatcctgaaagctgataaagaaagcactgggccttcaccaacattggaatctttctcaaatcctgtagatattcttgatacatcagaatggaacgagtattctgtaaaattaagcataacactttgctcatttctccttcctcccaaggagatcaaatactgccctgctccaactgatgttacccaaatttcactatccatctcattggcttactgggagcaatgtgcaaggtggattataaaggttctttcaacagttttcccgtgcatgaaagcttgtgctagtgaaactgatttgcctaaccatataaggattttagcaaataccatgcagcattacatgctttgcacgtttaggaaggttcttatttcagcaccagctctacttaaatcttttcgagaggagggtctctgggatctgatattttcagagaaatttttctactttggatcatctttggactacattcaacagaatgatcaacttattgatgctcccaaatcaatcgattccaaaagtttcagtgaaaccgatgtcaacgttcttcaagcagaagctatttccttcttggagtttgctgcaacactcaatgaaaactcaaataacttgccagaatgcttagcattggtaggtgcacttgaacattgtacctatgatcctggattggccggtggtattgttaagagctttcacgtgatcctacaacttgcaactgaacaaactctagcttctttcaagtcaattgatgtgctcactagagtcctgaaggttgcatgccttcaagcacaagaaataaggaagctgtcccaagatgacttaaatcaaaatggttctcaatccagaaatgctcagacgacttattcagatgagagaattaagaacacttgtgcatttgtgaaactggctttcaaccttttcaaggagtatgccacaatatctgacattggaaggattacagttttatgcaatgctaattgcatcgagtgtttatttgatttgttccaagaagaatacctcaggaaacacatattggagcaagtacttgccttatttaggttaccttcgtcatcagcacaacaccacgcagcaaagatgctactatgctccaaatatcttgagactttcactcgtgcaaaagaaaaggaaaaggcttttgcagaattgtcaattgatctattagtcaatatgagagaggtcataatgatagaccgtgtgtattatcaaaatctgtttcgcaatggggagtgcttcttgcatatagtctctttgctgaatggaacttttgatgaagcagttggggagcaattggttcttaatgtccttcggacactgactgctctacttgctgaaaatgatgagtcaaaggctgccttcagattgctggtcggtgcaggttatcaaacactgcaaagcttgctattggacttctgtaagtggattccaagtcctaaactcctggatgccctacttgacatgcttgtcgatgggacatttgacataaatgaaaaagcaacaataaagaatgaagatgtgattatgctattaataaatgttctgcaaaagcacttcactccagcattatgggcttatggtcttgcaacagttgctcaaggggtccattacaaatagaacttcttgtttcagagcagggttgcttagtttccttcttgattggtttaaagttgagaaagggaatgacattgtaatgaaaatcgcagaaataattcagatcattggtggacacagtatttgtggaaaggatattcgaaaattttttgccctccttcgtgacgaggagattattgcaaagcagcagcacagttcattgcttttgacaagtgttagtcacatgctcaaggaaaagggtcctgaagctttctttgagtttagtggtcatgactctggcattgaaattaaatcatcagttcaatggccttacaataaaggtttatctttctgttgctggctaagggtggaaagtttccctgagaagggtttgatgggtctttactctttcttcactgaaaatggaaaaggatgtttagctatgattgggaataatactctaatctatgagtctgtcaatccaaagcatcagtgtgttttgttatctctaagcctccctatcaagcaatggaaattcctttgtgttactcatacaattgggagaaccttctctggagggagtcagctgagatgctatgtagatggcgatctagtatcaagtgaaaagtgcaggtacacaaaagtaaatgaactaatgactcgctgtagtgttggtacagaattgatgcccatcggtgaagaaccttcttctcttggctttgagaacactcttgcttttactggtcaaatgggccctgtttatgcattttccgatgctctctcccctgaacaaataaggggcatttataacctaggaccaagttacatgtactctttccttggtgatcagaatttgcttacaaatgatgactcacggtacaagggaatacttgatgcaaaggatggcatttcatcgaaaatgatttttggcttgaatgcacaggctagtaacaatcggactttgtttaatgtatcatctgcactggatggtcttgacaagagtaagtttgaggcaaccaccatgggtgggacaaaattatgctcccggcgcctgctgcaagaaataatctattgtgttggtggcgtttctgtatttttccctcttctgatccactttgatgatgctgtggttcagaatggagagtttgccaccagagatcaattggctggtcaagttattgagcttgttgcatctgttctagatggaaatatagcaaatcagcaacagatgcatcttctttctggattttctattttagggttcctgttccagtctgtttcaccgcagctgctaaatatcaagactctttcagcatcgaaatacatgtttactattttgaagacctctagcatgtcagatattctattgagagatgctctttcacagttttacttgaatccacatatctgggcatatgcaacctatcaagtacagagagaactttttttgtttctgatacaatattttgaagctgatgggaaatttttaccagtattatgtgcgctccctaggatcattgatgtcataaaacagttctactcggaaaagctagatccaaggttttctaagcctttgctggtaagcaaaaaggtgactggggagagaccaagcatggaagaaattcgcaagatccgacttctcctgttgagtctggcagaaatgagcttaaagctaaaggtttctcaacatgatatcagagctcttgtttcctttcttgaacgaagtcaagatgttgcatgtgttgaggatatactccatatgattatccgcgccctttcacagaactcgcttgtaccatctttcttggagcaagtaaattcacttggtggttgttacattttcatcaatcttcttaagagggaatttgagccaatccgcctattgggccttcagcttcttggaaagcttttggttggggttccatctgagaaaagagggccaaaaatttttggcctccctgtaggacgacctagatccattgctgaagatataaggaaaggggcaacagcagcacctcaactgtttttttattcaatatctgatagacttttcaaatttccactttcagatcatttatgtgctagtctttttgatgttcttcttggtggagccagtcctaagcaggttttacagaaacgttcccaatctgatgctttaaaagataggagcatggctcctttttttgtccctcagattctggtttgcatttttaaatatattcaatcttgtcgagatgcttcagtgcgtacaaagattttaagtgatcttcttgatttgctggattcaaatcctgtgaatgttgaatcccttatggagtatggttggagctcttggcttgaaacatctgcgaagcttgatgtacttaggaactacaaatcgaattctgtagccaaggctgacggtttggagaccaatgagctgattcttgtgaggaacatgtattcgttggttctctcctattgcatattctctgtgaaaggtggctggcatcaactggaagatacaacaaatttccttctactgaaaattgagcaggggcagttaccaaattcctccatgctccgagacatttttgaagatctcattggaagccttcttgagacatcttctgaagaaagtgttttcaattctcagccatgccgtgataatatcttgtatcttttaaatcttagtcatgaactctttgttgaccaaattggaattaaactcttgtttccttcacctgacatgtctgcacatttgtcatctgatgacatcaactcggcagttctagaaattatgaatactgagggcaatggtctgcttacaagtcttccttggagtaatatattatttaatgatggagaaaagttgactgatgattggtggagcttttttgacaagatatggacgcttctgtgctatttgaatggcaaaggccaaaccagattaacaccaaagggtttaaatacagctggaccatctattgggcaacgggcccgcggattagtagagtccctcaatatcccagctgcagaaatggctgctgtagttgtaacaggaggcatcagtagcgcattaggtggaaagactaacaaagttgctgacaaagctatgatgctaagaggggagagatttccaagaattatcttccatctcatcattatgtatctctgcaaagctggcttagaaaacgcatccaaatgtgttcagcaatttatatcactgctccctaatattatctctgaagatgatcagtgcaaaaatagactgcatttcttgatttggtccttactaagggtaagatcccagtatgggcaacttgatgatggtgcacgtttccatgtcatgtcacacttgattcttgaaactgtgatctatggaaagtctatgcttacaactaatatagtaggcagagatgattctactgaagcaaataacagtaaggaggctgggttcattcttaatcttgtacagaaggaccgggttctcactgcggctactgatgaggcaaagtacatgaaggatgcaattgctgatcgcatgaagctggtccaggaactccattctaaacttgatgaacgctcaattcaagacgttgaacaactgcaaagttttgaggatgatgtacagtttgccaagactgctgctatagctgcggacgacagtagaaaagcagctttccagctagcatttgacgaggatcagcaaattgttgcagacaagtggattcatattctccgtgctctgagtgatgagagggggccatggtctgctgctccttttccaaataatattgtgacatactggaaacttgacaaaactgaagataaatggcggcgccgactgaagctcaagcggaactataagtttgatgagtgcctttgtcatccatcatccatcaaatctagtaacgataatgctgccccaactgttgacccatctgctaatgccaagataacagaaaaaatgaagcacttacttttgaaaggagtgcgtggaattacaggggatatcagttctgaatcatgtgaggatagcaacgacatgattgatcctccccagaatgtcccgccagagaaccacactgttagtgatacttctgattctgcagattcctcagattatcctgctattgttcaaaatagaaaagaaagttcatcaaccagtagtgataatgattatatcgaggtgctatcatcagttcactgtgttcttgtaacccccaaaagaaaactagctgggcaattgactatcacacgaaatgccctacatttttcttttgaatttctagttgaagggactgggggatcatctgttttcgacagatttcatgataaaaaagattcagactccaagaatgagatgggaggtgtggaaaaactgaagggcaatcttgatggaggacgaggcaatgctgctgaatctagcgacactcaaattaaaaatcaatctggtaaaatcaaacaccatagaaggtggaaaataactaggataaaagcagttcattggacacggtacctactacaatatactgccacagagatattctttgatgatgcaaacgcaccagtatttcttaacttttcatcccaaaatgatgctaaaagtgttgggtctcttttagtttccctgaggaatgatgctttgttccccaaaggaacaaccagagacaagaatagtttaatttcctttgttgacagaaaggttgcccttgaaatgtctgagagtgctagggaaagttggagaagaagagaaataagcaactttgagtaccttatgattctcaacactcttgctggacgatcttacaacgatttaactcaatatcctatatttccttggatattggctgactactcttcagaaaagcttgattttaacaaatcatctacattcagggacctttcaaaaccagtaggtgccttggatgcaaagcgctttaaggcttttgaagatagatatcttaattttgttgatccggatataccaagtttttactatggatcccactactctagcatgggaattgttctttattaccttctaaggcttgagccttttactgcgctgcaccgcaatcttcagggtggtaagtttgaccatgcagatcgtctatttcagagcattgaaagcacatacagcaactgcctatcaaatacaagtgatgtcaaagagcttatacctgaattcttttacatgcctgagtttcttgagaattcaaattcatatcaccttggcataaagcaggatggtgaaccattaggtgatgttggtctccctccatgggcaaagggttccccagaagaatttattcatatcagtcgagaagcccttgaaagtgaatatgtaagctctaatctacatcattggattgatctcatatttggttacaagcagcgaggcaagcctgcagttgaggcagcaaacatattttattatctgacatatgagggtgccgttgatttggagaacatggatgatatgttacaaaagtccgctattgaggaccaaattgcaaattttggacaaacaccaattcaaatttttcggaagaaacacccaaggagaggtcctcctataccaattgtgcatccactatattttgcgccacaatcgataacagtgacttctgttgtcccgaccatagtcacccctttatctgtattattcattggtttgttggactcaaacgttgtcatgatgaatgaggggctcatactctctgtaaagctttggctaacaacacagttgcagtctggtggaaacttcacattttctggatcactggaacctttcttcggaattggttctgatgttatttctccgaggaaaattggcacttctttggctgaaaatgttgagtttggaagacaatgcttagcaactgttcaaattcgtggtgacaattacttaattttgtgtggtaattgggagaatagtttccagatcatatctctaagtgatggaaaaattgtgcagagcatccggcagcataaagatgtagttagttgtgtggcagtttcatctgacggaagtgtgattgcaacgggaagctatgacacaactgttatgatctggtatgcatttcaagggagatcaaatgacaaaagatataggaatgcaaattacgatctatcaactaaggatcatgtcatcattgaaagcccttgccatatcttatgtggccatgatgatattatcacatgcttatttgtcagcacggaattagacattgttatcagtgggtcaaaggacgggacttgtatgttccatacactgcgtgaggggacatatgttcgatcgattcgacatccgtcaggtgctggtttgtcaaaaatggtaacatcacagcatggcaggttagtgatatactctgatagtgacctttctttgcatatgtattccataaatggaaagcatattgcttcttcggaatccaattgtcgtctcaattgcatggagctaagttgctgtggagagtttatggtatgtgctggtgatcatggtcaaattgttctccgctccatgcattctcttgatgttgtttggaggtacgagggagctgggaaaacaataacttccttagttgtgactcctgaggagtgcttcttggcgggaaccaaggatggtagcttgattgttttttcaatagaaaaccctttgcttcgtaaaaacgccatgcaacggcacaaggcaaaaccttccattggtggttagaggtgtagatcaaaacagtaccagaacttcttgctgcatttcaaataaaggttatcaatccgcaataattataacagagaagattctataactcctgtataaatgtacatacgtcatcagatcgagtttaccattctgaagagtgcatgtgccgatcacaatcaagaggataattcttctaactgcaaaacacatactatggtaactaaagtagattgatgtttcatgttcaagacaagagcaaggggataggaccttcaatatgatactcttgatatttgtagggtggtagctagttagtaatgggggtgcatttgagtgtaatataaacttattttgtgggggcattcttgctagataagagcgagccacagttttcctagatagaatttttaggtaaataggttgccactgacctgtaactattaatctgaacattgtaaatggaactgatgcgggttcataatagaaggcttgcaactttggaaaagatataattaaatcttatgagccgtctgaatttgtcactgaaaagctactaatgtgttgtatgagtgcacaacttgatgttgatttatcgttcgaacatggtagcgtcaatttcacaagcctaccaatatttcgagataacagttacaaaccgatactaatttttccctatttcccatctcgtcctactatgagctacttctgttcaaaaaaaaaccttgtgactttaaacaaattcagacaaattagtattgaactcagattatcatggggcccttagatctcttataaaattataggttttcacataatcatatggataattacttggcttagataattttgcaggtagcagccatgtagataaggattgggtaaatagagaaaagatgcgccagttgagttttgatacatgtggaccacattgtctgtctggggagataaa

SEQ ID NO: 42151 - DNA, 7346 bp, Zea Mays
gttttttgttctcttgtaaagatggatctgcacatgtattatcaaaatctgtttcgcaatggggagtgcttcttgcatatagtctctttgctgaatggaacttttgatgaagcagttggggagcaattggttcttaatgtccttcggacactgactgctctacttgctgaaaatgatgagtcaaaggctgccttcagattgctggtcggtgcaggttatcaaacactgcaaagcttgctattggacttctgtaagtggattccaagtcctaaactcctggatgccctacttgacatgcttgtcgatgggacatttgacataaatgaaaaagcaacaataaagaatgaagatgtgattatgctattaataaatgttctgcaaaagagcagcacttcactccagcattatgggcttatggtcttgcaacagttgctcaaggggtccattacaaatagaacttcttgtttcagagcagggttgcttagtttccttcttgattggtttaaagttgagaaagggaatgacattgtaatgaaaatcgcagaaataattcagatcattggtggacacagtatttgtggaaaggatattcgaaaattttttgccctccttcgtgacgaggagattattgcaaagcagcagcacagttcattgcttttgacaagtgttagtcacatgctcaaggaaaagggtcctgaagctttctttgagtttagtggtcatgactctggcattgaaattaaatcatcagttcaatggccttacaataaaggtttatctttctgttgctggctaagggtggaaagtttccctgagaagggtttgatgggtctttactctttcttcactgaaaatggaaaaggatgtttagctatgattgggaataatactctaatctatgagtctgtcaatccaaagcatcagtgtgttttgttatctctaagcctccctatcaagcaatggaaattcctttgtgttactcatacaattgggagaaccttctctggagggagtcagctgagatgctatgtagatggcgatctagtatcaagtgaaaagtgcaggtacacaaaagtaaatgaactaatgactcgctgtagtgttggtacagaattgatgcccatcggtgaagaaccttcttctcttggctttgagaacactcttgcttttactggtcaaatgggccctgtttatgcattttccgatgctctctcccctgaacaaataaggggcatttataacctaggaccaagttacatgtactctttccttggtgatcagaatttgcttacaaatgatgactcacggtacaagggaatacttgatgcaaaggatggcatttcatcgaaaatgatttttggcttgaatgcacaggctagtaacaatcggactttgtttaatgtatcatctgcactggatggtcttgacaagagtaagtttgaggcaaccaccatgggtgggacaaaattatgctcccggcgcctgctgcaagaaataatctattgtgttggtggcgtttctgtatttttccctcttctgatccactttgatgatgctgtggttcagaatggagagtttgccaccagagatcaattggctggtcaagttattgagcttgttgcatctgttctagatggaaatatagcaaatcagcaacagatgcatcttctttctggattttctattttagggttcctgttccagtctgtttcaccgcagctgctaaatatcaagactctttcagcatcgaaatacatgtttactattttgaagacctctagcatgtcagatattctattgagagatgctctttcacagttttacttgaatccacatatctgggcatatgcaacctatcaagatcattgatgtcataaaacagttctactcggaaaagctagatccaaggttttctaagcctttgctggtaagcaaaaaggtgactggggagagaccaagcatggaagaaattcgcaagatccgacttctcctgttgagtctggcagaaatgagcttaaagctaaaggtttctcaacatgatatcagagctcttgtttcctttcttgaacgaagtcaagatgttgcatgtgttgaggatatactccatatgattatccgcgccctttcacagaactcgcttgtaccatctttcttggagcaagtaaattcacttggtggttgttacattttcatcaatcttcttaagagggaatttgagccaatccgcctattgggccttcagcttcttggaaagcttttggttggggttccatctgagaaaagagggccaaaaatttttggcctccctgtaggacgacctagatccattgctgaagatataaggaaaggggcaacagcagcacctcaactgtttttttattcaatatctgatagacttttcaaatttccactttcagatcatttatgtgctagtctttttgatgttcttcttggtggagccagtcctaagcaggttttacagaaacgttcccaatctgatgctttaaaagataggagcatggctcctttttttgtccctcagattctggtttgcatttttaaatatattcaatcttgtcgagatgcttcagtgcgtacaaagattttaagtgatcttcttgatttgctggattcaaatcctgtgaatgttgaatcccttatggagtatggttggagctcttggcttgaaacatctgcgaagcttgatgtacttaggaactacaaatcgaattctgtagccaaggctgacggtttggagaccaatgagctgattcttgtgaggaacatgtattcgttggttctctcctattgcatattctctgtgaaaggtggctggcatcaactggaagatacaacaaatttccttctactgaaaattgagcaggggcagttaccaaattcctccatgctccgagacatttttgaagatctcattggaagccttcttgagacatcttctgaagaaagtgttttcaattctcagccatgccgtgataatatcttgtatcttttaaatcttagtcatgaactctttgttgaccaaattggaattaaactcttgtttccttcacctgacatgtctgcacatttgtcatctgatgacatcaactcggcagttctagaaattatgaatactgagggcaatggtctgcttacaagtcttccttggagtaatatattatttaatgatggagaaaagttgactgatgattggtggagcttttttgacaagatatggacgcttctgtgctatttgaatggcaaaggccaaaccagattaacaccaaagggtttaaatacagctggaccatctattgggcaacgggcccgcggattagtagagtccctcaatatcccagctgcagaaatggctgctgtagttgtaacaggaggcatcagtagcgcattaggtggaaagactaacaaagttgctgacaaagctatgatgctaagaggggagagatttccaagaattatcttccatctcatcattatgtatctctgcaaagctggcttagaaaacgcatccaaatgtgttcagcaatttatatcactgctccctaatattatctctgaagatgatcagtgcaaaaatagactgcatttcttgatttggtccttactaagggtaagatcccagtatgggcaacttgatgatggtgcacgtttccatgtcatgtcacacttgattcttgaaactgtgatctatggaaagtctatgcttacaactaatatagtaggcagagatgattctactgaagcaaataacagtaaggaggctgggttcattcttaatcttgtacagaaggaccgggttctcactgcggctactgatgaggcaaagtacatgaaggatgcaattgctgatcgcatgaagctggtccaggaactccattctaaacttgatgaacgctcaattcaagacgttgaacaactgcaaagttttgaggatgatgtacagtttgccaagactgctgctatagctgcggacgacagtagaaaagcagctttccagctagcatttgacgaggatcagcaaattgttgcagacaagtggattcatattctccgtgctctgagtgatgagagggggccatggtctgctgctccttttccaaataatattgtgacatactggaaacttgacaaaactgaagataaatggcggcgccgactgaagctcaagcggaactataagtttgatgagtgcctttgtcatccatcatccatcaaatctagtaacgataatgctgccccaactgttgacccatctgctaatgccaagataacagaaaaaatgaagcacttacttttgaaaggagtgcgtggaattacaggggatatcagttctgaatcatgtgaggatagcaacgacatgattgatcctccccagaatgtcccgccagagaaccacactgttagtgatacttctgattctgcagattcctcagattatcctgctattgttcaaaatagaaaagaaagttcatcaaccagtagtgataatgattatatcgaggtgctatcatcagttcactgtgttcttgtaacccccaaaagaaaactagctgggcaattgactatcacacgaaatgccctacatttttcttttgaatttctagttgaagggactgggggatcatctgttttcgacagatttcatgataaaaaagattcagactccaagaatgagatgggaggtgtggaaaaactgaagggcaatcttgatggaggacgaggcaatgctgctgaatctagcgacactcaaattaaaaatcaatctggtaaaatcaaacaccatagaaggtggaaaataactaggataaaagcagttcattggacacggtacctactacaatatactgccacagagatattctttgatgatgcaaacgcaccagtatttcttaacttttcatcccaaaatgatgctaaaagtgttgggtctcttttagtttccctgaggaatgatgctttgttccccaaaggaacaaccagagacaagaatagtttaatttcctttgttgacagaaaggttgcccttgaaatgtctgagagtgctagggaaagttggagaagaagagaaataagcaactttgagtaccttatgattctcaacactcttgctggacgatcttacaacgatttaactcaatatcctatatttccttggatattggctgactactcttcagaaaagcttgattttaacaaatcatctacattcagggacctttcaaaaccagtaggtgccttggatgcaaagcgctttaaggcttttgaagatagatatcttaattttgttgatccggatataccaagtttttactatggatcccactactctagcatgggaattgttctttattaccttctaaggcttgagccttttactgcgctgcaccgcaatcttcagggtggtaagtttgaccatgcagatcgtctatttcagagcattgaaagcacatacagcaactgcctatcaaatacaagtgatgtcaaagagcttatacctgaattcttttacatgcctgagtttcttgagaattcaaattcatatcaccttggcataaagcaggatggtgaaccattaggtgatgttggtctccctccatgggcaaagggttccccagaagaatttattcatatcagtcgagaagcccttgaaagtgaatatgtaagctctaatctacatcattggattgatctcatatttggttacaagcagcgaggcaagcctgcagttgaggcagcaaacatattttattatctgacatatgagggtgccgttgatttggagaacatggatgatatgttacaaaagtccgctattgaggaccaaattgcaaattttggacaaacaccaattcaaatttttcggaagaaacacccaaggagaggtcctcctataccaattgtgcatccactatattttgcgccacaatcgataacagtgacttctgttgtcccgaccatagtcacccctttatctgtattattcattggtttgttggactcaaacgttgtcatgatgaatgaggggctcatactctctgtaaagctttggctaacaacacagttgcagtctggtggaaacttcacattttctggatcactggaacctttcttcggaattggttctgatgttatttctccgaggaaaattggcacttctttggctgaaaatgttgagtttggaagacaatgcttagcaactgttcaaattcgtggtgacaattacttaattttgtgtggtaattgggagaatagtttccagatcatatctctaagtgatggaaaaattgtgcagagcatccggcagcataaagatgtagttagttgtgtggcagtttcatctgacggaagtgtgattgcaacgggaagctatgacacaactgttatgatctggtatgcatttcaagggagatcaaatgacaaaagatataggaatgcaaattacgatctatcaactaaggatcatgtcatcattgaaagcccttgccatatcttatgtggccatgatgatattatcacatgcttatttgtcagcacggaattagacattgttatcagtgggtcaaaggacgggacttgtatgttccatacactgcgtgaggggacatatgttcgatcgattcgacatccgtcaggtgctggtttgtcaaaaatggtaacatcacagcatggcaggttagtgatatactctgatagtgacctttctttgcatatgtattccataaatggaaagcatattgcttcttcggaatccaattgtcgtctcaattgcatggagctaagttgctgtggagagtttatggtatgtgctggtgatcatggtcaaattgttctccgctccatgcattctcttgatgttgtttggaggtacgagggagctgggaaaacaataacttccttagttgtgactcctgaggagtgcttcttggcgggaaccaaggatggtagcttgattgttttttcaatagaaaaccctttgcttcgtaaaaacgccatgcaacggcacaaggcaaaaccttccattggtggttagaggtgtagatcaaaacagtaccagaacttcttgctgcatttcaaataaaggttatcaatccgcaataattataacagagaagattctataactcctgtataaatgtacatacgtcatcagatcgagtttaccattctgaagagtgcatgtgccgatcacaatcaagaggataattcttctaactgcaaaacacatactatggtagcagccatgtagataaggattgggtaaatagagaaaagatgcgccagttgagttttgatacatgtggaccacattgtctgtctggggagataaa

SEQ ID NO: 42152 - DNA, 2818 bp, Zea Mays
ctcctccccgccaccgtgccctctccactggccgtcgcgtacgccacctccagcgaacacgcctccacgcatcctccacgggcagctcgctgtcgcgacacatcttctctctctctctacgtgcgccctcgccagcccgagtcctctctcttcgctcgcgccgccaccggcaccgtgcctgcgctgccttgcatctcccgaccaccagttgtccttcccttcatcctcctctcacccaaacagtcgtatgggcccttcgccgccgaccacgtgctcgggtgcagctacctccaaatttcccagaccgaggcggcacgacaggcgtccagcggcaccattcggcttttgaagatggagcgggtgctgctcgaggaggatgaagaggaccggttgttgaggaagttgggaaacactatagactaaacctaaagctagcaaggggcctggacatcagacttgaacttctaaagttttacaagaattattcagcaaaccttatacactgtttatggaaagggtaagtgctgcagtttagtacactagagtaaataagcctctttgttgctgatcaaatgattttgtagagagcctcgattgcattcagggcttggtcgagcgtatatgtttagtgacataaaaaacattgatcagagatgcttcaaatatgatataaatagtgaggatgaattgtgcatcttgtttgttactcttcattggggtgacacatttgatgatccaatgcacatggctagcagacccttttgtaaaaaatggtcgtcttggtcctttcaaattacaaacataaatatagaggaaaacattgtcccctttgtttgggagcaagtggaatagattttatcatattgctataggcaagagggatgaatgagtcgaattggggtaaataaaggcaatgcaagccaggaacgcccaaggcgtccgcatctccaagatggtcgatgatgaggtatatgatgctttggccgaacaccttctttctatcttggaggatattgaaaatttgattcaaagtaagcctttcctgttggtgctgtttcgggacattgttcgttgcatggaaagagattgtggggaaataaaagggagaaaggcagaagagaaaagggacattcttgttccacaaattccagtctcaggcgttgccgacgataaacggccggtggttccgtcaaccgctaccataggtcgctggcgagctatcccggtgccgccccagcctactcgatctgggctgcggcctggaactcgttcctatcaacgggaacacccatatcaactggtatcggattcaggcggttctggtgcatcccttcccatggcttccgctgaggatcgcgtggggcatctggaggcatcggtcgcgcaactggcggttgctgtgcaggacatccagtccaacatagcagagctcgccaaggttgtcgccgactcagtgcagctgacgggtggcgaggcgtcgggggtggacggccggcaccgtcctcaacagcagggacgccgggacggacgagacgccgacgcgatgggcggtgagcgtggcggtcgtcgcgggtttccacacgcgccccgttacgacttgccgctgttcgatgggtcggaggacccattgttgtggctgcgtcagtgcgagcggtatgggcggctgcatgacattccaagggaggagtgggtgcagatggccggcatgcatctgcgcggcgaggctcaggatgttttggacaattgggaaactgaggatcaattcatttcttggccggagttctatgacaccttcttgcagcgcttcacatggcattcaacctcgggaccgctgggagatctggccaatttgaaacagcacaacagccgagcagacgtatatgcaagggagtttcagcgacttcttgcatgcacaccaaggttgtctcggcaggatcagatcgagctctttaccgcggggttatcgtccaccctcgcggccgaggtccgtcgggatcgcccccgggacttggctgacgccatgggtttggctcgtgaagcagaacggcgggaagatctctttcttgccaaggtggcccaggccacgcggtcacgcgggtctcgtagcacatcttgggcatcgggcaccgatccatcggcaagtaatcgggcgacggcgccgtcatccagtgccctcccggtggcgcctgggggatccaagctggaagggggtcgagcattgacgacggcttcacagacttcagggactattcccactgctccaccatatcgtcgtcgtctcagtcctgcagaaatgtctgaccgaagggagaagggtctctgttataactgtgatgaggtttactcgcgtggacatcgttgtcagcgcctgttccatttggaagtgctcagcgagggtgaagaggatgattcactggaggaggaaccaaccctatctgctatagccatgaagggtctgaaggccagtcgcactatgcaggtcattgtagtcatgggtggacaacgtctggtgggcttagtggatagtggtagcacccataactttattagtagccatgctgcttttgtggtgcagatcacacaatcgtcagggactggacagcaggtgcaggtagccaatggcgctcggttgccatgtcttgggcggttgaaagatgtccagttctgcattcaaactcacatcttctcagactcctttttggtgattcccttggaaggttttgatgttgttttgggggtgcagtggctgcagaaattgggtgatatcaactggaattttgattccctccaaatggccttctctttggatgggggccac

SEQ ID NO: 42153 - DNA, 1377 bp, Zea Mays
aattttagaggttagaccgccacgaaagcgtcactgcacacggcattcccctcccctagcgttatcgtcgcaccataaataaccatcctctcctcgcctttccccacatctcatcttcgtctgtgttcttgggcgtacgcggacacagccccgatccgaatcgtcgtccttgcgagcctcgccgatcccccactcccctcccctcgcttcaagatgcagatctttgtgaagaccctcaccggcaagactatcaccctcgaggtggagtcttctgacaccattgacaatgtcaaggctaagatccaggacaaggagggcatccctcctgaccagcagcggcttatcttcgccggcaagcagcttgaggacggacgcacacttgctgactacaacatccagaaggagtcaaccctccacttggtgctgcgccttaggggaggcatgcagatctttgtcaagaccttgactggcaagacaatcacccttgaggtggagtcttcagataccattgacaatgtcaaggccaagatccaggacaaggagggcatcccgccggaccagcagcgtcttatctttgccggcaagcagctggaggatggacgcacccttgcggattacaacattcagaaggagagcaccctccacctggtgctgcgcctcaggggaggaatgcagatcttcgtgaagacattgactggcaagaccatcaccttggaggttgagagctccgacatccaggacaaggaggggattcccccagaccagcagcgtctgatcttcgccggcaagcagctggaggatggtcgcacccttgcagactacaatatccagaaggagagcaccctccacctggtgctccgtcttcgcggtggttattaagccatcagtcgttgaagctgctgctgtatctgggttatctagtgtctctgccattgcccatggatggtgctgtctttcaaagtatttgtatggtttgtgtcgtgagtcgtgactgagctggtttcatggaccagttgtgttctcgttacccaaaactatcgtgcgaccgcatatggcttaatcatgaataaatgttgtttgaatttaaactattcgctgaatattgttgttttttgtcatgtcagttaatgttactaaattggttgccttctaatttttgtttactggtgtttgtcgcaccttatctttttactgtatgtttacttcaggttctggcagtctcattttttgtgactagttaaaacttacagctaaaaaaatgcagtttttcattttcatttgaagtttgattagagctattgataccggaccatcaggttaggttagttgtgcatagaatcataaatattaatcatgttttctatgaattaagtcaaa

SEQ ID NO: 42154 - DNA, 1764 bp, Zea Mays
aattttagaggttagaccgccacgaaagcgtcactgcacacggcattcccctcccctagcgttatcgtcgcaccataaataaccatcctctcctcgcctttccccacatctcatcttcgtctgtgttcttgggcgtacgcggacacagccccgatccgaatcgtcgtccttgcgagcctcgccgatcccccactcccctcccctcgcttcaagatgcagatctttgtgaagaccctcaccggcaagactatcaccctcgaggtggagtcttctgacaccattgacaatgtcaaggctaagatccaggacaaggagggcatccctcctgaccagcagcggcttatcttcgccggcaagcagcttgaggacggacgcacacttgctgactacaacatccagaaggagtcaaccctccacttggtgctgcgccttaggggaggcatgcagatctttgtcaagaccttgactggcaagacaatcacccttgaggtggagtcctcagacaccattgacaatgtcaaggcaaagatccaggacaaggagggcatcccacctgaccagcaacgtctcatctttgccggcaagcagttggaggatgggaggacccttgctgactacaacatccagaaggagagcaccctccacttggtgctgcgtcttaggggtggtatgcagatctttgtgaaaacccttactggcaagaccatcactcttgaggtggagtcttcagataccattgacaatgtcaaggccaagatccagaaggagagcaccctccacctggtgctgcgcctcaggggaggaatgcagatcttcgtgaagacattgactggcaagaccatcaccttggaggttgagagctccgacaccattgataatgtgaaggccaagatccaggacaaggagggtatccccccggaccagcagcggctgatcttcgccggcaagcagctggaggatggtcgcaccttggctgactacaacatccagaaggagagcaccctccatctggtgctccgcctgaggggcggtatgcagatctttgtgaagaccttgactggcaagaccataaccctggaggttgagagctctgacaccatcgacaacgtgaaggctaagatccaggacaaggaggggattcccccagaccagcagcgtctgatcttcgccggcaagcagctggaggatggtcgcacccttgcagactacaatatccagaaggagagcaccctccacctggtgctccgtcttcgcggtggttattaagccatcagtcgttgaagctgctgctgtatctgggttatctagtgtctctgccattgcccatggatggtgctgtctttcaaagtatttgtatggtttgtgtcgtgagtcgtgactgagctggtttcatggaccagttgtgttctcgttacccaaaactatcgtgcgaccgcatatggcttaatcatgaataaatgttgtttgaatttaaactattcgctgaatattgttgttttttgtcatgtcagttaatgttactaaattggttgccttctaatttttgtttactggtgtttgtcgcaccttatctttttactgtatgtttacttcaggttctggcagtctcattttttgtgactagttaaaacttacagctaaaaaaatgcagtttttcattttcatttgaagtttgattagagctattgataccggaccatcaggttaggttagttgtgcatagaatcataaatattaatcatgttttctatgaattaagtcaaa

SEQ ID NO: 42155 - DNA, 410 bp, Zea Mays
ccttgcatacaatatttctgggagcaagatgagtctgatatcatcagtcgccaaacaaggatcagtctccactttcaaggcagaaagaaacagatgttgcgatatgctttcacataccattggcgcctatggtcgattccggagatcaaggactgcttggaggaggctggattcaagtgggtccacgtttggatgagggagatgccaaatacccagtcaggtggaaacgccaaggaatataacgccaaccgggacgtgaagtatgaagaatcacaccatttcaaccaaggagatgcttggaacgcctatgtcgttggagtagcaaatatctagccggttgtacaggaacgtggaagattgcttgcagatctagaagaagatgaacaacctaaaaagaaggttagattagg

SEQ ID NO: 42156 - DNA, 765 bp, Zea Mays
cgtgcagtgcagtccagtccagtccactgggcccctacacgacgacggggcgggccggcgcctgtggacgatggatggctatataaaccggccggctcggtgtccatctgccaacggcgccacggcggcgacgagaagtggcgagccccgagagcgggtttagttagaggaccacctccacggccacggcaagacggccaaggtgatgcacctgctgctctggggacccaagtgaagcggcgagaggccaccgtaccgccgggctctcccgctggcgttgctcgttttgctctgcctgcaatccgccccgcacggactgtactgtacctatatatacacctacatactacgacgtgcacctgtactacgacgtgctgctgtaccatactaaatactagtgcgctgctgctcccttgccttcttgcttgcaccagccactccgcttttttgctcgaacgatcgactgctcgtgtcgcgtcgggccacggccggtcgtcagtttgggtgtgtccactccactgtaaagctccttttttgggtactccctgcatgccaaagttagcggacgtgtactaggtgtggttcggagcagcaggttgtattacttaccaccccctctgtgatgtaagaacgcgtgctgaaattatcatgtcgataccaagttatggcatatggattggataagaatgggaaaaaatatgatagattttgacttactataaatttaaactcactcagaccttgtttgtttgtgccggattacac

SEQ ID NO: 42157 - DNA, 4363 bp, Zea Mays
aacgtaggcgtccacatctaccacatggtgcacggttctgccttcaccccgacatcctctccgccaccaatgctctcctccactcagctccccatccgcggaagaatcagattcgattccgcgacagccgacagtgacagaccgcattccaagccccccaaaatcgcatttccctctccgatcaaatcaaactcaaaccgacacacgactcacacggcttctccgcctccgcagatcgccgtcgcctactcgcgcccctccacgcgtcgatggccgccgcggacccgccaccgcgcgagaaggtcgtgcccacgctgaagcgcagcgccagcatcgaccggataccggtggacgcgcgccgcatcctgcaccgcctcgccggggacctctggggcggcgacatggaccccggcgcgctggccgtgtcccagctcaggggcgccatgaccaatgaggtcttccggatcacctggctcggcggcgaggccgagggcaacggcccgcgcaaggtgctcgtgcgcatctacggccggggcgtcgaggtcttcttcgaccgtgccgacgaggtccgcaccttcgagtgcatgtcgcgccacggccaggggcccccgcctcctgggccgctttgccaacggccgcgtcgaggagttcatcaactccagtgtacactacgcctctaccaccctaaatgcgtgatgtgtctgctcggatccaatccgcgattggtttttgtcatggctcactcgcgtgttgctcgcgtcctggccttgccaaaccctctccgccgcggatctgcgcgacccggtaatgtccgtcgtgatctgctgccgccatcaacgccctactcccctcctagatcccgtgatctgctacgaagctgccatcaatgccctcctcccccttcgctcagctccccctcgcgccttcgatccgctaccgtgacccgctgcgaggcggccatcaacgcccatgtcctccttcgcgcagctaccttcccaggatctcgggcgctccttcgtcgccatactttttggttcagcgggacgcccagcccgtagatcgttgccctcaagaagtaatagtccatacaatacctggactcggcgcatgagtatgactaatcttctcagatcagatctgttagataaaaaaataaatgggaattgcttggcacttggcataattaaaagaattcattgcagtaaccaatctaacgttttatgtcctactgttctcatttgatagcagcatatctatacatgtcatcagaatcataaatactttgttggcaagttttctctgagctgcattctcctcgttgtagggcctaagcttttgctgatcacttcaagatggctctggactgtttcttcgctgtatggtttgttgtgggaaatgtgtgggtgttcgatggacattcttccgcccatgacgcacccaacctgtacaggtgtcggtgagaggggttgcctcatgggaaacttggctgggccattgatgaggattttggttcgtttgaggcacttgtgtaaagaagatgaatgcagatggcgctgctttacaagggtctagatgggtggtatgtatattatgctttgtttatgtttatcgagaatagttgaaggtgtgttctgttgaccattaacctcatgcttctctaaagtggttagctttggataaagaggcaaaaaagctttcagttaaaactactaaaactacaactaatcaggtgaaacatgtcgtccatatctgtttgttcttcatatgatacaacatggctattcccaattatcattcttgaatcttgatcgaagtcgtgttagtgacaacttccctgtacctaggtgcccataggcaagcttaatagacacatgtcatctttcatgttgcaattgttgttccagaatgtgtccatctttaaaaggtaaggaattggttaggcttttacttccatggaattttttacttgctaaaatgggaacaagtggttggtgatgaaatgtagatctgctcctaaaaacttcgaagcaatcctgaggacatacatcagtaagtcattcattttgactgtgttgatatttgtagtatgcctttttggatagatggtgttgcattcctcttataaccatacttgctattttcttatatgattgaataaatatgattgtagtttactgttgttctcccgttatctgaatcttgactctaatcccttggtgagctcatatgggatataatgttgtagcattgagggtttcatcccaagttgtttacttcagtgctcgtgcatgtaccgaataaaactagaacagctattgactcatttcaccttttagatgattgtgtgtgtatgtcgtttcactttttattcatttgtgatccaatttggtgcatgtactgattgaatttgatccgtctgttaataaaatactaatgttttactatcccgtttaacacacccgttgtgtgtttcttgggattccaatgtgtttagtatttttatgataattatgggatatgctaccattttgcatctgtctgttatacatactatattctttttgtacggcgcacttgtatttgttcctatttcattctctcacctgcttttttcatgcttctcctttagatgtaccattgaacatacatacaactaaccataagggcactaacatttagttgaatattttgtatgtcgttggtccattgcaatgcacgggcatctaactagtgatttctataaattccaaaggcctactcacagttacggtggttattttagtaccatattgctattttaggtggagtgaaggtaacttgaatagttgagttatcttcacttacttgaagctattgaggatgggaaaaaagaacacacgcgtgctcgcttgcctcgtcggtcgggacggatttgctgctcgatatttttgcatgcatggagaaaattacgttggcatatttttgtgatcacacggctaattatttaccctaggaaaaaggagtcctggtatagtgggctagggagagtgggcccacacgtgaacaccgaacacgctcctttttaaacgcctccccgtaccccgctccataaatgcaagaggtttaggtactgtttgcgtactcggagtgggggagtaactgcgcgatccaaggtactgtgctgtagcaattgttgcctaaccataaccactgaccaaaccatgctacgagacactcccgtaccctgccaggtggcagggcagtagggtagggcacacaacagccgggcgtcggcaagcccagcccaggcctgcagtgccacacctgcactgcaccccgtgaatcttctatccttcctctctccctccgttactcctccctcccaccctcttaactctgtgcacaggcggagagagcctctgcaggccgtaggagagcagcgttgttgtagcagggtggtcggggtcggggtcgggggtaaggtaaagacagcaagtgggcccccacccacggttgcgatgtgtgtatgtagttgcaacggtctggccgcgagcctgatcgtacaaggaggacccagaagcaaagcaaacaagaagcttggctgctctggactgcaacggtcgacccggcccgggatttcatgtgtcgcggtcgcggacgctctcggcctcggcttttgccgtgggccagagcagagcaggacggggaaagccgggggaaaaaaaggaccacccgtcgggtatatctatctatctactttctttctttctttctcttggcagtttggcgtgcggcggatcctggccggccaccgcatctgctggagcttggaggagtgcttcacggactgcttttgggtgtcgctaatgatacgaggatgagacgcgtgccgttttgtttgtttgtttttgtttgtttgttggttggtcataaacataattgaccggagaccgaacctaccatctacgtttacgttgagattataatctgactatattatataacccgaccgacatcgacaactctttacagttgatccggtcacatgtctcgggcaatcaaactagccagccgtttagattgtttttgatgtagcgtatactttttttttggactgtcattagcgacgtaatgtcattctagtgggttttgcatcgattatcactgttatcaacttgtttttatctacatgtcgtcgtcttgtttttttttatgttttcccctgccgtgaaatagaagaacgttgctaaaatccgctccaaatcatgctgtccggtgtctgttagtatggttctagttcagtcattacggatagcgttacttttattacggttacggagggccgtttcttttgctaaataaataacaaaactggtacagtaat

SEQ ID NO: 42158 - DNA, 4047 bp, Zea Mays
gacatcctctccgccaccaatgctctcctccactcagctccccatccgcggaagaatcagattcgattccgcgacagccgacagtgacagaccgcattccaagccccccaaaatcgcatttccctctccgatcaaatcaaactcaaaccgacacacgactcacacggcttctccgcctccgcagatcgccgtcgcctactcgcgcccctccacgcgtcgatggccgccgcggacccgccaccgcgcgagaaggtcgtgcccacgctgaagcgcagcgccagcatcgaccggataccggtggacgcgcgccgcatcctgcaccgcctcgccggggacctctggggcggcgacatggaccccggcgcgctggccgtgtcccagctcaggggcgccatgaccaatgaggtcttccggatcacctggctcggcggcgaggccgagggcaacggcccgcgcaaggtgctcgtgcgcatctacggccggggcgtcgaggtcttcttcgaccgtgccgacgaggtccgcaccttcgagtgcatgtcgcgccacggccaggggcccccgcctcctgggccgctttgccaacggccgcgtcgaggagttcatcaactccagtgtacactacgcctctaccaccctaaatgcgtgatgtgtctgctcggatccaatccgcgattggtttttgtcatggctcactcgcgtgttgctcgcgtcctggccttgccaaaccctctccgccgcggatctgcgcgacccggtaatgtccgtcgtgatctgctgccgccatcaacgccctactcccctcctagatcccgtgatctgctacgaagctgccatcaatgccctcctcccccttcgctcagctccccctcgcgccttcgatccgctaccgtgacccgctgcgaggcggccatcaacgcccatgtcctccttcgcgcagctaccttcccaggatctcgggcgctccttcgtcgccatactttttggttcagcgggacgcccagcccgtagggcctaagcttttgctgatcacttcaagatggctctggactgtttcttcgctgtatggtttgttgtgggaaatgtgtgggtgttcgatggacattcttccgcccatgacgcacccaacctgtacaggtgtcggtgagaggggttgcctcatgggaaacttggctgggccattgatgaggattttggttcgtttgaggcacttgtgtaaagaagatgaatgcagatggcgctgctttacaagggtctagatgggtggtatgtatattatgctttgtttatgtttatcgagaatagttgaaggtgtgttctgttgaccattaacctcatgcttctctaaagtggttagctttggataaagaggcaaaaaagctttcagttaaaactactaaaactacaactaatcaggtgaaacatgtcgtccatatctgtttgttcttcatatgatacaacatggctattcccaattatcattcttgaatcttgatcgaagtcgtgttagtgacaacttccctgtacctaggtgcccataggcaagcttaatagacacatgtcatctttcatgttgcaattgttgttccagaatgtgtccatctttaaaaggtaaggaattggttaggcttttacttccatggaattttttacttgctaaaatgggaacaagtggttggtgatgaaatgtagatctgctcctaaaaacttcgaagcaatcctgaggacatacatcagtaagtcattcattttgactgtgttgatatttgtagtatgcctttttggatagatggtgttgcattcctcttataaccatacttgctattttcttatatgattgaataaatatgattgtagtttactgttgttctcccgttatctgaatcttgactctaatcccttggtgagctcatatgggatataatgttgtagcattgagggtttcatcccaagttgtttacttcagtgctcgtgcatgtaccgaataaaactagaacagctattgactcatttcaccttttagatgattgtgtgtgtatgtcgtttcactttttattcatttgtgatccaatttggtgcatgtactgattgaatttgatccgtctgttaataaaatactaatgttttactatcccgtttaacacacccgttgtgtgtttcttgggattccaatgtgtttagtatttttatgataattatgggatatgctaccattttgcatctgtctgttatacatactatattctttttgtacggcgcacttgtatttgttcctatttcattctctcacctgcttttttcatgcttctcctttagatgtaccattgaacatacatacaactaaccataagggcactaacatttagttgaatattttgtatgtcgttggtccattgcaatgcacgggcatctaactagtgatttctataaattccaaaggcctactcacagttacggtggttattttagtaccatattgctattttaggtggagtgaaggtaacttgaatagttgagttatcttcacttacttgaagctattgaggatgggaaaaaagaacacacgcgtgctcgcttgcctcgtcggtcgggacggatttgctgctcgatatttttgcatgcatggagaaaattacgttggcatatttttgtgatcacacggctaattatttaccctaggaaaaaggagtcctggtatagtgggctagggagagtgggcccacacgtgaacaccgaacacgctcctttttaaacgcctccccgtaccccgctccataaatgcaagaggtttaggtactgtttgcgtactcggagtgggggagtaactgcgcgatccaaggtactgtgctgtagcaattgttgcctaaccataaccactgaccaaaccatgctacgagacactcccgtaccctgccaggtggcagggcagtagggtagggcacacaacagccgggcgtcggcaagcccagcccaggcctgcagtgccacacctgcactgcaccccgtgaatcttctatccttcctctctccctccgttactcctccctcccaccctcttaactctgtgcacaggcggagagagcctctgcaggccgtaggagagcagcgttgttgtagcagggtggtcggggtcggggtcgggggtaaggtaaagacagcaagtgggcccccacccacggttgcgatgtgtgtatgtagttgcaacggtctggccgcgagcctgatcgtacaaggaggacccagaagcaaagcaaacaagaagcttggctgctctggactgcaacggtcgacccggcccgggatttcatgtgtcgcggtcgcggacgctctcggcctcggcttttgccgtgggccagagcagagcaggacggggaaagccgggggaaaaaaaggaccacccgtcgggtatatctatctatctactttctttctttctttctcttggcagtttggcgtgcggcggatcctggccggccaccgcatctgctggagcttggaggagtgcttcacggactgcttttgggtgtcgctaatgatacgaggatgagacgcgtgccgttttgtttgtttgtttttgtttgtttgttggttggtcataaacataattgaccggagaccgaacctaccatctacgtttacgttgagattataatctgactatattatataacccgaccgacatcgacaactctttacagttgatccggtcacatgtctcgggcaatcaaactagccagccgtttagattgtttttgatgtagcgtatactttttttttggactgtcattagcgacgtaatgtcattctagtgggttttgcatcgattatcactgttatcaacttgtttttatctacatgtcgtcgtcttgtttttttttatgttttcccctgccgtgaaatagaagaacgttgctaaaatccgctccaaatcatgctgtccggtgtctgttagtatggttctagttcagtcattacggatagcgttacttttattacggttacggagggccgtttcttttgctaaataaataacaaaactggtacagtaat

SEQ ID NO: 42159 - DNA, 557 bp, Zea Mays
ctcgcccacccccctccacctcccgctcctctcccgcagtcccattgctcccaccacccgaacgcgctatgcgcctcctcatccacccacgaggtcccagctgcggccgtcgaggccccggccccgtcggcgcccaccaacccgtacatctgtatctgcgtctgttttgttctgttgcaaccaaaactcttttgcatatccgctttgatccattttctgatagaaaaaaaagccactttctcgattcaagatctagatctccgcttcctctccttacttggatcatgtgcattttagcccggtttctagttctagttctagactcctctcagactagcctttttgagggcttgctcattcaaaccgagattgaagattcacagtctcaaatgggttctacctctaggttttctttaccccactttcactctttcagaagtgaggctaagacggaggaggttaagacataggctttgttaagaagacctggtctccatcaaatcttgaccttatcatccttcagccaaccaactcagcatcaaaatcatatgccttcc

SEQ ID NO: 42160 - DNA, 530 bp, Zea Mays
tccatcctggtcagtaggtataggccagagacgaaacacgtagtgccagaaagatgcattcacgtggaccacgaatgaatattctctttttttccaaaagaagatcagatcaggataggtgtgtgcatgctaagctccacttggtgatcctactgttagggcttgcttgggagtaggtggaacaaagagaattgagggggctataatcccttactattcaattttgaataacaagggattatagccccctcaattctcttcatttcacttggtcccaaacaagcccttagaatggtcatcacccggagtgcactagccagcaaagggatggctactggcaccactgtaaagcttttaaggatatcctattaccaacttgtatcctgtgttcaataataagcttcagaaaaagcaacatttgcaaagtttagaagaacatacctgtatgtcctgcgtacactcaagccccatggttccctttacatctgggaactacagggctaccttgtactcattttcttcccaaatct

SEQ ID NO: 42161 - DNA, 3138 bp, Zea Mays
caaatatgcagagcaaatagtctgtatgactttagcaattgaagtaacaatacaaccttgcaaatttgcagtgcctttcttccagtaaaataatttttacatgattcactaatcatccgtgaacgaagattaagaaaaaacaaaaaaggactgagacctagagtcagagtgttaccataaaaaaagaaagatgctcttatgaatctagatatcagaacttgtacttgcagaagggttacaaacagaatcacgagaacacaaggtgtaaaagcaatatgggaacaacatccttgcaagcttttcaagattctgttgccgctgctatattatagcatgatgtgtttgcgaggtcctaccctgtttcatgtaagagaccatgcagccactccagtattcatacaacaatagaaaatcagaaatgctacacatacctttacttggtgttagtcttgtgctattgctcttcttggcctctcctgccagctcctgcaaagaagaggagaagacatccctcttcgagttcctcaatggtctctctcaagcctctggcctcaccagttcatggcagaatgacacaaactgctgtctatgggagggtgtcatttgcaatggagatagaactatcatagacatctcactagctgctatgggccttgaggggcacatatcaccctcacttggcaatctcaacggcctgttgaagctcaacctatctggcaacttgctctccggtggactcccatcgacactgttgctctccagcagcattactgtcctcgatgtcagctttaacaagctcagtggagaattccatgagctgcaatccacgcctaacagcgcgatgaaggtaatgaacatctcgagtaacttcctcacaggatattttccatccaccacattggagggcatgaagaatctggctgctctcaatatgagcaataatagctttgctggggaaattccgagcacaatttgtgttgacaaaccattctttgtggtccttgaccttagctacaaccagttcgttggtagaataccctcagagcttggtaattgctctggtttgaaagtgcttaaggctggccagaaccaactcaatgggacccttccatctgagatcttcaatgttacctcactagagcacctctctttccctaacaaccatttgcaaggaacacttgatcctgagtgtataggaaaactcagaaatttggtcatccttgatcttgggtggaatggactaaatggcaagatcccgaattctattgggcagctcaagaggctggaggagcttcacttagacaataacaacatgtctggagagctgccaccagcccttagcagttgctcaaatctcacaaccatcatccttaaagacaacaacttccaaggagatctcaaccatgtcaacttctccaccctgtctaatctaaaatttttagattgcaggtcaaacaaattcactggaacaattccagagagcctctactcctgcagcaaccttattgcgttgcgattatctttcaacaaccttcatggtcaattttcatcagggataaacaatctcaagtccctcagattcctagctctcgctcacaatagttttacaaatatcagaaatacacttcaaatcctcagtaagtccaggacactcactctcgtgctgattgggggcaacttcaagcatgagaccatgccagatgatgatgaatttcatggctttgagaatctcatgggtcttggcataaataaatgtccactgtatgggaagttacctaactggctggctaagctcaaaaacttgcgagctttactattagacgataacaaactcagtggaccaataccagcctggattaatagcttaaaccttcttttctatctagacatatccaataacaatctcactggtgacataccaacagcactgatggagatgccaacgcttgaggcagctcactctgccccaataatacttaagtttcctgtctacctggcaccgtttcttcaataccgtacaaccagtggcttccctaaaatgttgaatctaggaaacaacaaattcaacggtataattcctccagagattggccagctacaggcactccttacactcaacttgagcttcaacaacttacatggggagatcccacaatcagtcggcaacctcaccaatctgcaggtgctagacttatcctacaataatttgaccggtgaaatcccttctgtgctggagaggcttcacttcctttccaaattcaacatttccagcaacgatctagaagggcctgttccaactgggggccagtttagcacatttccagactctagcttttttggaaacccaaagctgtgcggcgctacgctgatgcgccactgtaattcagcagatgcagttccagtcaccgatgtctccacggaagagtacgccgataaggtcatctttgcggtggcctttggtatgttcttcggtgtcggagtgttgtacgaccagatgttcctgttcagatacatttattttggctgaagctacttgagtagaagtgtagtacaataatgtattaatgtgtccttgttatggatacacagtgtacataacagaacctaacaataaacagacatagcttcaaacttgagtaatgcaatcgagcggcgccagcagcaggcagcaagattagcacatctcattgttagcgacatttagcccatgccctccactcgatggatggtatgagtggaggcgcagaataatctgtactgaaataaactcaaatgggagtatgtagtcactggactatgttgatttactgagttaatgcgactctatgcgtttctgagagactgtgtgactgcatttgcaacatttagtctgtaataaaacgtctgcgaattgatgtgctaactgagtaaatgaagtgtgggagcagatccacttataccttgggaggccagtatgttaagctaaagctgccttaatccaaaccacaaaatcaagctagatggagccgagggcgaatgtaagcgagactctatggggtgcgccggtgcggatgcaaccacgacagaatattgaaccagtaattagggccaaaatagagagcagatgccgcaaccgctactccgctatagccaaccttt

SEQ ID NO: 42162 - DNA, 2580 bp, Zea Mays
aaaatcaaaaacttaaaagaaatcacgggtagcgcctccggtctcccactctcgctgaagtagggtcccccgtttcaaattgacaccccgtccaacgcaaacgagagggaaagccgaagcgagtgcgagtgcggccctcagctgctgcagttgctcctgctcgtttctgcctgctcgtttctgcggcggcggcggcggcggcggcctagcacctgagcggggcggcgagaggggacggagatggatatcgcgcgggcggctgctggcgtggcctgctgcaaggagcaccagaggatctacgccgagtggttcgccctggccgacccagatggcgacggccgcgtcacgggcgccgatgccaccagcttcttcgccatgtccgcgctttcacgcgccgatctcaagcaggtgtgggcgatcgcggattccaggcggcaggggtacctcggattcgccgagttcgtcacagcaatgcagctcgtgtctctggcccaagcagggaacgagatcacacaggacagtctgaaacgtgaagacctgagcaccttggatccgcctgtgatggaaggtgttgatgagctactggctagatccaaggctgttgtgaagagagttcacccagatgacaatggcaccactcaggcccaagcaccttccatatatcactggtttggttcaaaatcagcacagaaggtgcagatgcctctgactgctgttacctctgtaattgatggcttgaaaagactctatgttgaaaaactgaagcctttggaagtcgcctacagatacaatgatttttctcacccattattgacaaacagtgattttgaagcaaagccaatggttatgctcttgggtcagtattcaacagggaaaacaacattcattaagcatctgctaaagacaagctacccaggagctcacgtcggaccagagccaacaactgatagattcgtagttgtcatgtcaggatctgatggaaggaccattcctggcaatactattgccgttcaagccgacatgccattcactggtcttacaacctttgggggagcgtttctgtcgaagtttgaatgctctcagatgccacatcccctgctagagcatatcacctttgtggacactcctggtgttctctctggggaaaagcaacggacccaacgtagctatgatttcactggtgtgacctcatggtttgctgccaagtgtgaccttatccttcttctgtttgaccctcacaagcttgatataagtgatgagttcaaacgtgtcatttcatctttacgtgggcatgatgacaaaatacgcgtagtgttgaacaaggccgaccaagttgacacacaacagcttatgagagtgtatggtgcattgatgtggtctcttgggaaagtgctaaatactcctgaggttgtgcgtgtgtatatcggatcatttaatgataagccagtgaatgattcagctgttgggccaattggaaaagacttgtttgagagggagcaagatgacctcctctgtgacctgaaggacattcctaagaaagcctgtgatcgacgggtaagttgaaatgttgagtcatctgtcagaatcctcccttcctgtactggatttctgaaacggacagcaccgtttcttccaggtcaatgagtttgttaagcgtgcccgagctgccaagatccatgcttacataattggccatctgaagaaggagatgcctgcaatgatgggaaaagccaaggctcagcagcgactcatagacaacttagacgaggagtttgcaaaggtacttacacataacttgattgctcgtatgtctatgactggggtctaatttcatattttcagcagaagattttcttgataagattgatcatttgaatagtaaaatgttgcttttgggcaaaagttttttcttggggggttactaatgggtaggctgcaggtatatgataactcgtctacaactaaccttgatttggtcgcacctaaatccaaagttactgtcatttttcctcttttctttttgctcaacatccctctgcttggctgatactcgtggtccggtggaacaggtgcagagggaataccatctccccgccggagacttccccgacgtcgagcacttcaagcaggtgctgggcgggtacagcatcgacaagttcgagaagctgaagccgaagatggtgcaggcggtggacgacatgctcgctcacgacatcccggagctcctcaagaacttgcggaacccgtacgagtgaactgatctgacctctcgcgtccgtcggttgtaaaaagattatcttagctgtcacgtccggtgatggcggacggacgaggcagacgttcctgggagggagatgcctagacggttacgggtcactacttctagctgtccgcagctgtgccaaaaccgagaggacacatgagggttcagatcggacagccacagcgcatagcctgtgttggtttcggcgtcagtgctctctgcacgcgaaggagctgctgcggcaccgttgccgtgccgtctcgctgtgatacattttccctcgtgacgagatgaaaagagagttgcaggcggcagaa

SEQ ID NO: 42163 - DNA, 2077 bp, Zea Mays
aaaatcaaaaacttaaaagaaatcacgggtagcgcctccggtctcccactctcgctgaagtagggtcccccgtttcaaattgacaccccgtccaacgcaaacgagagggaaagccgaagcgagtgcgagtgcggccctcagctgctgcagttgctcctgctcgtttctgcctgctcgtttctgcggcggcggcggcggcggcggcctagcacctgagcggggcggcgagaggggacggagatggatatcgcgcgggcggctgctggcgtggcctgctgcaaggagcaccagaggatctacgccgagtggttcgccctggccgacccagatggcgacggccgcgtcacgggcgccgatgccaccagcttcttcgccatgtccgcgctttcacgcgccgatctcaagcaggtgtgggcgatcgcggattccaggcggcaggggtacctcggattcgccgagttcgtcacagcaatgcagctcgtgtctctggcccaagcagggaacgagatcacacaggacagtctgaaacgtgaagacctgagcaccttggatccgcctgtgatggaaggtgttgatgagctactggctagatccaaggctgttgtgaagagagttcacccagatgacaatggcaccactcaggcccaagcaccttccatatatcactggtttggttcaaaatcagcacagaaggtgcagatgcctctgactgctgttacctctgtaattgatggcttgaaaagactctatgttgaaaaactgaagcctttggaagtcgcctacagatacaatgatttttctcacccattattgacaaacagtgattttgaagcaaagccaatggttatgctcttgggtcagtattcaacagggaaaacaacattcattaagcatctgctaaagacaagctacccaggagctcacgtcggaccagagccaacaactgatagattcgtagttgtcatgtcaggatctgatggaaggaccattcctggcaatactattgccgttcaagccgacatgccattcactggtcttacaacctttgggggagcgtttctgtcgaagtttgaatgctctcagatgccacatcccctgctagagcatatcacctttgtggacactcctggtgttctctctggggaaaagcaacggacccaacgtagctatgatttcactgtgttgaacaaggccgaccaagttgacacacaacagcttatgagagtgtatggtgcattgatgtggtctcttgggaaagtgctaaatactcctgaggttgtgcgtgtgtatatcggatcatttaatgataagccagtgaatgattcagctgttgggccaattggaaaagacttgtttgagagggagcaagatgacctcctctgtgacctgaaggacattcctaagaaagcctgtgatcgacgggtcaatgagtttgttaagcgtgcccgagctgccaagatccatgcttacataattggccatctgaagaaggagatgcctgcaatgatgggaaaagccaaggctcagcagcgactcatagacaacttagacgaggagtttgcaaaggtgcagagggaataccatctccccgccggagacttccccgacgtcgagcacttcaagcaggtgctgggcgggtacagcatcgacaagttcgagaagctgaagccgaagatggtgcaggcggtggacgacatgctcgctcacgacatcccggagctcctcaagaacttgcggaacccgtacgagtgaactgatctgacctctcgcgtccgtcggttgtaaaaagattatcttagctgtcacgtccggtgatggcggacggacgaggcagacgttcctgggagggagatgcctagacggttacgggtcactacttctagctgtccgcagctgtgccaaaaccgagaggacacatgagggttcagatcggacagccacagcgcatagcctgtgttggtttcggcgtcagtgctctctgcacgcgaaggagctgctgcggcaccgttgccgtgccgtctcgctgtgatacattttccctcgtgacgagatgaaaagagagttgcaggcggcagaa

SEQ ID NO: 42164 - DNA, 2203 bp, Zea Mays
aaaatcaaaaacttaaaagaaatcacgggtagcgcctccggtctcccactctcgctgaagtagggtcccccgtttcaaattgacaccccgtccaacgcaaacgagagggaaagccgaagcgagtgcgagtgcggccctcagctgctgcagttgctcctgctcgtttctgcctgctcgtttctgcggcggcggcggcggcggcggcctagcacctgagcggggcggcgagaggggacggagatggatatcgcgcgggcggctgctggcgtggcctgctgcaaggagcaccagaggatctacgccgagtggttcgccctggccgacccagatggcgacggccgcgtcacgggcgccgatgccaccagcttcttcgccatgtccgcgctttcacgcgccgatctcaagcaggtgtgggcgatcgcggattccaggcggcaggggtacctcggattcgccgagttcgtcacagcaatgcagctcgtgtctctggcccaagcagggaacgagatcacacaggacagtctgaaacgtgaagacctgagcaccttggatccgcctgtgatggaaggtgttgatgagctactggctagatccaaggctgttgtgaagagagttcacccagatgacaatggcaccactcaggcccaagcaccttccatatatcactggtttggttcaaaatcagcacagaagatgcctctgactgctgttacctctgtaattgatggcttgaaaagactctatgttgaaaaactgaagcctttggaagtcgcctacagatacaatgatttttctcacccattattgacaaacagtgattttgaagcaaagccaatggttatgctcttgggtcagtattcaacagggaaaacaacattcattaagcatctgctaaagacaagctacccaggagctcacgtcggaccagagccaacaactgatagattcgtagttgtcatgtcaggatctgatggaaggaccattcctggcaatactattgccgttcaagccgacatgccattcactggtcttacaacctttgggggagcgtttctgtcgaagtttgaatgctctcagatgccacatcccctgctagagcatatcacctttgtggacactcctggtgttctctctggggaaaagcaacggacccaacgtagctatgatttcactggtgtgacctcatggtttgctgccaagtgtgaccttatccttcttctgtttgaccctcacaagcttgatataagtgatgagttcaaacgtgtcatttcatctttacgtgggcatgatgacaaaatacgcgtagtgttgaacaaggccgaccaagttgacacacaacagcttatgagagtgtatggtgcattgatgtggtctcttgggaaagtgctaaatactcctgaggttgtgcgtgtgtatatcggatcatttaatgataagccagtgaatgattcagctgttgggccaattggaaaagacttgtttgagagggagcaagatgacctcctctgtgacctgaaggacattcctaagaaagcctgtgatcgacgggtcaatgagtttgttaagcgtgcccgagctgccaagatccatgcttacataattggccatctgaagaaggagatgcctgcaatgatgggaaaagccaaggctcagcagcgactcatagacaacttagacgaggagtttgcaaaggtgcagagggaataccatctccccgccggagacttccccgacgtcgagcacttcaagcaggtgctgggcgggtacagcatcgacaagttcgagaagctgaagccgaagatggtgcaggcggtggacgacatgctcgctcacgacatcccggagctcctcaagaacttgcggaacccgtacgagtgaactgatctgacctctcgcgtccgtcggttgtaaaaagattatcttagctgtcacgtccggtgatggcggacggacgaggcagacgttcctgggagggagatgcctagacggttacgggtcactacttctagctgtccgcagctgtgccaaaaccgagaggacacatgagggttcagatcggacagccacagcgcatagcctgtgttggtttcggcgtcagtgctctctgcacgcgaaggagctgctgcggcaccgttgccgtgccgtctcgctgtgatacattttccctcgtgacgagatgaaaagagagttgcaggcggcagaa

SEQ ID NO: 42165 - DNA, 1892 bp, Zea Mays
ttactggtgttgaagctcagacgttagcgaatgtgtaccttgcattggaaaacaaccttgaaatcataccggttctaaataaaatagatcttcctggtgctgaacctgatcgtgtcgcacaggaaattgaagagataattggattggactgtcgtgatgcaattcggtgttcagcaaaggaaggtataggcatcactgaaatattagatgcccttgtgaccaaaatccccccaccaaaagatacatcaaaagatcctctcagggctcttatatttgacagctattatgatccatacagaggtgtaattgtgtacttccgtgttattgatggcagtatgaagaaaggggacaagatatgttttatggccaatggaaaggaatatgttgctgaagaaattggtgtactatccccaaatcagatgcaagtttctgaactatatgctggcgaggttggttatctctctgcttctataagatcagtagcagatgccagggttggtgatactattacacattattcaaaaaaagcacatcatgctttaccaggatattctgaagccactccaatggttttttgtggcttgttccctatagatgctgatcagtttgaggagttgcgggaagcgctggaaaaacttcagctaaatgatgctgccctaaagtttgaaccagaatcttctagtgccatggggtttggcttcagatgtgggttccttggtcttctccatatggaaatagttcaggaaaggcttgagagggaatacaacttgaacttaataattactgcaccaagcgtggtataccgtgtgaactgtgctgatggtgaaactgttgaatgttcaaatccatccttgcttccggagcctgggaagcggaggtctatagaagaaccatatgtgaagattgaaatgcttacaccaaaagattatattggttcaataatggagctgactcaagacagaagaggtgaattcaaggaaatgaacttcatcacagaaagcagggccaaacttatttatgagctaccactagcagagatggttggcgatttctttgatcaactgaaatcacgaagtaaaggatatgctagcatggaatattcagttgttgggtacagagaaagccaactagtaaagctggatatacaaatcaacggggatcctgttgaggcgttgtcaacaattgtgcacagggataaggcatatgctgttggaagggcacttactcaaaagctcaaggaacttatacctcggcaaatgtttagagttcctattcaagcatgtattggcacaaaggtgattgcaagcgaagccctgtctgccatcaggaaggatgtcttatcaaaatgctatgggggtgatatatcaaggaaaaagaagttgctgaagaagcaggctgaaggaaagaaaaggatgaaggcaataggaagggttgatgtccctcaagaagcattcatggccgtgttgagactggaaaaggaggtgctatgaaagtgctcatgaacctttgtgtctccgtaaattaaagacctcttcctgtgcgccactcacaagtatagtcagacgagagctttgagacaacaggcattcactatggttcaacctgtccgctctggaccataggaaccagtcaagcacagatcactcccagaacaaaagcaggtaaatctggcattcgttcgctattttttgcttttttatgtgtcaggctatgatggtaaaacaatcatgtcgccacagagttttgccaggcacatataggaaattcatatgtcaaagtgcatcatgtagtccaattccttgtaacgcatgctacagagacttgtttctacagttgaatataccttgtaaggctgggaccaacagatcgtgcatatgcaaaacaagaggttt

SEQ ID NO: 42166 - DNA, 3432 bp, Zea Mays
gtcgccggcgcctcgcctctccactctccttgcgccgctgtttcgcgagccacggccgagaagagaagcggggtggcgagttggagacttggagatgtccgccgggcccggtggagacagttttgtggcttttgtaaatgggccatggcccaatagaaacgaacggagtcctggtccgttttagtgccgaaaaccctaatccccgtggccattttgggcacgtagccgcctcgctttctcctcttccgccccaccccggtgaggcgctgatccatcgcctcggacagcggctccagaacctccgcgttgcagaaacacagtagcgagaactattcggtggggccgaagatggtgtcgctgaaggtgccaaagcgcctcgccgcaagcgttctcaagtgtgggaaaggcaaagtgtggcttgaccccaatgaagttagtgagatctccatggcgaactcccgccataacatccggaagttggttaaggatgggtttatcatcaagaagcctcagaaaatccactctagatctcgtgcaagaagggcgcacgaggctaagcagaagggacggcactcaggatatgggaagcgtagaggtaccagggaggctaggctccccaccaaggtactgtggatgaggaggatgcgcgtgctgaggcgcctgctccgcaagtaccgcgaggccaagaagatcgacaagcacatgtaccacgatatgtacatgaaggtcaaaggtaactcgttcaagaacaagagggtgcttatggagagcatccacaagtccaaggctgagaaggccagggagaagacgctctccgatcagttcgaggccaggcgcgccaagagcaaggcgagtcgcgagaggaagaatgctaggagggaagagaggctggcccagggcccaagagaaataccaccaccagtctcagccacagctcccactaccggagactgcatccgcaatccagattcgacatcgatatccacgcttcagaaaaggtatccaataattgaaagaccaaccaacctgcttcgagatactggagctgatcaaagcattctgagctctgtgccggctggtccatggaagatagacaccatgcggccactccactgccactcctcacggaacaacagcagagcagcaggtggaccatggtcggcacgatcgcttgctcttgctctgctgccactgctctccctgctctctcccaccgggtgtgcgagcagcacggagcaggacggggtctccctcctcaagtttctccaggggctctcgcaggactccggcctcgccacttcttggaggaacggcacagactggtgcacgtggaagggcatcacctgcgacgccgacggcgccgtcacagaagtctcgctggcttccctgggcctcgagggccgcatctcgccggcgctcggcgagatgcctagcctgctgcgcctcaacctgtcgctcaactccctctccggcggcctccccgcggagctactgctgtccagaagcttactcgccctcgacgtcagcttcaacaacctgaacggtgatctccccgagctgccatctacgttcgccggacagggacggcagcctatcaagttactcaacgtctcaagcaaccagctcacagggcaaatcccgccgctcacactggcgggcatgaccaagctcgtcactctcaacgtgagcaacaacagcctcaccggagagatccccagcaccatctgcgccagaacgccgttcctgtcggcgctcgacctcagcttcaaccagctcaacggaagcgtgcccgtgaacctcggccgttgctccgcgctacgagtgctcaaggccggccacaatgaactccacgggactctgccggacgagctctacgacgcgacctctctcgagcacatctccttcccaaacaaccgtctgcagggagcgctcagcgccgagcgtctagccgagctcaggagtctggtcgtcctcgacctcgcggagaacggactcacgggcggcatcccggactctatcgggcggctcgagaggctggaggagcttcgcctagagcacaacagcatgtccggcgagctgccaccggctctgagcaggtgctcgagtctcagaaccgtcattctccggagcaacggtttccatggagacctgaacagcgtcgacttctcaaccttgcccaggctaaaagttctagatttcatggacaacaacttcacaggcacagtccctgagagcctgtactcgtgcagcgacctcaccgcgctccgactgtcctctaacggcttccatggccagctctcgccggggatcggcaggctcaagtcgctcaggttcctgtccctgacaaacaactcgttcacgaacgtcacgaacgcgctccaggtcctcaagagcgcgccgagcctcacgactctgctgatcggcgccaacttcagaggcgaggcgatgccggaggacgagacgatcgaaggctaccggagcctccaggtcctgtccctggcggactgctcgctgtcaggagaaatccctcgctgggtgtcagggctcgagaacctgcgagagctgttcctgtccagcaaccggctcaccggcccgatcccggcctggctcagcggcctgagcctcctgttcgttctggacgtgtccaacaacagcctcgcgggggagatcccgacagcgctggcggatctaccgatgctgaggtccgagacgaccgtggacgacgacgacgacgacggtgggtcttcgagccagtccgcgttcccgctgcccgtctacatggccgcgtcgctccagtaccacagggcgaactactgccccaagctgctgaacctcggcgacaacaggctcactggcgcggtgccgccggagatcggccgcctgaagggactcacgcagctcaacctgagcttcaacagcctgcgtggggaggttccgcaggccgtcggcaacctcacgaacctcgaggtgctggacctgtccagcaaccgcctgacgggcaagatccccagggcgctggagagcctccacttcctctcctacttcaacgtctccaacaacgacttggacgggcctgttccggcaggaggccagttctgcacgttcccgagctctagcttcgcggggaacccggggatgtgcggccctatgcttgttcgccggtgcagcgctgcttctgtagaggcaggtcttcctgcgcccgttcgcgacgcaggactgtgtggcggtgacgtcgtcgtcttcgctgtgacctttggtgtcttcgttggagtaggcgtgctgtatgatcagatggtactgtccagatattttgggtagcgaaaagtgctgcagcaatgcaggaaaaaaaattcttcgcgtgtgcaaagaaactactttactgtctcttacatccatcatcttatatcttatggtctatataaatacgagaaa

SEQ ID NO: 42167 - DNA, 529 bp, Zea Mays
gcagcagccatctgcataacgaaaaaagaaggtgaagccgaggctcgacgacgggggcgtcgggtttccgccgttccggttcgggggaggcggaggaggaggcggcggcggcggcagcagctcgtccggcgggttcatcctcttcgtggtcgtcctgctcctggattacctcaaggagttcgagaggaacctgcagaacgggccacggaggagcggcggtggctacgacgacgggctggcgccacagtagattcctctctctttctcggtgtgtggtttgaattttggaagagaacgtgtgctacgactctacacgaccatgtgttgcagagatgcttcggtgttcgttggtgtgatctctctctctcttttttttttttcctacaaaagacagtttttctcgagggctcatgtgaggactagaaattttagccagtcgaacgaatgccttgagatcacacaatgaaactcattggcgcttcgaaagtttgaataaatttcaaagaatctcctcagtccctgtttggat

SEQ ID NO: 42168 - DNA, 6472 bp, Zea Mays
cgcctccccacccaccccagtctgccagaaatggaggaggatcactcggtgatactaatatctgaaggtgctattaaaagcatcaaacttagcctctctaccggagaagagatatgcacatactccataaacgagtgcccagtgacccatcctagccagcttggaaatccgttccttgggttgccacttgaagctgggaagtgtgaatcctgtggtgcctctgaaaatgacaaatgcgaaggccattttgggtacattgaactacctgtacccatataccatccatgtcatgtcactgaactgaggcaactattgagcttgatatgtctgaagtgccttcgaatcaagaaagggaaggtgaaacaaagtaatggaaaaggaaacgcggcaccaactttgtgctcttattgcagggatattccagccctgtctttgaaggaaatcaagacaacagatggtgcaattcgtttagagttgagagcacctcataataaacacatgacagaacgttcatggaactttcttgataaatatggatttcatcatggtggatgttctcaccataggacactgcttccagaagaggctctaaatatattgaagaaggttcctgatgatactaggagaaagctagctgcacggggatacattgttcagactgggtatgtgatgaagtaccttccagtacctccgaactgtctatatattccagagttcaccgatgggcagagcattatgtcatatgacatttcaatagctctgttgaagaaggttcttcagaaaatagaacagattaaaagatcaagatctggttccccaaactttgaatcacatgatgctgaatcatgtgatttgcagcttgcgattggccagtacatacgtctaaggggcactacaaggggccctcaagacaacaccaagcggtttactgttggcagtgctgattcagctgcattgtcaacaaaacagtggttagaaaagatgcggacactgtttatcagcaaagggtcaggtttttcatctcgcagcgttctgacaggagatccatatattgggctaggtgttgtagggcttccttctgaagttgcaaagagaatgacattcgaagagcaggtaactgacataaacattaacagattgcaagacgtggtagacaagggactctgtttgacctacagagatggtcaagctacatatgccatcactgttggatcaaaagggtacacaacacttaaagttggtcagactatcagtcggaggatagttgatggggatgttgtgtttcttaacaggccacccagcacacataagcattctctccaagctttctacgcatatgtgcatgatgaccatacagtcaaaatcaatcctctcatgtgtggccccttttctgctgactttgacggggattgcgtacacatatattatccacaatcgcttgctgcaaaagctgaagccttggagctttttagtgttgagaggcaactcattagttcgcacagtgggaaggttaatctccagctaggtaacgactccttggtagctatgaaggctatgtctcatacaaccatgttacacaaggaattagcaaaccagttggcaatgtttgtgccattttcacttcttgctcctgctgtaatcaagccagttccatcttggacaatatcacagatagtgcaaggtgcatttccagctaacctgacttgccaaggggacacacacttggttagggacagcacaatcataaggctggaccttggcaaagaatctgttcaggactcattccctgatttggtgtcctccatccttcgtgagaagggtccaaaagaagctctgcaatttctgaatgtgttggagccattgttgatggagtttttacttcttgacggtttgagtataagtctgcgggattttaatgttcccaaggctttattggaggaagcacaaaaggacattcgaaatcagtcccttattcttgagcagtctaggtgctctacaagtcaattcgtagaattccgagtcgaaaacaatttgaaaaatgtcaaacagcagatttcagattctgttgggaaattctctgaccttggtctgctgattgatccgaaaaaggaagcctcaatgtcaaaagtagttcaacaagttggttttgttggcttgcaactgtatcgtgaaggcaagttgtattcaagacgcttggtagaggactgcttcacaaactttgttaataaacacttggccattggagatgagtatcctccagaagcgtatggtcttgtccaaagttcatattttcatggtctcaatccttatgaagagttgatacatgctatatccactagagaagctatgatccgctcctctagaggtctgtcagaacctggaactttgttcaagaatttaatggccatcttgagggatgtagttatatgttatgatggaactgtgagaaacatttgtagcaattctatcattcaacttaagtatggggaagatgatgaaactgattcttcaagtgttgtacctcctggtgaacctgtgggtgtcttagccgccacagctatctcgaaccctgcatacaaggctgtcttggattcctcccaaagtaacaatgcttcatgggagtcaatgaaggtagtaatgttataaatatttcttgtcatttaatttagaggccttgttgttactgcttaataagtttgttttattattatcacaggaaattcttcagacaagaacttcctataaaaatgatgtgaaagatcggaaagtggtcctattcctgaatgattgctcttgcgcaaaaaaattctgcaaggaaagggctgcacttgcagtacaaagttgtcttaagagagtcacacttggggattgtgctactgatatctgcattgagcatcagaagcaaataaatttagatggaacatctgaagctgccccaactcttgtaggacatattcaccttgacaaggggcatttagaaaggataaacattagtactcaagacattctccaaaaatgtcaagaagtttctgggagatttggaaagaagaaaggacacctttgccacatctttaaaaaaattacttttgctacttgtgattgttcattcactcagatgccaatcgatggaaagctacataaggttccatgtgtgcagtttgctttttctgatgacattgtactatccgagtctattgagagagcagtgaatgtgatagctgactctgtctgctcagtgcttttagatacaattattaaaggtgatcctcgaattcaagcggcaaaagttatctgggttgaatcagatgcagcatcttgggtaaaacacacacggaaggtatcaaagggcgagtcagcattagaaatcattgttgaaaaagatgatgctgtaagcaatggtgatgcctggagaacagcaattgatgcctgcttacctgtacttaacctcattgacacacggaggtctattccatatggcattcaacaagtgagggaacttattggcatctcatgtgccttcgatcaagtggtgcagcggctttcaacgactgtaaaaatggttaataaaggagttcttaaagaccatttgatacttgtggcaaacagcatgacatgcactggaaatttgattgggttcaacattgctggctacaaggcaactttccgttcattaaaagttcaagtgcctttcaccgagtccactttgtttacccctatgaaatgctttgagaaggctgcagaaaaatgtgattctgattcattgggatgtgtggtctcatcgtccgcatggggcaagcatgcagcagttggtactgggtcatcttttcaaattctctggaatgaaaatcagctgaaaagcaacaaggagtatggggatgggttgtacgatttcttagcattggtcaggactgaccaagaaaagacagactacatgttcttggacgatgttgactatcttgtagaggagaatgcagcagatgacatgtgcttatctcctgagccagatgggacccttggtaagcctacctttgaggataattttgaagagcaaaatattcagaaaggcagctcatgggaaattggcataacaacgaactcaagttgggaacagaatgctagtgttgcgaatgattctggtgactggggaggctggagtagtggaggtggagctgctgcaaagccagcagatcaagataattcatgggaagtgcatgctaaggtgcaggacaattccaccactgattggggaggctggagcgttgagaagccaacaggtgaggcaactgtatctggagaaccagctgaaacagatacttgggctgataagggtgctaaaatggaatcagatgcaggtgatggtaattgggaaaagtccagcactcctgaggcatcaaagaaaaatgactcatcagaaaatacatgggacaaaagaaaaggagatggaggtgatggtgcgtgggggaacaggtctgatgatggccatggcaattgggagcatcccagcaattggaatgggcagagtttggatgtagatcaggacacatggggaaacgccaggggaaaaaagaaggcagatggtaactactgtcaatgggaggagcagccaagcaattacaaacagaagaagacaaatgctgatcatgattcctcctataacaatgtgatgccgtcatcagaaattgcttggaatgctggagatggaactggaagaccaaatgccaagtctaatgcagaatccagttggggtgaggaagataagatggagtctgacgatcatccgaaagtcccaaaagaatcagacacatggaatacagggagatcaaatgaaagtccatgggataacactgatgcactgcaggattcctgggttaagagcgcagctcgcaataacaacactcaggatggttcatgggataaagtagtatctatgaaggatcttgattcactccaagattcatggagtaaggcgacaatccagacgaatgatgcacagaatgattcttgggacaatgtggcaaaaaatgccccggattctgccgcagaagactcctggggggctgcaacaccagcggagacaactgattctggtaacaaggagtggaaatcagatggatggggggcaaagtctggtaactggagcagccaaagaaataatcctgggagacccccaaggagaccagatgagaggggtccacctccaccaagacaacggttcgaactaacagttgcggagaagaacattcttctagaagttgaacctattaaattacgtgtgagaagcatcttccgtgaagcatgtgacggtgttagacttaatccagaagacgagaagtttatcctggagaaagttcttgagcaccacccggaaaagcaatccaaggtgtctggtgaaatcgactacctaacggtcaacaagcaccagactttccaggacactcggtgctttttcgtggtctccacagatggatcccaggcagatttctcctacctgaagtgcctggagaactttgtgaggaagagctacacggaggacgccgacacattctgcatgaagtacttaaggccccgtcgcaggcaggcaccaccagctgatgttgggacagcatcaggcgccccggatgaggttccaccgtcaaccgcagctgagacagagcaaggcactcctccagcccctcaggcagaggttccacaagagacttggggttctcccgcagtgcctctggaaggaggaactcacatcgccggaccagactcaacaggcgacgctgtgatcctaggggagcagcacgatctgactccggcttctccagctgtggcaccacaagtggcttctgagccagacacaaccgacggcacggggcttctaggaaaggctccgcaagctgactggggacccagattcgacgctgactgatatttaggctgtgtgaagctgccgcatgtaaaagccagacctgtgctctgagcaagggagcattcccttgctaagtcgtcagttaactccccttgacttcatctggagaggtggacaggtagtagcggcaaacattctagcccttagcggccgcttgctcgtcctcgtccgtttcgtctcgccctgatgggaaccatgtaaatccttgggaacaaagctaccccctgctgcctttaccgtatctagttggaccttccccactgttggaatctgtgagtccgtctgctgttaaatttttgatggtttctgggctgtggcttgccagcggtgatgccaaactctggaaacctagggatttgtttggtgcggtcgtttggttgtcaggtcgatcagcaaatgtatgcctttgtcctccagatatgtgcttgttgagctagtagatagtgttacattgcgtgcctttgttcaatggaagcccagtttgagatggagcacgtgttcgaaaatactcggtatcacttatgagcgtaaatgcgaaataaacaagggtaaaaaaca

SEQ ID NO: 42169 - DNA, 6610 bp, Zea Mays
ggaactcgcagcgttctccacgccagtcgcgcagtggggtcactaccctttaccattacctgctcacgggcacggcgcctctcatttcgtgacggagcaccggtgcgcctcgtcctcggctgaccggtcgtcgtccagttccacctccctgtcctgtctcctcccctcccctccctcctttctcacacgcgtacagtgaacttctcctcgtgttctccgaggcggagcaaaaccctcccttccccgcgctagggttttagcgcggccgcgacgggaggatcacggcggcccaaggagacggctagacggtcggtggacgccgccgagacgtggggcggcgccgtcgcgtattgaaatggaggaggatcactcggtgatactaatatctgaaggtgctattaaaagcatcaaacttagcctctctaccggagaagagatatgcacatactccataaacgagtgcccagtgacccatcctagccagcttggaaatccgttccttgggttgccacttgaagctgggaagtgtgaatcctgtggtgcctctgaaaatgacaaatgcgaaggccattttgggtacattgaactacctgtacccatataccatccatgtcatgtcactgaactgaggcaactattgagcttgatatgtctgaagtgccttcgaatcaagaaagggaaggtgaaacaaagtaatggaaaaggaaacgcggcaccaactttgtgctcttattgcagggatattccagccctgtctttgaaggaaatcaagacaacagatggtgcaattcgtttagagttgagagcacctcataataaacacatgacagaacgttcatggaactttcttgataaatatggatttcatcatggtggatgttctcaccataggacactgcttccagaagaggctctaaatatattgaagaaggttcctgatgatactaggagaaagctagctgcacggggatacattgttcagactgggtatgtgatgaagtaccttccagtacctccgaactgtctatatattccagagttcaccgatgggcagagcattatgtcatatgacatttcaatagctctgttgaagaaggttcttcagaaaatagaacagattaaaagatcaagatctggttccccaaactttgaatcacatgatgctgaatcatgtgatttgcagcttgcgattggccagtacatacgtctaaggggcactacaaggggccctcaagacaacaccaagcggtttactgttggcagtgctgattcagctgcattgtcaacaaaacagtggttagaaaagatgcggacactgtttatcagcaaagggtcaggtttttcatctcgcagcgttctgacaggagatccatatattgggctaggtgttgtagggcttccttctgaagttgcaaagagaatgacattcgaagagcaggtaactgacataaacattaacagattgcaagacgtggtagacaagggactctgtttgacctacagagatggtcaagctacatatgccatcactgttggatcaaaagggtacacaacacttaaagttggtcagactatcagtcggaggatagttgatggggatgttgtgtttcttaacaggccacccagcacacataagcattctctccaagctttctacgcatatgtgcatgatgaccatacagtcaaaatcaatcctctcatgtgtggccccttttctgctgactttgacggggattgcgtacacatatattatccacaatcgcttgctgcaaaagctgaagccttggagctttttagtgttgagaggcaactcattagttcgcacagtgggaaggttaatctccagctaggtaacgactccttggtagctatgaaggctatgtctcatacaaccatgttacacaaggaattagcaaaccagttggcaatgtttgtgccattttcacttcttgctcctgctgtaatcaagccagttccatcttggacaatatcacagatagtgcaaggtgcatttccagctaacctgacttgccaaggggacacacacttggttagggacagcacaatcataaggctggaccttggcaaagaatctgttcaggactcattccctgatttggtgtcctccatccttcgtgagaagggtccaaaagaagctctgcaatttctgaatgtgttggagccattgttgatggagtttttacttcttgacggtttgagtataagtctgcgggattttaatgttcccaaggctttattggaggaagcacaaaaggacattcgaaatcagtcccttattcttgagcagtctaggtgctctacaagtcaattcgtagaattccgagtcgaaaacaatttgaaaaatgtcaaacagcagatttcagattctgttgggaaattctctgaccttggtctgctgattgatccgaaaaaggaagcctcaatgtcaaaagtagttcaacaagttggttttgttggcttgcaactgtatcgtgaaggcaagttgtattcaagacgcttggtagaggactgcttcacaaactttgttaataaacacttggccattggagatgagtatcctccagaagcgtatggtcttgtccaaagttcatattttcatggtctcaatccttatgaagagttgatacatgctatatccactagagaagctatgatccgctcctctagaggtctgtcagaacctggaactttgttcaagaatttaatggccatcttgagggatgtagttatatgttatgatggaactgtgagaaacatttgtagcaattctatcattcaacttaagtatggggaagatgatgaaactgattcttcaagtgttgtacctcctggtgaacctgtgggtgtcttagccgccacagctatctcgaaccctgcatacaaggctgtcttggattcctcccaaagtaacaatgcttcatgggagtcaatgaaggaaattcttcagacaagaacttcctataaaaatgatgtgaaagatcggaaagtggtcctattcctgaatgattgctcttgcgcaaaaaaattctgcaaggaaagggctgcacttgcagtacaaagttgtcttaagagagtcacacttggggattgtgctactgatatctgcattgagcatcagaagcaaataaatttagatggaacatctgaagctgccccaactcttgtaggacatattcaccttgacaaggggcatttagaaaggataaacattagtactcaagacattctccaaaaatgtcaagaagtttctgggagatttggaaagaagaaaggacacctttgccacatctttaaaaaaattacttttgctacttgtgattgttcattcactcagatgccaatcgatggaaagctacataaggttccatgtgtgcagtttgctttttctgatgacattgtactatccgagtctattgagagagcagtgaatgtgatagctgactctgtctgctcagtgcttttagatacaattattaaaggtgatcctcgaattcaagcggcaaaagttatctgggttgaatcagatgcagcatcttgggtaaaacacacacggaaggtatcaaagggcgagtcagcattagaaatcattgttgaaaaagatgatgctgtaagcaatggtgatgcctggagaacagcaattgatgcctgcttacctgtacttaacctcattgacacacggaggtctattccatatggcattcaacaagtgagggaacttattggcatctcatgtgccttcgatcaagtggtgcagcggctttcaacgactgtaaaaatggttaataaaggagttcttaaagaccatttgatacttgtggcaaacagcatgacatgcactggaaatttgattgggttcaacattgctggctacaaggcaactttccgttcattaaaagttcaagtgcctttcaccgagtccactttgtttacccctatgaaatgctttgagaaggctgcagaaaaatgtgattctgattcattgggatgtgtggtctcatcgtccgcatggggcaagcatgcagcagttggtactgggtcatcttttcaaattctctggaatgaaaatcagctgaaaagcaacaaggagtatggggatgggttgtacgatttcttagcattggtcaggactgaccaagaaaagacagactacatgttcttggacgatgttgactatcttgtagaggagaatgcagcagatgacatgtgcttatctcctgagccagatgggacccttggtaagcctacctttgaggataattttgaagagcaaaatattcagaaaggcagctcatgggaaattggcataacaacgaactcaagttgggaacagaatgctagtgttgcgaatgattctggtgactggggaggctggagcgttgagaagccaacaggtgaggcaactgtatctggagaaccagctgaaacagatacttgggctgataagggtgctaaaatggaatcagatgcaggtgatggtaattgggaaaagtccagcactcctgaggcatcaaagaaaaatgactcatcagaaaatacatgggacaaaagaaaaggagatggaggtgatggtgcgtgggggaacaggtctgatgatggccatggcaattgggagcatcccagcaattggaatgggcagagtttggatgtagatcaggacacatggggaaacgccaggggaaaaaagaaggcagatggtaactactgtcaatgggaggagcagccaagcaattacaaacagaagaagacaaatgctgatcatgattcctcctataacaatgtgatgccgtcatcagaaattgcttggaatgctggagatggaactggaagaccaaatgccaagtctaatgcagaatccagttggggtgaggaagataagatggagtctgacgatcatccgaaagtcccaaaagaatcagacacatggaatacagggagatcaaatgaaagtccatgggataacactgatgcactgcaggattcctgggttaagagcgcagctcgcaataacaacactcaggatggttcatgggataaagtagtatctatgaaggatcttgattcactccaagattcatggagtaaggcgacaatccagacgaatgatgcacagaatgattcttgggacaatgtggcaaaaaatgccccggattctgccgcagaagactcctggggggctgcaacaccagcggagacaactgattctggtaacaaggagtggaaatcagatggatggggggcaaagtctggtaactggagcagccaaagaaataatcctgggagacccccaaggagaccagatgagaggggtccacctccaccaagacaacggttcgaactaacagttgcggagaagaacattcttctagaagttgaacctattaaattacgtgtgagaagcatcttccgtgaagcatgtgacggtgttagacttaatccagaagacgagaagtttatcctggagaaagttcttgagcaccacccggaaaagcaatccaaggtgtctggtgaaatcgactacctaacggtcaacaagcaccagactttccaggacactcggtgctttttcgtggtctccacagatggatcccaggcagatttctcctacctgaagtgcctggagaactttgtgaggaagagctacacggaggacgccgacacattctgcatgaagtacttaaggccccgtcgcaggcaggcaccaccagctgatgttgggacagcatcaggcgccccggatgaggttccaccgtcaaccgcagctgagacagagcaaggcactcctccagcccctcaggcagaggttccacaagagacttggggttctcccgcagtgcctctggaaggaggaactcacatcgccggaccagactcaacaggcgacgctgtgatcctaggggagcagcacgatctgactccggcttctccagctgtggcaccacaagtggcttctgagccagacacaaccgacggcacggggcttctaggaaaggctccgcaagctgactggggacccagattcgacgctgactgatatttaggctgtgtgaagctgccgcatgtaaaagccagacctgtgctctgagcaagggagcattcccttgctaagtcgtcagttaactccccttgacttcatctggagaggtggacaggtagtagcggcaaacattctagcccttagcggccgcttgctcgtcctcgtccgtttcgtctcgccctgatgggaaccatgtaaatccttgggaacaaagctaccccctgctgcctttaccgtatctagttggaccttccccactgttggaatctgtgagtccgtctgctgttaaatttttgatggtttctgggctgtggcttgccagcggtgatgccaaactctggaaacctagggatttgtttggtgcggtcgtttggttgtcaggtcgatcagcaaatgtatgcctttgtcctccagatatgtgcttgttgagctagtagatagtgttacattgcgtgcctttgttcaatggaagcccagtttgagatggagcacgtgttcgaaaatactcggtatcacttatgagcgtaaatgcgaaataaacaagggtaaaaaaca

SEQ ID NO: 42170 - DNA, 6715 bp, Zea Mays
ggaactcgcagcgttctccacgccagtcgcgcagtggggtcactaccctttaccattacctgctcacgggcacggcgcctctcatttcgtgacggagcaccggtgcgcctcgtcctcggctgaccggtcgtcgtccagttccacctccctgtcctgtctcctcccctcccctccctcctttctcacacgcgtacagtgaacttctcctcgtgttctccgaggcggagcaaaaccctcccttccccgcgctagggttttagcgcggccgcgacgggaggatcacggcggcccaaggagacggctagacggtcggtggacgccgccgagacgtggggcggcgccgtcgcgtattgaaatggaggaggatcactcggtgatactaatatctgaaggtgctattaaaagcatcaaacttagcctctctaccggagaagagatatgcacatactccataaacgagtgcccagtgacccatcctagccagcttggaaatccgttccttgggttgccacttgaagctgggaagtgtgaatcctgtggtgcctctgaaaatgacaaatgcgaaggccattttgggtacattgaactacctgtacccatataccatccatgtcatgtcactgaactgaggcaactattgagcttgatatgtctgaagtgccttcgaatcaagaaagggaaggtgaaacaaagtaatggaaaaggaaacgcggcaccaactttgtgctcttattgcagggatattccagccctgtctttgaaggaaatcaagacaacagatggtgcaattcgtttagagttgagagcacctcataataaacacatgacagaacgttcatggaactttcttgataaatatggatttcatcatggtggatgttctcaccataggacactgcttccagaagaggctctaaatatattgaagaaggttcctgatgatactaggagaaagctagctgcacggggatacattgttcagactgggacatttcaatagctctgttgaagaaggttcttcagaaaatagaacagattaaaagatcaagatctggttccccaaactttgaatcacatgatgctgaatcatgtgatttgcagcttgcgattggccagtacatacgtctaaggggcactacaaggggccctcaagacaacaccaagcggtttactgttggcagtgctgattcagctgcattgtcaacaaaacagtggttagaaaagatgcggacactgtttatcagcaaagggtcaggtttttcatctcgcagcgttctgacaggagatccatatattgggctaggtgttgtagggcttccttctgaagttgcaaagagaatgacattcgaagagcaggtaactgacataaacattaacagattgcaagacgtggtagacaagggactctgtttgacctacagagatggtcaagctacatatgccatcactgttggatcaaaagggtacacaacacttaaagttggtcagactatcagtcggaggatagttgatggggatgttgtgtttcttaacaggccacccagcacacataagcattctctccaagctttctacgcatatgtgcatgatgaccatacagtcaaaatcaatcctctcatgtgtggccccttttctgctgactttgacggggattgcgtacacatatattatccacaatcgcttgctgcaaaagctgaagccttggagctttttagtgttgagaggcaactcattagttcgcacagtgggaaggttaatctccagctaggtaacgactccttggtagctatgaaggctatgtctcatacaaccatgttacacaaggaattagcaaaccagttggcaatgtttgtgccattttcacttcttgctcctgctgtaatcaagccagttccatcttggacaatatcacagatagtgcaaggtgcatttccagctaacctgacttgccaaggggacacacacttggttagggacagcacaatcataaggctggaccttggcaaagaatctgttcaggactcattccctgatttggtgtcctccatccttcgtgagaagggtccaaaagaagctctgcaatttctgaatgtgttggagccattgttgatggagtttttacttcttgacggtttgagtataagtctgcgggattttaatgttcccaaggctttattggaggaagcacaaaaggacattcgaaatcagtcccttattcttgagcagtctaggtgctctacaagtcaattcgtagaattccgagtcgaaaacaatttgaaaaatgtcaaacagcagatttcagattctgttgggaaattctctgaccttggtctgctgattgatccgaaaaaggaagcctcaatgtcaaaagtagttcaacaagttggttttgttggcttgcaactgtatcgtgaaggcaagttgtattcaagacgcttggtagaggactgcttcacaaactttgttaataaacacttggccattggagatgagtatcctccagaagcgtatggtcttgtccaaagttcatattttcatggtctcaatccttatgaagagttgatacatgctatatccactagagaagctatgatccgctcctctagaggtctgtcagaacctggaactttgttcaagaatttaatggccatcttgagggatgtagttatatgttatgatggaactgtgagaaacatttgtagcaattctatcattcaacttaagtatggggaagatgatgaaactgattcttcaagtgttgtacctcctggtgaacctgtgggtgtcttagccgccacagctatctcgaaccctgcatacaaggctgtcttggattcctcccaaagtaacaatgcttcatgggagtcaatgaaggtagtaatgttataaatatttcttgtcatttaatttagaggccttgttgttactgcttaataagtttgttttattattatcacaggaaattcttcagacaagaacttcctataaaaatgatgtgaaagatcggaaagtggtcctattcctgaatgattgctcttgcgcaaaaaaattctgcaaggaaagggctgcacttgcagtacaaagttgtcttaagagagtcacacttggggattgtgctactgatatctgcattgagcatcagaagcaaataaatttagatggaacatctgaagctgccccaactcttgtaggacatattcaccttgacaaggggcatttagaaaggataaacattagtactcaagacattctccaaaaatgtcaagaagtttctgggagatttggaaagaagaaaggacacctttgccacatctttaaaaaaattacttttgctacttgtgattgttcattcactcagatgccaatcgatggaaagctacataaggttccatgtgtgcagtttgctttttctgatgacattgtactatccgagtctattgagagagcagtgaatgtgatagctgactctgtctgctcagtgcttttagatacaattattaaaggtgatcctcgaattcaagcggcaaaagttatctgggttgaatcagatgcagcatcttgggtaaaacacacacggaaggtatcaaagggcgagtcagcattagaaatcattgttgaaaaagatgatgctgtaagcaatggtgatgcctggagaacagcaattgatgcctgcttacctgtacttaacctcattgacacacggaggtctattccatatggcattcaacaagtgagggaacttattggcatctcatgtgccttcgatcaagtggtgcagcggctttcaacgactgtaaaaatggttaataaaggagttcttaaagaccatttgatacttgtggcaaacagcatgacatgcactggaaatttgattgggttcaacattgctggctacaaggcaactttccgttcattaaaagttcaagtgcctttcaccgagtccactttgtttacccctatgaaatgctttgagaaggctgcagaaaaatgtgattctgattcattgggatgtgtggtctcatcgtccgcatggggcaagcatgcagcagttggtactgggtcatcttttcaaattctctggaatgaaaatcagctgaaaagcaacaaggagtatggggatgggttgtacgatttcttagcattggtcaggactgaccaagaaaagacagactacatgttcttggacgatgttgactatcttgtagaggagaatgcagcagatgacatgtgcttatctcctgagccagatgggacccttggtaagcctacctttgaggataattttgaagagcaaaatattcagaaaggcagctcatgggaaattggcataacaacgaactcaagttgggaacagaatgctagtgttgcgaatgattctggtgactggggaggctggagtagtggaggtggagctgctgcaaagccagcagatcaagataattcatgggaagtgcatgctaaggtgcaggacaattccaccactgattggggaggctggagcgttgagaagccaacaggtgaggcaactgtatctggagaaccagctgaaacagatacttgggctgataagggtgctaaaatggaatcagatgcaggtgatggtaattgggaaaagtccagcactcctgaggcatcaaagaaaaatgactcatcagaaaatacatgggacaaaagaaaaggagatggaggtgatggtgcgtgggggaacaggtctgatgatggccatggcaattgggagcatcccagcaattggaatgggcagagtttggatgtagatcaggacacatggggaaacgccaggggaaaaaagaaggcagatggtaactactgtcaatgggaggagcagccaagcaattacaaacagaagaagacaaatgctgatcatgattcctcctataacaatgtgatgccgtcatcagaaattgcttggaatgctggagatggaactggaagaccaaatgccaagtctaatgcagaatccagttggggtgaggaagataagatggagtctgacgatcatccgaaagtcccaaaagaatcagacacatggaatacagggagatcaaatgaaagtccatgggataacactgatgcactgcaggattcctgggttaagagcgcagctcgcaataacaacactcaggatggttcatgggataaagtagtatctatgaaggatcttgattcactccaagattcatggagtaaggcgacaatccagacgaatgatgcacagaatgattcttgggacaatgtggcaaaaaatgccccggattctgccgcagaagactcctggggggctgcaacaccagcggagacaactgattctggtaacaaggagtggaaatcagatggatggggggcaaagtctggtaactggagcagccaaagaaataatcctgggagacccccaaggagaccagatgagaggggtccacctccaccaagacaacggttcgaactaacagttgcggagaagaacattcttctagaagttgaacctattaaattacgtgtgagaagcatcttccgtgaagcatgtgacggtgttagacttaatccagaagacgagaagtttatcctggagaaagttcttgagcaccacccggaaaagcaatccaaggtgtctggtgaaatcgactacctaacggtcaacaagcaccagactttccaggacactcggtgctttttcgtggtctccacagatggatcccaggcagatttctcctacctgaagtgcctggagaactttgtgaggaagagctacacggaggacgccgacacattctgcatgaagtacttaaggccccgtcgcaggcaggcaccaccagctgatgttgggacagcatcaggcgccccggatgaggttccaccgtcaaccgcagctgagacagagcaaggcactcctccagcccctcaggcagaggttccacaagagacttggggttctcccgcagtgcctctggaaggaggaactcacatcgccggaccagactcaacaggcgacgctgtgatcctaggggagcagcacgatctgactccggcttctccagctgtggcaccacaagtggcttctgagccagacacaaccgacggcacggggcttctaggaaaggctccgcaagctgactggggacccagattcgacgctgactgatatttaggctgtgtgaagctgccgcatgtaaaagccagacctgtgctctgagcaagggagcattcccttgctaagtcgtcagttaactccccttgacttcatctggagaggtggacaggtagtagcggcaaacattctagcccttagcggccgcttgctcgtcctcgtccgtttcgtctcgccctgatgggaaccatgtaaatccttgggaacaaagctaccccctgctgcctttaccgtatctagttggaccttccccactgttggaatctgtgagtccgtctgctgttaaatttttgatggtttctgggctgtggcttgccagcggtgatgccaaactctggaaacctagggatttgtttggtgcggtcgtttggttgtcaggtcgatcagcaaatgtatgcctttgtcctccagatatgtgcttgttgagctagtagatagtgttacattgcgtgcctttgttcaatggaagcccagtttgagatggagcacgtgttcgaaaatactcggtatcacttatgagcgtaaatgcgaaataaacaagggtaaaaaaca

SEQ ID NO: 42171 - DNA, 6706 bp, Zea Mays
ctttaccattacctgctcacgggcacggcgcctctcatttcgtgacggagcaccggtgcgcctcgtcctcggctgaccggtcgtcgtccagttccacctccctgtcctgtctcctcccctcccctccctcctttctcacacgcgtacagtgaacttctcctcgtgttctccgaggcggagcaaaaccctcccttccccgcgctagggttttagcgcggccgcgacgggaggatcacggcggcccaaggagacggctagacggtcggtggacgccgccgagacgtggggcggcgccgtcgcgtattgaaatggaggaggatcactcggtgatactaatatctgaaggtgctattaaaagcatcaaacttagcctctctaccggagaagagatatgcacatactccataaacgagtgcccagtgacccatcctagccagcttggaaatccgttccttgggttgccacttgaagctgggaagtgtgaatcctgtggtgcctctgaaaatgacaaatgcgaaggccattttgggtacattgaactacctgtacccatataccatccatgtcatgtcactgaactgaggcaactattgagcttgatatgtctgaagtgccttcgaatcaagaaagggaaggtgaaacaaagtaatggaaaaggaaacgcggcaccaactttgtgctcttattgcagggatattccagccctgtctttgaaggaaatcaagacaacagatggtgcaattcgtttagagttgagagcacctcataataaacacatgacagaacgttcatggaactttcttgataaatatggatttcatcatggtggatgttctcaccataggacactgcttccagaagaggctctaaatatattgaagaaggttcctgatgatactaggagaaagctagctgcacggggatacattgttcagactgggtatgtgatgaagtaccttccagtacctccgaactgtctatatattccagagttcaccgatgggcagagcattatgtcatatgacatttcaatagctctgttgaagaaggttcttcagaaaatagaacagattaaaagatcaagatctggttccccaaactttgaatcacatgatgctgaatcatgtgatttgcagcttgcgattggccagtacatacgtctaaggggcactacaaggggccctcaagacaacaccaagcggtttactgttggcagtgctgattcagctgcattgtcaacaaaacagtggttagaaaagatgcggacactgtttatcagcaaagggtcaggtttttcatctcgcagcgttctgacaggagatccatatattgggctaggtgttgtagggcttccttctgaagttgcaaagagaatgacattcgaagagcaggtaactgacataaacattaacagattgcaagacgtggtagacaagggactctgtttgacctacagagatggtcaagctacatatgccatcactgttggatcaaaagggtacacaacacttaaagttggtcagactatcagtcggaggatagttgatggggatgttgtgtttcttaacaggccacccagcacacataagcattctctccaagctttctacgcatatgtgcatgatgaccatacagtcaaaatcaatcctctcatgtgtggccccttttctgctgactttgacggggattgcgtacacatatattatccacaatcgcttgctgcaaaagctgaagccttggagctttttagtgttgagaggcaactcattagttcgcacagtgggaaggttaatctccagctaggtaacgactccttggtagctatgaaggctatgtctcatacaaccatgttacacaaggaattagcaaaccagttggcaatgtttgtgccattttcacttcttgctcctgctgtaatcaagccagttccatcttggacaatatcacagatagtgcaaggtgcatttccagctaacctgacttgccaaggggacacacacttggttagggacagcacaatcataaggctggaccttggcaaagaatctgttcaggactcattccctgatttggtgtcctccatccttcgtgagaagggtccaaaagaagctctgcaatttctgaatgtgttggagccattgttgatggagtttttacttcttgacggtttgagtataagtctgcgggattttaatgttcccaaggctttattggaggaagcacaaaaggacattcgaaatcagtcccttattcttgagcagtctaggtgctctacaagtcaattcgtagaattccgagtcgaaaacaatttgaaaaatgtcaaacagcagatttcagattctgttgggaaattctctgaccttggtctgctgattgatccgaaaaaggaagcctcaatgtcaaaagtagttcaacaagttggttttgttggcttgcaactgtatcgtgaaggcaagttgtattcaagacgcttggtagaggactgcttcacaaactttgttaataaacacttggccattggagatgagtatcctccagaagcgtatggtcttgtccaaagttcatattttcatggtctcaatccttatgaagagttgatacatgctatatccactagagaagctatgatccgctcctctagaggtctgtcagaacctggaactttgttcaagaatttaatggccatcttgagggatgtagttatatgttatgatggaactgtgagaaacatttgtagcaattctatcattcaacttaagtatggggaagatgatgaaactgattcttcaagtgttgtacctcctggtgaacctgtgggtgtcttagccgccacagctatctcgaaccctgcatacaaggctgtcttggattcctcccaaagtaacaatgcttcatgggagtcaatgaaggaaattcttcagacaagaacttcctataaaaatgatgtgaaagatcggaaagtggtcctattcctgaatgattgctcttgcgcaaaaaaattctgcaaggaaagggctgcacttgcagtacaaagttgtcttaagagagtcacacttggggattgtgctactgatatctgcattgagcatcagaagcaaataaatttagatggaacatctgaagctgccccaactcttgtaggacatattcaccttgacaaggggcatttagaaaggataaacattagtactcaagacattctccaaaaatgtcaagaagtttctgggagatttggaaagaagaaaggacacctttgccacatctttaaaaaaattacttttgctacttgtgattgttcattcactcagatgccaatcgatggaaagctacataaggttccatgtgtgcagtttgctttttctgatgacattgtactatccgagtctattgagagagcagtgaatgtgatagctgactctgtctgctcagtgcttttagatacaattattaaaggtgatcctcgaattcaagcggcaaaagttatctgggttgaatcagatgcagcatcttgggtaaaacacacacggaaggtatcaaagggcgagtcagcattagaaatcattgttgaaaaagatgatgctgtaagcaatggtgatgcctggagaacagcaattgatgcctgcttacctgtacttaacctcattgacacacggaggtctattccatatggcattcaacaattttgactgcagtgatacggtgataccccaaggacacttattccccacccaaggacttctggggattggtagatctttccttgtttaggcggctttcaacgactgtaaaaatggttaataaaggagttcttaaagaccatttgatacttgtggcaaacagcatgacatgcactggaaatttgattgggttcaacattgctggctacaaggcaactttccgttcattaaaagttcaagtgcctttcaccgagtccactttgtttacccctatgaaatgctttgagaaggctgcagaaaaatgtgattctgattcattgggatgtgtggtctcatcgtccgcatggggcaagcatgcagcagttggtactgggtcatcttttcaaattctctggaatgaaaatcagctgaaaagcaacaaggagtatggggatgggttgtacgatttcttagcattggtcaggactgaccaagaaaagacagactacatgttcttggacgatgttgactatcttgtagaggagaatgcagcagatgacatgtgcttatctcctgagccagatgggacccttggtaagcctacctttgaggataattttgaagagcaaaatattcagaaaggcagctcatgggaaattggcataacaacgaactcaagttgggaacagaatgctagtgttgcgaatgattctggtgactggggaggctggagtagtggaggtggagctgctgcaaagccagcagatcaagataattcatgggaagtgcatgctaaggtgcaggacaattccaccactgattggggaggctggagcgttgagaagccaacaggtgaggcaactgtatctggagaaccagctgaaacagatacttgggctgataagggtgctaaaatggaatcagatgcaggtgatggtaattgggaaaagtccagcactcctgaggcatcaaagaaaaatgactcatcagaaaatacatgggacaaaagaaaaggagatggaggtgatggtgcgtgggggaacaggtctgatgatggccatggcaattgggagcatcccagcaattggaatgggcagagtttggatgtagatcaggacacatggggaaacgccaggggaaaaaagaaggcagatggtaactactgtcaatgggaggagcagccaagcaattacaaacagaagaagacaaatgctgatcatgattcctcctataacaatgtgatgccgtcatcagaaattgcttggaatgctggagatggaactggaagaccaaatgccaagtctaatgcagaatccagttggggtgaggaagataagatggagtctgacgatcatccgaaagtcccaaaagaatcagacacatggaatacagggagatcaaatgaaagtccatgggataacactgatgcactgcaggattcctgggttaagagcgcagctcgcaataacaacactcaggatggttcatgggataaagtagtatctatgaaggatcttgattcactccaagattcatggagtaaggcgacaatccagacgaatgatgcacagaatgattcttgggacaatgtggcaaaaaatgccccggattctgccgcagaagactcctggggggctgcaacaccagcggagacaactgattctggtaacaaggagtggaaatcagatggatggggggcaaagtctggtaactggagcagccaaagaaataatcctgggagacccccaaggagaccagatgagaggggtccacctccaccaagacaacggttcgaactaacagttgcggagaagaacattcttctagaagttgaacctattaaattacgtgtgagaagcatcttccgtgaagcatgtgacggtgttagacttaatccagaagacgagaagtttatcctggagaaagttcttgagcaccacccggaaaagcaatccaaggtgtctggtgaaatcgactacctaacggtcaacaagcaccagactttccaggacactcggtgctttttcgtggtctccacagatggatcccaggcagatttctcctacctgaagtgcctggagaactttgtgaggaagagctacacggaggacgccgacacattctgcatgaagtacttaaggccccgtcgcaggcaggcaccaccagctgatgttgggacagcatcaggcgccccggatgaggttccaccgtcaaccgcagctgagacagagcaaggcactcctccagcccctcaggcagaggttccacaagagacttggggttctcccgcagtgcctctggaaggaggaactcacatcgccggaccagactcaacaggcgacgctgtgatcctaggggagcagcacgatctgactccggcttctccagctgtggcaccacaagtggcttctgagccagacacaaccgacggcacggggcttctaggaaaggctccgcaagctgactggggacccagattcgacgctgactgatatttaggctgtgtgaagctgccgcatgtaaaagccagacctgtgctctgagcaagggagcattcccttgctaagtcgtcagttaactccccttgacttcatctggagaggtggacaggtagtagcggcaaacattctagcccttagcggccgcttgctcgtcctcgtccgtttcgtctcgccctgatgggaaccatgtaaatccttgggaacaaagctaccccctgctgcctttaccgtatctagttggaccttccccactgttggaatctgtgagtccgtctgctgttaaatttttgatggtttctgggctgtggcttgccagcggtgatgccaaactctggaaacctagggatttgtttggtgcggtcgtttggttgtcaggtcgatcagcaaatgtatgcctttgtcctccagatatgtgcttgttgagctagtagatagtgttacattgcgtgcctttgttcaatggaagcccagtttgagatggagcacgtgttcgaaaatactcggtatcacttatgagcgtaaatgcgaaataaacaagggtaaaaaaca

SEQ ID NO: 42172 - DNA, 6643 bp, Zea Mays
cggcgcctctcatttcgtgacggagcaccggtgcgcctcgtcctcggctgaccggtcgtcgtccagttccacctccctgtcctgtctcctcccctcccctccctcctttctcacacgcgtacagtgaacttctcctcgtgttctccgaggcggagcaaaaccctcccttccccgcgctagggttttagcgcggccgcgacgggaggatcacggcggcccaaggagacggctagacggtcggtggacgccgccgagacgtggggcggcgccgtcgcgtattgaaatggaggaggatcactcggtgatactaatatctgaaggtgctattaaaagcatcaaacttagcctctctaccggagaagagatatgcacatactccataaacgagtgcccagtgacccatcctagccagcttggaaatccgttccttgggttgccacttgaagctgggaagtgtgaatcctgtggtgcctctgaaaatgacaaatgcgaaggccattttgggtacattgaactacctgtacccatataccatccatgtcatgtcactgaactgaggcaactattgagcttgatatgtctgaagtgccttcgaatcaagaaagggaaggtgaaacaaagtaatggaaaaggaaacgcggcaccaactttgtgctcttattgcagggatattccagccctgtctttgaaggaaatcaagacaacagatggtgcaattcgtttagagttgagagcacctcataataaacacatgacagaacgttcatggaactttcttgataaatatggatttcatcatggtggatgttctcaccataggacactgcttccagaagaggctctaaatatattgaagaaggttcctgatgatactaggagaaagctagctgcacggggatacattgttcagactgggtatgtgatgaagtaccttccagtacctccgaactgtctatatattccagagttcaccgatgggcagagcattatgtcatatgacatttcaatagctctgttgaagaaggttcttcagaaaatagaacagattaaaagatcaagatctggttccccaaactttgaatcacatgatgctgaatcatgtgatttgcagcttgcgattggccagtacatacgtctaaggggcactacaaggtagggccctcaagacaacaccaagcggtttactgttggcagtgctgattcagctgcattgtcaacaaaacagtggttagaaaagatgcggacactgtttatcagcaaagggtcaggtttttcatctcgcagcgttctgacaggagatccatatattgggctaggtgttgtagggcttccttctgaagttgcaaagagaatgacattcgaagagcaggtaactgacataaacattaacagattgcaagacgtggtagacaagggactctgtttgacctacagagatggtcaagctacatatgccatcactgttggatcaaaagggtacacaacacttaaagttggtcagactatcagtcggaggatagttgatggggatgttgtgtttcttaacaggccacccagcacacataagcattctctccaagctttctacgcatatgtgcatgatgaccatacagtcaaaatcaatcctctcatgtgtggccccttttctgctgactttgacggggattgcgtacacatatattatccacaatcgcttgctgcaaaagctgaagccttggagctttttagtgttgagaggcaactcattagttcgcacagtgggaaggttaatctccagctaggtaacgactccttggtagctatgaaggctatgtctcatacaaccatgttacacaaggaattagcaaaccagttggcaatgtttgtgccattttcacttcttgctcctgctgtaatcaagccagttccatcttggacaatatcacagatagtgcaaggtgcatttccagctaacctgacttgccaaggggacacacacttggttagggacagcacaatcataaggctggaccttggcaaagaatctgttcaggactcattccctgatttggtgtcctccatccttcgtgagaagggtccaaaagaagctctgcaatttctgaatgtgttggagccattgttgatggagtttttacttcttgacggtttgagtataagtctgcgggattttaatgttcccaaggctttattggaggaagcacaaaaggacattcgaaatcagtcccttattcttgagcagtctaggtgctctacaagtcaattcgtagaattccgagtcgaaaacaatttgaaaaatgtcaaacagcagatttcagattctgttgggaaattctctgaccttggtctgctgattgatccgaaaaaggaagcctcaatgtcaaaagtagttcaacaagttggttttgttggcttgcaactgtatcgtgaaggcaagttgtattcaagacgcttggtagaggactgcttcacaaactttgttaataaacacttggccattggagatgagtatcctccagaagcgtatggtcttgtccaaagttcatattttcatggtctcaatccttatgaagagttgatacatgctatatccactagagaagctatgatccgctcctctagaggtctgtcagaacctggaactttgttcaagaatttaatggccatcttgagggatgtagttatatgttatgatggaactgtgagaaacatttgtagcaattctatcattcaacttaagtatggggaagatgatgaaactgattcttcaagtgttgtacctcctggtgaacctgtgggtgtcttagccgccacagctatctcgaaccctgcatacaaggctgtcttggattcctcccaaagtaacaatgcttcatgggagtcaatgaaggaaattcttcagacaagaacttcctataaaaatgatgtgaaagatcggaaagtggtcctattcctgaatgattgctcttgcgcaaaaaaattctgcaaggaaagggctgcacttgcagtacaaagttgtcttaagagagtcacacttggggattgtgctactgatatctgcattgagcatcagaagcaaataaatttagatggaacatctgaagctgccccaactcttgtaggacatattcaccttgacaaggggcatttagaaaggataaacattagtactcaagacattctccaaaaatgtcaagaagtttctgggagatttggaaagaagaaaggacacctttgccacatctttaaaaaaattacttttgctacttgtgattgttcattcactcagatgccaatcgatggaaagctacataaggttccatgtgtgcagtttgctttttctgatgacattgtactatccgagtctattgagagagcagtgaatgtgatagctgactctgtctgctcagtgcttttagatacaattattaaaggtgatcctcgaattcaagcggcaaaagttatctgggttgaatcagatgcagcatcttgggtaaaacacacacggaaggtatcaaagggcgagtcagcattagaaatcattgttgaaaaagatgatgctgtaagcaatggtgatgcctggagaacagcaattgatgcctgcttacctgtacttaacctcattgacacacggaggtctattccatatggcattcaacaagtgagggaacttattggcatctcatgtgccttcgatcaagtggtgcagcggctttcaacgactgtaaaaatggttaataaaggagttcttaaagaccatttgatacttgtggcaaacagcatgacatgcactggaaatttgattgggttcaacattgctggctacaaggcaactttccgttcattaaaagttcaagtgcctttcaccgagtccactttgtttacccctatgaaatgctttgagaaggctgcagaaaaatgtgattctgattcattgggatgtgtggtctcatcgtccgcatggggcaagcatgcagcagttggtactgggtcatcttttcaaattctctggaatgaaaatcagctgaaaagcaacaaggagtatggggatgggttgtacgatttcttagcattggtcaggactgaccaagaaaagacagactacatgttcttggacgatgttgactatcttgtagaggagaatgcagcagatgacatgtgcttatctcctgagccagatgggacccttggtaagcctacctttgaggataattttgaagagcaaaatattcagaaaggcagctcatgggaaattggcataacaacgaactcaagttgggaacagaatgctagtgttgcgaatgattctggtgactggggaggctggagtagtggaggtggagctgctgcaaagccagcagatcaagataattcatgggaagtgcatgctaaggtgcaggacaattccaccactgattggggaggctggagcgttgagaagccaacaggtgaggcaactgtatctggagaaccagctgaaacagatacttgggctgataagggtgctaaaatggaatcagatgcaggtgatggtaattgggaaaagtccagcactcctgaggcatcaaagaaaaatgactcatcagaaaatacatgggacaaaagaaaaggagatggaggtgatggtgcgtgggggaacaggtctgatgatggccatggcaattgggagcatcccagcaattggaatgggcagagtttggatgtagatcaggacacatggggaaacgccaggggaaaaaagaaggcagatggtaactactgtcaatgggaggagcagccaagcaattacaaacagaagaagacaaatgctgatcatgattcctcctataacaatgtgatgccgtcatcagaaattgcttggaatgctggagatggaactggaagaccaaatgccaagtctaatgcagaatccagttggggtgaggaagataagatggagtctgacgatcatccgaaagtcccaaaagaatcagacacatggaatacagggagatcaaatgaaagtccatgggataacactgatgcactgcaggattcctgggttaagagcgcagctcgcaataacaacactcaggatggttcatgggataaagtagtatctatgaaggatcttgattcactccaagattcatggagtaaggcgacaatccagacgaatgatgcacagaatgattcttgggacaatgtggcaaaaaatgccccggattctgccgcagaagactcctggggggctgcaacaccagcggagacaactgattctggtaacaaggagtggaaatcagatggatggggggcaaagtctggtaactggagcagccaaagaaataatcctgggagacccccaaggagaccagatgagaggggtccacctccaccaagacaacggttcgaactaacagttgcggagaagaacattcttctagaagttgaacctattaaattacgtgtgagaagcatcttccgtgaagcatgtgacggtgttagacttaatccagaagacgagaagtttatcctggagaaagttcttgagcaccacccggaaaagcaatccaaggtgtctggtgaaatcgactacctaacggtcaacaagcaccagactttccaggacactcggtgctttttcgtggtctccacagatggatcccaggcagatttctcctacctgaagtgcctggagaactttgtgaggaagagctacacggaggacgccgacacattctgcatgaagtacttaaggccccgtcgcaggcaggcaccaccagctgatgttgggacagcatcaggcgccccggatgaggttccaccgtcaaccgcagctgagacagagcaaggcactcctccagcccctcaggcagaggttccacaagagacttggggttctcccgcagtgcctctggaaggaggaactcacatcgccggaccagactcaacaggcgacgctgtgatcctaggggagcagcacgatctgactccggcttctccagctgtggcaccacaagtggcttctgagccagacacaaccgacggcacggggcttctaggaaaggctccgcaagctgactggggacccagattcgacgctgactgatatttaggctgtgtgaagctgccgcatgtaaaagccagacctgtgctctgagcaagggagcattcccttgctaagtcgtcagttaactccccttgacttcatctggagaggtggacaggtagtagcggcaaacattctagcccttagcggccgcttgctcgtcctcgtccgtttcgtctcgccctgatgggaaccatgtaaatccttgggaacaaagctaccccctgctgcctttaccgtatctagttggaccttccccactgttggaatctgtgagtccgtctgctgttaaatttttgatggtttctgggctgtggcttgccagcggtgatgccaaactctggaaacctagggatttgtttggtgcggtcgtttggttgtcaggtcgatcagcaaatgtatgcctttgtcctccagatatgtgcttgttgagctagtagatagtgttacattgcgtgcctttgttcaatggaagcccagtttgagatggagcacgtgttcgaaaatactcggtatcacttatgagcgtaaatgcgaaataaacaagggtaaaaaaca

SEQ ID NO: 42173 - DNA, 6641 bp, Zea Mays
ctgtcctgtctcctcccctcccctccctcctttctcacacgcgtacagtgaacttctcctcgtgttctccgaggcggagcaaaaccctcccttccccgcgctagggttttagcgcggccgcgacgggaggatcacggcggcccaaggagacggctagacggtcggtggacgccgccgagacgtggggcggcgccgtcgcgtattggaggatcactcggtgatactaatatctgaaggtgctattaaaagcatcaaacttagcctctctaccggagaagagatatgcacatactccataaacgagtgcccagtgacccatcctagccagcttggaaatccgttccttgggttgccacttgaagctgggaagtgtgaatcctgtggtgcctctgaaaatgacaaatgcgaaggccattttgggtacattgaactacctgtacccatataccatccatgtcatgtcactgaactgaggcaactattgagcttgatatgtctgaagtgccttcgaatcaagaaagggaaggtgaaacaaagtaatggaaaaggaaacgcggcaccaactttgtgctcttattgcagggatattccagccctgtctttgaaggaaatcaagacaacagatggtgcaattcgtttagagttgagagcacctcataataaacacatgacagaacgttcatggaactttcttgataaatatggatttcatcatggtggatgttctcaccataggacactgcttccagaagaggctctaaatatattgaagaaggttcctgatgatactaggagaaagctagctgcacggggatacattgttcagactgggtatgtgatgaagtaccttccagtacctccgaactgtctatatattccagagttcaccgatgggcagagcattatgtcatatgacatttcaatagctctgttgaagaaggttcttcagaaaatagaacagattaaaagatcaagatctggttccccaaactttgaatcacatgatgctgaatcatgtgatttgcagcttgcgattggccagtacatacgtctaaggggcactacaaggggccctcaagacaacaccaagcggtttactgttggcagtgctgattcagctgcattgtcaacaaaacagtggttagaaaagatgcggacactgtttatcagcaaagggtcaggtttttcatctcgcagcgttctgacaggagatccatatattgggctaggtgttgtagggcttccttctgaagttgcaaagagaatgacattcgaagagcaggtaactgacataaacattaacagattgcaagacgtggtagacaagggactctgtttgacctacagagatggtcaagctacatatgccatcactgttggatcaaaagggtacacaacacttaaagttggtcagactatcagtcggaggatagttgatggggatgttgtgtttcttaacaggccacccagcacacataagcattctctccaagctttctacgcatatgtgcatgatgaccatacagtcaaaatcaatcctctcatgtgtggccccttttctgctgactttgacggggattgcgtacacatatattatccacaatcgcttgctgcaaaagctgaagccttggagctttttagtgttgagaggcaactcattagttcgcacagtgggaaggttaatctccagctaggtaacgactccttggtagctatgaaggctatgtctcatacaaccatgttacacaaggaattagcaaaccagttggcaatgtttgtgccattttcacttcttgctcctgctgtaatcaagccagttccatcttggacaatatcacagatagtgcaaggtgcatttccagctaacctgacttgccaaggggacacacacttggttagggacagcacaatcataaggctggaccttggcaaagaatctgttcaggactcattccctgatttggtgtcctccatccttcgtgagaagggtccaaaagaagctctgcaatttctgaatgtgttggagccattgttgatggagtttttacttcttgacggtttgagtataagtctgcgggattttaatgttcccaaggctttattggaggaagcacaaaaggacattcgaaatcagtcccttattcttgagcagtctaggtgctctacaagtcaattcgtagaattccgagtcgaaaacaatttgaaaaatgtcaaacagcagatttcagattctgttgggaaattctctgaccttggtctgctgattgatccgaaaaaggaagcctcaatgtcaaaagtagttcaacaagttggttttgttggcttgcaactgtatcgtgaaggcaagttgtattcaagacgcttggtagaggactgcttcacaaactttgttaataaacacttggccattggagatgagtatcctccagaagcgtatggtcttgtccaaagttcatattttcatggtctcaatccttatgaagagttgatacatgctatatccactagagaagctatgatccgctcctctagaggtctgtcagaacctggaactttgttcaagaatttaatggccatcttgagggatgtagttatatgttatgatggaactgtgagaaacatttgtagcaattctatcattcaacttaagtatggggaagatgatgaaactgattcttcaagtgttgtacctcctggtgaacctgtgggtgtcttagccgccacagctatctcgaaccctgcatacaaggctgtcttggattcctcccaaagtaacaatgcttcatgggagtcaatgaaggtagtaatgttataaatatttcttgtcatttaatttagaggccttgttgttactgcttaataagtttgttttattattatcacaggaaattcttcagacaagaacttcctataaaaatgatgtgaaagatcggaaagtggtcctattcctgaatgattgctcttgcgcaaaaaaattctgcaaggaaagggctgcacttgcagtacaaagttgtcttaagagagtcacacttggggattgtgctactgatatctgcattgagcatcagaagcaaataaatttagatggaacatctgaagctgccccaactcttgtaggacatattcaccttgacaaggggcatttagaaaggataaacattagtactcaagacattctccaaaaatgtcaagaagtttctgggagatttggaaagaagaaaggacacctttgccacatctttaaaaaaattacttttgctacttgtgattgttcattcactcagatgccaatcgatggaaagctacataaggttccatgtgtgcagtttgctttttctgatgacattgtactatccgagtctattgagagagcagtgaatgtgatagctgactctgtctgctcagtgcttttagatacaattattaaaggtgatcctcgaattcaagcggcaaaagttatctgggttgaatcagatgcagcatcttgggtaaaacacacacggaaggtatcaaagggcgagtcagcattagaaatcattgttgaaaaagatgatgctgtaagcaatggtgatgcctggagaacagcaattgatgcctgcttacctgtacttaacctcattgacacacggaggtctattccatatggcattcaacaagtgagggaacttattggcatctcatgtgccttcgatcaagtggtgcagcggctttcaacgactgtaaaaatggttaataaaggagttcttaaagaccatttgatacttgtggcaaacagcatgacatgcactggaaatttgattgggttcaacattgctggctacaaggcaactttccgttcattaaaagttcaagtgcctttcaccgagtccactttgtttacccctatgaaatgctttgagaaggctgcagaaaaatgtgattctgattcattgggatgtgtggtctcatcgtccgcatggggcaagcatgcagcagttggtactgggtcatcttttcaaattctctggaatgaaaatcagctgaaaagcaacaaggagtatggggatgggttgtacgatttcttagcattggtcaggactgaccaagaaaagacagactacatgttcttggacgatgttgactatcttgtagaggagaatgcagcagatgacatgtgcttatctcctgagccagatgggacccttggtaagcctacctttgaggataattttgaagagcaaaatattcagaaaggcagctcatgggaaattggcataacaacgaactcaagttgggaacagaatgctagtgttgcgaatgattctggtgactggggaggctggagtagtggaggtggagctgctgcaaagccagcagatcaagataattcatgggaagtgcatgctaaggtgcaggacaattccaccactgattggggaggctggagcgttgagaagccaacaggtgaggcaactgtatctggagaaccagctgaaacagatacttgggctgataagggtgctaaaatggaatcagatgcaggtgatggtaattgggaaaagtccagcactcctgaggcatcaaagaaaaatgactcatcagaaaatacatgggacaaaagaaaaggagatggaggtgatggtgcgtgggggaacaggtctgatgatggccatggcaattgggagcatcccagcaattggaatgggcagagtttggatgtagatcaggacacatggggaaacgccaggggaaaaaagaaggcagatggtaactactgtcaatgggaggagcagccaagcaattacaaacagaagaagacaaatgctgatcatgattcctcctataacaatgtgatgccgtcatcagaaattgcttggaatgctggagatggaactggaagaccaaatgccaagtctaatgcagaatccagttggggtgaggaagataagatggagtctgacgatcatccgaaagtcccaaaagaatcagacacatggaatacagggagatcaaatgaaagtccatgggataacactgatgcactgcaggattcctgggttaagagcgcagctcgcaataacaacactcaggatggttcatgggataaagtagtatctatgaaggatcttgattcactccaagattcatggagtaaggcgacaatccagacgaatgatgcacagaatgattcttgggacaatgtggcaaaaaatgccccggattctgccgcagaagactcctggggggctgcaacaccagcggagacaactgattctggtaacaaggagtggaaatcagatggatggggggcaaagtctggtaactggagcagccaaagaaataatcctgggagacccccaaggagaccagatgagaggggtccacctccaccaagacaacggttcgaactaacagttgcggagaagaacattcttctagaagttgaacctattaaattacgtgtgagaagcatcttccgtgaagcatgtgacggtgttagacttaatccagaagacgagaagtttatcctggagaaagttcttgagcaccacccggaaaagcaatccaaggtgtctggtgaaatcgactacctaacggtcaacaagcaccagactttccaggacactcggtgctttttcgtggtctccacagatggatcccaggcagatttctcctacctgaagtgcctggagaactttgtgaggaagagctacacggaggacgccgacacattctgcatgaagtacttaaggccccgtcgcaggcaggcaccaccagctgatgttgggacagcatcaggcgccccggatgaggttccaccgtcaaccgcagctgagacagagcaaggcactcctccagcccctcaggcagaggttccacaagagacttggggttctcccgcagtgcctctggaaggaggaactcacatcgccggaccagactcaacaggcgacgctgtgatcctaggggagcagcacgatctgactccggcttctccagctgtggcaccacaagtggcttctgagccagacacaaccgacggcacggggcttctaggaaaggctccgcaagctgactggggacccagattcgacgctgactgatatttaggctgtgtgaagctgccgcatgtaaaagccagacctgtgctctgagcaagggagcattcccttgctaagtcgtcagttaactccccttgacttcatctggagaggtggacaggtagtagcggcaaacattctagcccttagcggccgcttgctcgtcctcgtccgtttcgtctcgccctgatgggaaccatgtaaatccttgggaacaaagctaccccctgctgcctttaccgtatctagttggaccttccccactgttggaatctgtgagtccgtctgctgttaaatttttgatggtttctgggctgtggcttgccagcggtgatgccaaactctggaaacctagggatttgtttggtgcggtcgtttggttgtcaggtcgatcagcaaatgtatgcctttgtcctccagatatgtgcttgttgagctagtagatagtgttacattgcgtgcctttgttcaatggaagcccagtttgagatggagcacgtgttcgaaaatactcggtatcacttatgagcgtaaatgcgaaataaacaagggtaaaaaaca

SEQ ID NO: 42174 - DNA, 1420 bp, Zea Mays
aagtctcagtgcgctctgcctcgccacttcgccagtcgtcactcgtcaccaccgtcccgcccccgcgccgtcccacccttgctcccactcgttgcgccgcgccgcgcgatgcaggcccgcgtcgtcgtcttccccgtcaagggccgcgcctggtgcttcgccctcccgcgcgcctccgccgcagcgcccgctgctgatggcgccctcccgcgcccgaccctgagggacctctggcgcggcatctcctccgggtcccgcacggcgccggagaaggccgaggcggtcgtcgacttcgtcgctgacaagatgaacagggcgtgggtcgggttcgggagcgcgccggaggggtcgatgaagagccggatccacagcttcgggctgaagctgctgtcccgggtgaggccgtcggaggtgctcctgaagtccgtcaccaaggacgtgagcgcgctcgagatcgtgcatccggcgagcataaattctcgtcttgtgcgtcgacgtttgcggcatattgctgttagttcacaagaaatttctgtatggctcggtttgtttgcttccagttactagtgttttcatggtactaccgttaccaaacattccattcttttgggtgctatttcgtgcttattctcattggagagctctacagggaagtgagaggctcgagttactagtttctgactgctcagataagtggaaagttcttgaggagaagattaattcagtaaaggatggcaaacccagtgaaaatgcaaggaattctccttggaagctgcggccatcagaaaagcttgacaggtttcttgagggtagaaacttggatgaaggtttggattgtgataccattttgagtatatgccaggagtacgatttggacaagatcgatgttctcaagtacagggatcttctgtagccacatccagattgtttctctgaggtttatacgtttaaattcttctgctagtgagatcaagatgaagggtacaagagttgcatgaacccactaaccattggcggtcaaatgagttcttttaaatagcttcagattttcttgttatgtaccaaaccggtctgccactagtgcaatgatctcagaaacaaagaggacatcttatgaaactatagaagcccagggcagttgttcccaccgtgcaaatagagattgctagctgccaactttcccccgtcagccatcacaaattttagttgggatcaatgaacgacaaatgcaaagagcagggttgaaaattgagattggccatccgtacatgcttctctctctctctctctctctctctcttgtttgtggctctcaatctatctttggttgtatttgaatcttgtactgggatccaatgcatagccttctcgatctggagggattctagagctttgatctctcaggtgcctttttctgcac

SEQ ID NO: 42175 - DNA, 2257 bp, Zea Mays
aagtctcagtgcgctctgcctcgccacttcgccagtcgtcactcgtcaccaccgtcccgcccccgcgccgtcccacccttgctcccactcgttgcgccgcgccgcgcgatgcaggcccgcgtcgtcgtcttccccgtcaagggccgcgcctggtgcttcgccctcccgcgcgcctccgccgcagcgcccgctgctgatggcgccctcccgcgcccgaccctgagggacctctggcgcggcatctcctccgggtcccgcacggcgccggagaaggccgaggcggtcgtcgacttcgtcgctgacaagatgaacagggcgtgggtcgggttcgggagcgcgccggaggggtcgatgaagagccggatccacagcttcgggctgaagctgctgtcccgggtgaggccgtcggaggtgctcctgaagtccgtcaccaaggacgtgagcgcgctcgagatcgtgcatccggcgagcataaattctcgtcttgtgcgtcgacgtttgcggcatattgctgttaggggtgcatcagttcacaagaaatttctgtatggctcggtttgtttgcttccagttactagtgttttcatggtaggtttacaatcattttttggggtggtggtttcatcgacaactaataattcaaaacaattctgtcagttgaagggtttgatattctcttcagatattatcattttagatttattgctaattttactgtgtcaagttttggctaagggtcaaagaatgtgactatattcttcactattccacagtttctattttacatacttgtataagtggtgttaacttatgagctataacacgatgcaaatgtcttctacttgtttttttttctcgattgcaggtactaccgttaccaaacattccattcttttgggtgctatttcgtgcttattctcattggagagctctacaggtttgtgaaattagtcctacatagcgaaagtgcctctagcgtaatggttaaggcttccgagtaccacctccaggtctcgggttcgatccccctcggggccaatttcgtgcatggttaaaaaaatcccctcgttgtgtcccgcccgctcctggttacgtcctgcgcgccatcctccggctgggccgttgcagagtggacggtgatggcccgctagtgatggagagccagggttcggggattttttttcggtcgagaccatgtttcggtctcttcttaatataataccgggtgggcggtctttccctccccgaccgagtttaaattagtcctacatgattttggtttcacttgtaaataatgcttgcgtgcattgtttttcattgtcattgttatggaagatcctaaattgcgcaaatcttttctgtttgaaacaatttcttcatttaccaatctaatatgtcaggtactatataaacgttcagatgatgacacaattgatatttgtttattgtttcttcatgggtttgcctgatgtttattttggtatagggaagtgagaggctcgagttactagtttctgactgctcagataagtggaaagttcttgaggagaagattaattcagtaaaggatggcaaacccagtgaaaatgcaaggaattctccttggaagctgcggccatcagaaaagcttgacaggtttcttgagggtagaaacttggatgaaggtttggattgtgataccattttgagtatatgccaggagtacgatttggacaagatcgatgttctcaagtacagggatcttctgtagccacatccagattgtttctctgaggtttatacgtttaaattcttctgctagtgagatcaagatgaagggtacaagagttgcatgaacccactaaccattggcggtcaaatgagttcttttaaatagcttcagattttcttgttatgtaccaaaccggtctgccactagtgcaatgatctcagaaacaaagaggacatcttatgaaactatagaagcccagggcagttgttcccaccgtgcaaatagagattgctagctgccaactttcccccgtcagccatcacaaattttagttgggatcaatgaacgacaaatgcaaagagcagggttgaaaattgagattggccatccgtacatgcttctctctctctctctctctctctctcttgtttgtggctctcaatctatctttggttgtatttgaatcttgtactgggatccaatgcatagccttctcgatctggagggattctagagctttgatctctcaggtgcctttttctgcac

SEQ ID NO: 42176 - DNA, 1937 bp, Zea Mays
aagtctcagtgcgctctgcctcgccacttcgccagtcgtcactcgtcaccaccgtcccgcccccgcgccgtcccacccttgctcccactcgttgcgccgcgccgcgcgatgcaggcccgcgtcgtcgtcttccccgtcaagggccgcgcctggtgcttcgccctcccgcgcgcctccgccgcagcgcccgctgctgatggcgccctcccgcgcccgaccctgagggacctctggcgcggcatctcctccgggtcccgcacggcgccggagaaggccgaggcggtcgtcgacttcgtcgctgacaagatgaacagggcgtgggtcgggttcgggagcgcgccggaggggtcgatgaagagccggatccacagcttcgggctgaagctgctgtcccgggtgaggccgtcggaggtgctcctgaagtccgtcaccaaggacgtgagcgcgctcgagatcgtgcatccggcgagcataaattctcgtcttgtgcgtcgacgtttgcggcatattgctgttaggggtgcatcagttcacaagaaatttctgtactaccgttaccaaacattccattcttttgggtgctatttcgtgcttattctcattggagagctctacaggtttgtgaaattagtcctacatagcgaaagtgcctctagcgtaatggttaaggcttccgagtaccacctccaggtctcgggttcgatccccctcggggccaatttcgtgcatggttaaaaaaatcccctcgttgtgtcccgcccgctcctggttacgtcctgcgcgccatcctccggctgggccgttgcagagtggacggtgatggcccgctagtgatggagagccagggttcggggattttttttcggtcgagaccatgtttcggtctcttcttaatataataccgggtgggcggtctttccctccccgaccgagtttaaattagtcctacatgattttggtttcacttgtaaataatgcttgcgtgcattgtttttcattgtcattgttatggaagatcctaaattgcgcaaatcttttctgtttgaaacaatttcttcatttaccaatctaatatgtcaggtactatataaacgttcagatgatgacacaattgatatttgtttattgtttcttcatgggtttgcctgatgtttattttggtatagggaagtgagaggctcgagttactagtttctgactgctcagataagtggaaagttcttgaggagaagattaattcagtaaaggatggcaaacccagtgaaaatgcaaggaattctccttggaagctgcggccatcagaaaagcttgacaggtttcttgagggtagaaacttggatgaaggtttggattgtgataccattttgagtatatgccaggagtacgatttggacaagatcgatgttctcaagtacagggatcttctgtagccacatccagattgtttctctgaggtttatacgtttaaattcttctgctagtgagatcaagatgaagggtacaagagttgcatgaacccactaaccattggcggtcaaatgagttcttttaaatagcttcagattttcttgttatgtaccaaaccggtctgccactagtgcaatgatctcagaaacaaagaggacatcttatgaaactatagaagcccagggcagttgttcccaccgtgcaaatagagattgctagctgccaactttcccccgtcagccatcacaaattttagttgggatcaatgaacgacaaatgcaaagagcagggttgaaaattgagattggccatccgtacatgcttctctctctctctctctctctctctcttgtttgtggctctcaatctatctttggttgtatttgaatcttgtactgggatccaatgcatagccttctcgatctggagggattctagagctttgatctctcaggtgcctttttctgcac

SEQ ID NO: 42177 - DNA, 1383 bp, Zea Mays
aagtctcagtgcgctctgcctcgccacttcgccagtcgtcactcgtcaccaccgtcccgcccccgcgccgtcccacccttgctcccactcgttgcgccgcgccgcgcgatgcaggcccgcgtcgtcgtcttccccgtcaagggccgcgcctggtgcttcgccctcccgcgcgcctccgccgcagcgcccgctgctgatggcgccctcccgcgcccgaccctgagggacctctggcgcggcatctcctccgggtcccgcacggcgccggagaaggccgaggcggtcgtcgacttcgtcgctgacaagatgaacagggcgtgggtcgggttcgggagcgcgccggaggggtcgatgaagagccggatccacagcttcgggctgaagctgctgtcccgggtgaggccgtcggaggtgctcctgaagtccgtcaccaaggacgtgagcgcgctcgagatcgtgcatccggcgagcataaattctcgtcttgtgcgtcgacgtttgcggcatattgctgttaggggtgcatcagttcacaagaaatttctgtactaccgttaccaaacattccattcttttgggtgctatttcgtgcttattctcattggagagctctacagtgagaggctcgagttactagtttctgactgctcagataagtggaaagttcttgaggagaagattaattcagtaaaggatggcaaacccagtgaaaatgcaaggaattctccttggaagctgcggccatcagaaaagcttgacaggtttcttgagggtagaaacttggatgaaggtttggattgtgataccattttgagtatatgccaggagtacgatttggacaagatcgatgttctcaagtacagggatcttctgtagccacatccagattgtttctctgaggtttatacgtttaaattcttctgctagtgagatcaagatgaagggtacaagagttgcatgaacccactaaccattggcggtcaaatgagttcttttaaatagcttcagattttcttgttatgtaccaaaccggtctgccactagtgcaatgatctcagaaacaaagaggacatcttatgaaactatagaagcccagggcagttgttcccaccgtgcaaatagagattgctagctgccaactttcccccgtcagccatcacaaattttagttgggatcaatgaacgacaaatgcaaagagcagggttgaaaattgagattggccatccgtacatgcttctctctctctctctctctctctctcttgtttgtggctctcaatctatctttggttgtatttgaatcttgtactgggatccaatgcatagccttctcgatctggagggattctagagctttgatctctcaggtgcctttttctgcac

SEQ ID NO: 42178 - DNA, 2890 bp, Zea Mays
ctcagaccggcaagcaccaagcacagaggatagccgcgctcacctcctcagtccccacacgccctaggcgctggcgctgcaagctcgggcagtcgagccgagcgctccctgctcggcggacgctggccgtggctcgccctcgctgtgccgacacgccggcaaccatctcccctccagatccgccactgatggttggctcaaacttatgaaaagagctagctaaggaaacagggccaaagtgagctccagggaaaaaaaaagagcaccatggagaaaggggacgtgctggtggacctggacaagctccctatgaagcgccttgaggccatcgacgagactggcaacgagcactacccaccggacactagcaacgaggagcagcggctcgcggccatccgccggattgacttctcttgggtcatagagaaggatgcaaagaaggccaagaaggcggctgaggctgatactacccagcaggcatggccctggcagggccttatggagagcctgcagcaggcacatcaggagctctccgtcgtcatagacctcatcggcacggttggttgaggctaatgacgccatggcagtcgcctcgacaacgaagcccaagtcacagccaaacgaaatactagttgacatggcagtgtgtgctgccaccaagctccagtgccttaggcatttgtcacggtacttcaaacaatctgctacgacaatggagcaacagttccaaaaggagactaggttctacagctccttaataagattacagcagaactggaaagtgaagcggcagcggtctgttgggagtccaggaagtgagggcttcatgtttgatctagttgatacttctcagctagacacaacaacaatgcctcgattatcaccattatctttgattccaattgatcaagactcttcaggcactttgtctgtacaaattccacagaagtgtttccattccttgagccttcgatttcatggagacatagccaataatgcagaaagcagtgctgtcaaaaggaaagaaggcacattaaccaacactactaccggagccgaaaatgatgttttggagaacgatgatgtcaataagtctactgaacatgcacattccatcttgcgcgacatccataagtccatatttgaggagcaggtttttgatatggtgatccaggagacatttatccaatctcaaggcatcaatgttactggaatgtgcgaagattttctccaattagcgattggtcaggaatgttctttgtgcctttcgcatgatctctctgggcagaataataactcggggacagtagggcaggaagatcatatggatatagatcatactggaaatcttgcagtagccactgtaaatgggaaggagtcttcaaataaggatgtgagagggtttcctaaccccaaaagcttagaaatttacctgctacatgtgttccatgaaggcatccttagaaaactcagggagaaatctcgtcatgtggttcggtaccagagttctgctcagggtacacctgacgagtgtggcctgctaagtcatttttgcatgacagtgtctcacaggatattttctagcaaagtacatttggagcttgaaagtgtggttagtagggttccttatctccatctgtgttcccttcctacatggcattctcgaacgtcctcctggtctctctgcctgaaagttcctcagcctatcctggccactgatcgagtcagaaggccttcagactacagtgagttgaagtgcaaatccaggtcacagttcggtacaaaggtgatcttgaaagatggacagattagtttaatgggcgagggctctccaagcattgctggatcgttagctgggaagccatccgatggacgcctggtaaatagttacaattgtgacttggaagatctcccaatgatgcttctgcagcaggttgccagccaagtaatccactggctccacgatgaagcggtggtccttgggatgaacgcgacaatagatttcctgtgcctgtacttggaccttgaccaaggtgaaacactaggcctggtggcacacgttgacccggatgacacctacggctgcgtctcatggtacctcactcttgatcatcacccaacggaggaagggaagatgtcagcgggtagtccggagctagaggagcgcaggtttttggggtacctttccccggaattgctttactctaccctgatggacctggtaaaactgtgcagcacaggtgtccaacgctgagactctgcccacggagtagtgggagtctcatgcgcggtaagtctcacggataggggtagtaatgggccttaaaattttgcactgtgaaatttaagaattagatcagattaggatataatcatcaaactctatctttatccattttaaactaaattagttaagaagtcaaacactttggatctgggatccgttaccaatcatctctactcgctgccctcctccaagtccagagaaacgtgcaagtgcagatagcaggaaaaaaaaagagagataagatgtgcactctgggccaggcctagtccgctgacctgtcgccggcccaccaaaaagagatggcaatccttccttccttcctagctcctttcccgactgcctctctactgtccgtgtcatgtcaagtcttctgatgatctccgtacccatgtccgtcttttactattcctcgtgagacggcttccagtgaaaaaaaaccgacagctttggcagctagcaacatttcgctttgcgttttgaccggtgcacttgccagaagccaggaaaaaagttttctcgtgtgttcggtaacggttgaagccagcagatcgatcgtgttcgcgttttaatcgtggtcattatggtgacaagacaggactagag

SEQ ID NO: 42179 - DNA, 2854 bp, Zea Mays
ctcagaccggcaagcaccaagcacagaggatagccgcgctcacctcctcagtccccacacgccctaggcgctggcgctgcaagctcgggcagtcgagccgagcgctccctgctcggcggacgctggccgtggctcgccctcgctgtgccgacacgccggcaaccatctcccctccagagctagctaaggaaacagggccaaagtgagctccagggaaaaaaaaagagcaccatggagaaaggggacgtgctggtggacctggacaagctccctatgaagcgccttgaggccatcgacgagactggcaacgagcactacccaccggacactagcaacgaggagcagcggctcgcggccatccgccggattgacttctcttgggtcatagagaaggatgcaaagaaggccaagaaggcggctgaggctgatactacccagcaggcatggccctggcagggccttatggagagcctgcagcaggcacatcaggagctctccgtcgtcatagacctcatcggcacggttggttgaggctaatgacgccatggcagtcgcctcgacaacgaagcccaagtcacagccaaacgaaatactagttgacatggcagtgtgtgctgccaccaagctccagtgccttaggcatttgtcacggtacttcaaacaatctgctacgacaatggagcaacagttccaaaaggagactaggttctacagctccttaataagattacagcagaactggaaagtgaagcggcagcggtctgttgggagtccaggaagtgagggcttcatgtttgatctagttgatacttctcagctagacacaacaacaatgcctcgattatcaccattatctttgattccaattgatcaagactcttcaggcactttgtctgtacaaattccacagaagtgtttccattccttgagccttcgatttcatggagacatagccaataatgcagaaagcagtgctgtcaaaaggaaagaaggcacattaaccaacactactaccggagccgaaaatgatgttttggagaacgatgatgtcaataagtctactgaacatgcacattccatcttgcgcgacatccataagtccatatttgaggagcaggtttttgatatggtgatccaggagacatttatccaatctcaaggcatcaatgttactggaatgtgcgaagattttctccaattagcgattggtcaggaatgttctttgtgcctttcgcatgatctctctgggcagaataataactcggggacagtagggcaggaagatcatatggatatagatcatactggaaatcttgcagtagccactgtaaatgggaaggagtcttcaaataaggatgtgagagggtttcctaaccccaaaagcttagaaatttacctgctacatgtgttccatgaaggcatccttagaaaactcagggagaaatctcgtcatgtggttcggtaccagagttctgctcagggtacacctgacgagtgtggcctgctaagtcatttttgcatgacagtgtctcacaggatattttctagcaaagtacatttggagcttgaaagtgtggttagtagggttccttatctccatctgtgttcccttcctacatggcattctcgaacgtcctcctggtctctctgcctgaaagttcctcagcctatcctggccactgatcgagtcagaaggccttcagactacagtgagttgaagtgcaaatccaggtcacagttcggtacaaaggtgatcttgaaagatggacagattagtttaatgggcgagggctctccaagcattgctggatcgttagctgggaagccatccgatggacgcctggtaaatagttacaattgtgacttggaagatctcccaatgatgcttctgcagcaggttgccagccaagtaatccactggctccacgatgaagcggtggtccttgggatgaacgcgacaatagatttcctgtgcctgtacttggaccttgaccaaggtgaaacactaggcctggtggcacacgttgacccggatgacacctacggctgcgtctcatggtacctcactcttgatcatcacccaacggaggaagggaagatgtcagcgggtagtccggagctagaggagcgcaggtttttggggtacctttccccggaattgctttactctaccctgatggacctggtaaaactgtgcagcacaggtgtccaacgctgagactctgcccacggagtagtgggagtctcatgcgcggtaagtctcacggataggggtagtaatgggccttaaaattttgcactgtgaaatttaagaattagatcagattaggatataatcatcaaactctatctttatccattttaaactaaattagttaagaagtcaaacactttggatctgggatccgttaccaatcatctctactcgctgccctcctccaagtccagagaaacgtgcaagtgcagatagcaggaaaaaaaaagagagataagatgtgcactctgggccaggcctagtccgctgacctgtcgccggcccaccaaaaagagatggcaatccttccttccttcctagctcctttcccgactgcctctctactgtccgtgtcatgtcaagtcttctgatgatctccgtacccatgtccgtcttttactattcctcgtgagacggcttccagtgaaaaaaaaccgacagctttggcagctagcaacatttcgctttgcgttttgaccggtgcacttgccagaagccaggaaaaaagttttctcgtgtgttcggtaacggttgaagccagcagatcgatcgtgttcgcgttttaatcgtggtcattatggtgacaagacaggactagag

SEQ ID NO: 42180 - DNA, 2856 bp, Zea Mays
cgcgtcgttgatccgcgtgccgtgtcaccttcgccgcgtggtccggaccagtgattgatcctgctaaatgtcgattgatgagtgtggatgaaaagcgagaactcgttcgtgatttatcaaagagcccagaaagtgctcctgacaggctccagtcatggacccggcgagaaattgtagagattctttgttctgatcttggaagggagaggaaatatactggtttatccaagcagagaatgctagattatctatttaggttggtgtctggaaaatcatctggtccagtggaacatgtgcaagagaaagagaaagggagagagaaagggaaagagagagaaaaagaatcaattcctgagcccaatacaactaaccaccatcagtcccctgccaaacgaccaagaaagagtgataacccatcacgattaccgattatcacaaacaactcagcagcatctgatgtaactgggccaactaataattcacggttctgtcaaaatgtagcttgcagagctattctcagggacaatttttgcagacgctgttcatgctgcatttgtttcagttatgatgataacaaggacccaagcctctggttgtcctgtagttcagaccaacacttacaaaaggatacctgtggtttctcatgccatcttgaatgtgctctaaaggatgaaagaacaggtattctgcagagtggacaatgcaagaaacttgatggtggctattattgcactcgctgttggaaacagaatgatttgcttgggtcctggaagaaacaactggtgatagcaaaagatgctcggcgattggatgtgttgtgtcatcggatttatctcagtcacaagatcctcgtctccacagaaaagtacttggtattgcatgagattgttgatacagcattgaagaaactggaggctgaggtcggtcctatatctggagctccaaatatgagtcgtggaattgtcagtcgacttactgttggtgccgaagttcagaaactttgtgctcaagcaatagatgctatggaatcattgttctcgggtgtatctcctgctggttcaagaatcccgcgaccatgtatggtaccaccaaattttgtgaagtttgaagctataacccaaacatctgtcatggtatttttggatttggttcactatcctatgcttgcccaagaggcaacttcatttaatatatggcaccgaatggctgttactgaagcttacctgacaaatccgactggcataatacttcccccatcgaaaaaattacctgtcactgggcttgcaccggctacaagctatatctttaagattattgctttcaaaaactcaatcgagttgggttcatgggaaattagaacgaagacaagctatcaaaaggatgatccaaggggttcaatgccaggtggtactagactaggacataatagtgagagcctgaaggcaaacagtgatggccagtctgatccttcctcagagggtgtggactcaaacaataatactgctgtttatgctgatctaaacaagtcccctgaaagtgattttgagtactgtgaaaatcctgagatcctagattcagataaagcgtctcgtcgcctcagcgaacacatcgatgacttgcaaaatatacagatggctgcagatagggtaacagaagtcactgagctggaagaatcgcctgggctctcagcctcagccttggatgaggaacccaacgcttgtgttcaagcagtgcttctcagggagccaaacccactaggacacaatcaaagaactgtagttcctagatcacagcatgcatctaatgtactgggtggaaatgagttggtgattgttggacctcgatatgctggttctgtgccacccattgcaacaagaggtctggaaaacagcaaggagagcggtggaaggggcttcaaacccaaaccttgtaacaacattttccaaaatggctcttcaaagcctgaaagggaaccgggcaattcgtcaaacaaaagaacagctggtaaaacggaggaccttggtcacaaggatagttcatctgaagtgtcctacgagtactgtgtaagggtggtcaggtggctggagtgcgagggctacatcgagacaaacttcagggtgaagtttctcacatggtttagcctgcgtgccaccccgcaggagagaaagatagtcggtgtctatgtggatacccttattgaggaccctgtcagcctttctggccagctcgttgacagcttctcggaggcggtatatagcaaaaagcggacgccttctggtttctgcatggacctgtggcattgaagcaccacaagcacctaccgtttgctttgtagggagcacacattcgggcccattcttttgttgcagatcgttgcattgattcttcattggaaatttcgctgaagtatttgacttgcacatcttcattgaaacttaacttttcaatgacagtaggttaagttaatgggcaatttctttttttctttttccgttctttacatttgctccatagtaggttaccgtgctatcatctgtaccgtccatgttaaccttagagcatcaatgagccgcatcgttcggtcagcctggggcatagtggattttgtggcgtgtggctgctcgaaggatgattgtcaggctggaccaggaatgcgcctttctgtgggatgaagcagattcgtatggacgttgtcagtgaaatggttgtgctgtacctggggttttgcattttcttgctgactttgttgggaatgggaggaatgacgtttaagatgcagaatgtctgccttattaattaatcttatgttgactcatacttctctatcaactgcgtttatggttcgctggtgttctg

SEQ ID NO: 42181 - DNA, 2834 bp, Zea Mays
cgacacctctccccccccccccccccaccccatcctcctcccctcagcctctccggtgggcgggcgggcgggcgggcaattcggccatggatcccccacgcggaggaccagtgattgatcctgctaaatgtcgattgatgagtgtggatgaaaagcgagaactcgttcgtgatttatcaaagagcccagaaagtgctcctgacaggctccagtcatggacccggcgagaaattgtagagattctttgttctgatcttggaagggagaggaaatatactggtttatccaagcagagaatgctagattatctatttaggttggtgtctggaaaatcatctggtccagtggaacatgtgcaagagaaagagaaagggagagagaaagggaaagagagagaaaaagaatcaattcctgagcccaatacaactaaccaccatcagtcccctgccaaacgaccaagaaagagtgataacccatcacgattaccgattatcacaaacaactcagcagcatctgatgtaactgggccaactaataattcacggttctgtcaaaatgtagcttgcagagctattctcagggacaatttttgcagacgctgttcatgctgcatttgtttcagttatgatgataacaaggacccaagcctctggttgtcctgtagttcagaccaacacttacaaaaggatacctgtggtttctcatgccatcttgaatgtgctctaaaggatgaaagaacaggtcctggaagaaacaactggtgatagcaaaagatgctcggcgattggatgtgttgtgtcatcggatttatctcagtcacaagatcctcgtctccacagaaaagtacttggtattgcatgagattgttgatacagcattgaagaaactggaggctgaggtcggtcctatatctggagctccaaatatgagtcgtggaattgtcagtcgacttactgttggtgccgaagttcagaaactttgtgctcaagcaatagatgctatggaatcattgttctcgggtgtatctcctgctggttcaagaatcccgcgaccatgtatggtaccaccaaattttgtgaagtttgaagctataacccaaacatctgtcatggtatttttggatttggttcactatcctatgcttgcccaagaggcaacttcatttaatatatggcaccgaatggctgttactgaagcttacctgacaaatccgactggcataatacttcccccatcgaaaaaattacctgtcactgggcttgcaccggctacaagctatatctttaagattattgctttcaaaaactcaatcgagttgggttcatgggaaattagaacgaagacaagctatcaaaaggatgatccaaggggttcaatgccaggtggtactagactaggacataatagtgagagcctgaaggcaaacagtgatggccagtctgatccttcctcagagggtgtggactcaaacaataatactgctgtttatgctgatctaaacaagtcccctgaaagtgattttgagtactgtgaaaatcctgagatcctagattcagataaagcgtctcgtcgcctcagcgaacacatcgatgacttgcaaaatatacagatggctgcagatagggtaacagaagtcactgagctggaagaatcgcctgggctctcagcctcagccttggatgaggaacccaacgcttgtgttcaagcagtgcttctcagggagccaaacccactaggacacaatcaaagaactgtagttcctagatcacagcatgcatctaatgtactgggtggaaatgagttggtgattgttggacctcgatatgctggttctgtgccacccattgcaacaagaggtctggaaaacagcaaggagagcggtggaaggggcttcaaacccaaaccttgtaacaacattttccaaaatggctcttcaaagcctgaaagggaaccgggcaattcgtcaaacaaaagaacagctggtaaaacggaggaccttggtcacaaggatagttcatctgaagtgtcctacgagtactgtgtaagggtggtcaggtggctggagtgcgagggctacatcgagacaaacttcagggtgaagtttctcacatggtttagcctgcgtgccaccccgcaggagagaaagatagtcggtgtctatgtggatacccttattgaggaccctgtcagcctttctggccagctcgttgacagcttctcggaggcggtatatagcaaaaagcggacgccttctggtttctgcatggacctgtggcattgaagcaccacaagcacctaccgtttgctttgtagggagcacacattcgggcccattcttttgttgcagatcgttgcattgattcttcattggaaatttcgctgaagtatttgacttgcacatcttcattgaaacttaacttttcaatgacagtaggttaagttaatgggcaatttctttttttctttttccgttctttacatttgctccatagtaggttaccgtgctatcatctgtaccgtccatgttaaccttagagcatcaatgagccgcatcgttcggtcagcctggggcatagtggattttgtggcgtgtggctgctcgaaggatgattgtcaggctggaccaggaatgcgcctttctgtgggatgaagcagattcgtatggacgttgtcagtgaaatggttgtgctgtacctggggttttgcattttcttgctgactttgttgggaatgggaggaatgacgtttaagatgcagaatgtctgccttattaattaatcttatgttgactcatacttctctatcaactgcgtttatggttcgctggtgttctg

SEQ ID NO: 42182 - DNA, 2198 bp, Zea Mays
cgacacctctccccccccccccccccaccccatcctcctcccctcagcctctccggtgggcgggcgggcgggcgggcaattcggccatggatcccccacgcggaggtcctggaagaaacaactggtgatagcaaaagatgctcggcgattggatgtgttgtgtcatcggatttatctcagtcacaagatcctcgtctccacagaaaagtacttggtattgcatgagattgttgatacagcattgaagaaactggaggctgaggtcggtcctatatctggagctccaaatatgagtcgtggaattgtcagtcgacttactgttggtgccgaagttcagaaactttgtgctcaagcaatagatgctatggaatcattgttctcgggtgtatctcctgctggttcaagaatcccgcgaccatgtatggtaccaccaaattttgtgaagtttgaagctataacccaaacatctgtcatggtatttttggatttggttcactatcctatgcttgcccaagaggcaacttcatttaatatatggcaccgaatggctgttactgaagcttacctgacaaatccgactggcataatacttcccccatcgaaaaaattacctgtcactgggcttgcaccggctacaagctatatctttaagattattgctttcaaaaactcaatcgagttgggttcatgggaaattagaacgaagacaagctatcaaaaggatgatccaaggggttcaatgccaggtggtactagactaggacataatagtgagagcctgaaggcaaacagtgatggccagtctgatccttcctcagagggtgtggactcaaacaataatactgctgtttatgctgatctaaacaagtcccctgaaagtgattttgagtactgtgaaaatcctgagatcctagattcagataaagcgtctcgtcgcctcagcgaacacatcgatgacttgcaaaatatacagatggctgcagatagggtaacagaagtcactgagctggaagaatcgcctgggctctcagcctcagccttggatgaggaacccaacgcttgtgttcaagcagtgcttctcagggagccaaacccactaggacacaatcaaagaactgtagttcctagatcacagcatgcatctaatgtactgggtggaaatgagttggtgattgttggacctcgatatgctggttctgtgccacccattgcaacaagaggtctggaaaacagcaaggagagcggtggaaggggcttcaaacccaaaccttgtaacaacattttccaaaatggctcttcaaagcctgaaagggaaccgggcaattcgtcaaacaaaagaacagctggtaaaacggaggaccttggtcacaaggatagttcatctgaagtgtcctacgagtactgtgtaagggtggtcaggtggctggagtgcgagggctacatcgagacaaacttcagggtgaagtttctcacatggtttagcctgcgtgccaccccgcaggagagaaagatagtcggtgtctatgtggatacccttattgaggaccctgtcagcctttctggccagctcgttgacagcttctcggaggcggtatatagcaaaaagcggacgccttctggtttctgcatggacctgtggcattgaagcaccacaagcacctaccgtttgctttgtagggagcacacattcgggcccattcttttgttgcagatcgttgcattgattcttcattggaaatttcgctgaagtatttgacttgcacatcttcattgaaacttaacttttcaatgacagtaggttaagttaatgggcaatttctttttttctttttccgttctttacatttgctccatagtaggttaccgtgctatcatctgtaccgtccatgttaaccttagagcatcaatgagccgcatcgttcggtcagcctggggcatagtggattttgtggcgtgtggctgctcgaaggatgattgtcaggctggaccaggaatgcgcctttctgtgggatgaagcagattcgtatggacgttgtcagtgaaatggttgtgctgtacctggggttttgcattttcttgctgactttgttgggaatgggaggaatgacgtttaagatgcagaatgtctgccttattaattaatcttatgttgactcatacttctctatcaactgcgtttatggttcgctggtgttctg

SEQ ID NO: 42183 - DNA, 2805 bp, Zea Mays
cgacacctctccccccccccccccccaccccatcctcctcccctcagcctctccggtgggcgggcgggcgggcgggcaattcggccatggatcccccacgcggaggaccagtgattgatcctgctaaatgtcgattgatgagtgtggatgaaaagcgagaactcgttcgtgatttatcaaagagcccagaaagtgctcctgacaggctccagtcatggacccggcgagaaattgtagagattctttgttctgatcttggaagggagaggaaatatactggtttatccaagcagagaatgctagattatctatttaggttggtgtctggaaaatcatctggtccagtggaacatgtgcaagagaaagagaaagggagagagaaagggaaagagagagaaaaagaatcaattcctgagcccaatacaactaaccaccatcagtcccctgccaaacgaccaagaaagagtgataacccatcacgattaccgattatcacaaacaactcagcagcatctgatgtaactgggccaactaataattcacggttctgtcaaaatgtagcttgcagagctattctcagggacaatttttgcagacgctgttcatgctgcatttgtttcagttatgatgataacaaggacccaagcctctggttgtcctgtagttcagaccaacacttacaaaaggatacctgtggtttctcatgccatcttgaatgtgctctaaaggatgaaagaacaggtattctgcagagtggacaatgcaagaaacttgatggtggctattattgcactcgctgttggaaacagaatgatttgcttgggtcctggaagaaacaactggtgatagcaaaagatgctcggcgattggatgtgttgtgtcatcggatttatctcagtcacaagatcctcgtctccacagaaaagtacttggtattgcatgagattgttgatacagcattgaagaaactggaggctgaggtcggtcctatatctggagctccaaatatgagtcgtggaattgtcagtcgacttactgttggtgccgaagttcagaaactttgtgctcaagcaatagatgctatggaatcattgttctcgggtgtatctcctgctggttcaagaatcccgcgaccatgtatggtaccaccaaattttgtgaagtttgaagctataacccaaacatctgtcatggtatttttggatttggttcactatcctatgcttgcccaagaggcaacttcatttaatatatggcaccgaatggctgttactgaagcttacctgacaaatccgactggcataatacttcccccatcgaaaaaattacctgtcactgggcttgcaccggctacaagctatatctttaagattattgctttcaaaaactcaatcgagttgggttcatgggaaattagaacgaagacaagctatcaaaaggatgatccaaggggttcaatgccaggtggtactagactaggacataatagtgagagcctgaaggcaaacagtgatggccagtctgatccttcctcagagggtgtggactcaaacaataatactgctgtttatgctgatctaaacaagtcccctgaaagtgattttgagtactgtgaaaatcctgagatcctagattcagataaagcgtctcgtcgcctcagcgaacacatcgatgacttgcaaaatatacagatggctgcagatagggtaacagaagtcactgagctggaagaatcgcctgggctctcagcctcagccttggatgaggaacccaacgcttgtgttcaagcagtgcttctcagggagccaaacccactaggacacaatcaaagaactgtagttcctagatcacagcatgcatctaatgtactgggtggaaatgagttggtgattgttggacctcgatatgctggttctgtgccacccattgcaacaagaggtctggaaaacagcaaggagagcggtggaaggggcttcaaacccaaaccttgtaacaacattttccaaaatggctcttcaaagcctgaaagggaaccgggcaattcgtcaaacaaaagaacagctggtaaaacggaggaccttggtcacaaggatagttcatctgaagtgtcctacgagtactgtgtaagggtggtcaggtggctggagtgcgagggctacatcgagacaaacttcagggtgaagtttctcacatggtttagcctgcgtgccaccccgcaggagagaaagatagtcggtgtctatgtggatacccttattgaggaccctgtcagcctttctggccagctcgttgacagcttctcggaggcggtatatagcaaaaagcggacgccttctggtttctgcatggacctgtggcattgaagcaccacaagcacctaccgtttgctttgtagggagcacacattcgggcccattcttttgttgcagatcgttgcattgattcttcattggaaatttcgctgaagttaccgtgctatcatctgtaccgtccatgttaaccttagagcatcaatgagccgcatcgttcggtcagcctggggcatagtggattttgtggcgtgtggctgctcgaaggatgattgtcaggctggaccaggaatgcgcctttctgtgggatgaagcagattcgtatggacgttgtcagtgaaatggttgtgctgtacctggggttttgcattttcttgctgactttgttgggaatgggaggaatgacgtttaagatgcagaatgtctgccttattaattaatcttatgttgactcatacttctctatcaactgcgtttatggttcgctggtgttctg

SEQ ID NO: 42184 - DNA, 2858 bp, Zea Mays
ggccgctgcggagcgggattctccgtccgcgtcccctacgcgtcgaggaccagtgattgatcctgctaaatgtcgattgatgagtgtggatgaaaagcgagaactcgttcgtgatttatcaaagagcccagaaagtgctcctgacaggctccagtcatggacccggcgagaaattgtagagattctttgttctgatcttggaagggagaggaaatatactggtttatccaagcagagaatgctagattatctatttaggttggtgtctggaaaatcatctggtccagtggaacatgtgcaagagaaagagaaagggagagagaaagggaaagagagagaaaaagaatcaattcctgagcccaatacaactaaccaccatcagtcccctgccaaacgaccaagaaagagtgataacccatcacgattaccgattatcacaaacaactcagcagcatctgatgtaactgggccaactaataattcacggttctgtcaaaatgtagcttgcagagctattctcagggacaatttttgcagacgctgttcatgctgcatttgtttcagttatgatgataacaaggacccaagcctctggttgtcctgtagttcagaccaacacttacaaaaggatacctgtggtttctcatgccatcttgaatgtgctctaaaggatgaaagaacaggtattctgcagagtggacaatgcaagaaacttgatggtggctattattgcactcgctgttggaaacagaatgatttgcttgggtcctggaagaaacaactggtgatagcaaaagatgctcggcgattggatgtgttgtgtcatcggatttatctcagtcacaagatcctcgtctccacagaaaagtacttggtattgcatgagattgttgatacagcattgaagaaactggaggctgaggtcggtcctatatctggagctccaaatatgagtcgtggaattgtcagtcgacttactgttggtgccgaagttcagaaactttgtgctcaagcaatagatgctatggaatcattgttctcgggtgtatctcctgctggttcaagaatcccgcgaccatgtatggtaccaccaaattttgtgaagtttgaagctataacccaaacatctgtcatggtatttttggatttggttcactatcctatgcttgcccaagaggcaacttcatttaatatatggcaccgaatggctgttactgaagcttacctgacaaatccgactggcataatacttcccccatcgaaaaaattacctgtcactgggcttgcaccggctacaagctatatctttaagattattgctttcaaaaactcaatcgagttgggttcatgggaaattagaacgaagacaagctatcaaaaggatgatccaaggggttcaatgccaggtggtactagactaggacataatagtgagagcctgaaggcaaacagtgatggccagtctgatccttcctcagagggtgtggactcaaacaataatactgctgtttatgctgatctaaacaagtcccctgaaagtgattttgagtactgtgaaaatcctgagatcctagattcagataaagcgtctcgtcgcctcagcgaacacatcgatgacttgcaaaatatacagatggctgcagatagggtaacagaagtcactgagctggaagaatcgcctgggctctcagcctcagccttggatgaggaacccaacgcttgtgttcaagcagtgcttctcagggagccaaacccactaggacacaatcaaagaactgtagttcctagatcacagcatgcatctaatgtactgggtggaaatgagttggtgattgttggacctcgatatgctggttctgtgccacccattgcaacaagaggtctggaaaacagcaaggagagcggtggaaggggcttcaaacccaaaccttgtaacaacattttccaaaatggctcttcaaagcctgaaagggaaccgggcaattcgtcaaacaaaagaacagctggtaaaacggaggaccttggtcacaaggatagttcatctgaagtgtcctacgagtactgtgtaagggtggtcaggtggctggagtgcgagggctacatcgagacaaacttcagggtgaagtttctcacatggtttagcctgcgtgccaccccgcaggagagaaagatagtcggtgtctatgtggatacccttattgaggaccctgtcagcctttctggccagctcgttgacagcttctcggaggcggtatatagcaaaaagcggacgccttctggtttctgcatggacctgtggcattgaagcaccacaagcacctaccgtttgctttgtagggagcacacattcgggcccattcttttgttgcagatcgttgcattgattcttcattggaaatttcgctgaagtatttgacttgcacatcttcattgaaacttaacttttcaatgacagtaggttaagttaatgggcaatttctttttttctttttccgttctttacatttgctccatagtaggttaccgtgctatcatctgtaccgtccatgttaaccttagagcatcaatgagccgcatcgttcggtcagcctggggcatagtggattttgtggcgtgtggctgctcgaaggatgattgtcaggctggaccaggaatgcgcctttctgtgggatgaagcagattcgtatggacgttgtcagtgaaatggttgtgctgtacctggggttttgcattttcttgctgactttgttgggaatgggaggaatgacgtttaagatgcagaatgtctgccttattaattaatcttatgttgactcatacttctctatcaactgcgtttatggttcgctggtgttctg

SEQ ID NO: 42185 - DNA, 2914 bp, Zea Mays
ctccgtccttcgtcccccccgcagtcgtcgctgcccgcgaatccgagattcatcgtgcatgcgcggcgcctggcggttcccgcgctccaaattgctggtcgaggaccagtgattgatcctgctaaatgtcgattgatgagtgtggatgaaaagcgagaactcgttcgtgatttatcaaagagcccagaaagtgctcctgacaggctccagtcatggacccggcgagaaattgtagagattctttgttctgatcttggaagggagaggaaatatactggtttatccaagcagagaatgctagattatctatttaggttggtgtctggaaaatcatctggtccagtggaacatgtgcaagagaaagagaaagggagagagaaagggaaagagagagaaaaagaatcaattcctgagcccaatacaactaaccaccatcagtcccctgccaaacgaccaagaaagagtgataacccatcacgattaccgattatcacaaacaactcagcagcatctgatgtaactgggccaactaataattcacggttctgtcaaaatgtagcttgcagagctattctcagggacaatttttgcagacgctgttcatgctgcatttgtttcagttatgatgataacaaggacccaagcctctggttgtcctgtagttcagaccaacacttacaaaaggatacctgtggtttctcatgccatcttgaatgtgctctaaaggatgaaagaacaggtattctgcagagtggacaatgcaagaaacttgatggtggctattattgcactcgctgttggaaacagaatgatttgcttgggtcctggaagaaacaactggtgatagcaaaagatgctcggcgattggatgtgttgtgtcatcggatttatctcagtcacaagatcctcgtctccacagaaaagtacttggtattgcatgagattgttgatacagcattgaagaaactggaggctgaggtcggtcctatatctggagctccaaatatgagtcgtggaattgtcagtcgacttactgttggtgccgaagttcagaaactttgtgctcaagcaatagatgctatggaatcattgttctcgggtgtatctcctgctggttcaagaatcccgcgaccatgtatggtaccaccaaattttgtgaagtttgaagctataacccaaacatctgtcatggtatttttggatttggttcactatcctatgcttgcccaagaggcaacttcatttaatatatggcaccgaatggctgttactgaagcttacctgacaaatccgactggcataatacttcccccatcgaaaaaattacctgtcactgggcttgcaccggctacaagctatatctttaagattattgctttcaaaaactcaatcgagttgggttcatgggaaattagaacgaagacaagctatcaaaaggatgatccaaggggttcaatgccaggtggtactagactaggacataatagtgagagcctgaaggcaaacagtgatggccagtctgatccttcctcagagggtgtggactcaaacaataatactgctgtttatgctgatctaaacaagtcccctgaaagtgattttgagtactgtgaaaatcctgagatcctagattcagataaagcgtctcgtcgcctcagcgaacacatcgatgacttgcaaaatatacagatggctgcagatagggtaacagaagtcactgagctggaagaatcgcctgggctctcagcctcagccttggatgaggaacccaacgcttgtgttcaagcagtgcttctcagggagccaaacccactaggacacaatcaaagaactgtagttcctagatcacagcatgcatctaatgtactgggtggaaatgagttggtgattgttggacctcgatatgctggttctgtgccacccattgcaacaagaggtctggaaaacagcaaggagagcggtggaaggggcttcaaacccaaaccttgtaacaacattttccaaaatggctcttcaaagcctgaaagggaaccgggcaattcgtcaaacaaaagaacagctggtaaaacggaggaccttggtcacaaggatagttcatctgaagtgtcctacgagtactgtgtaagggtggtcaggtggctggagtgcgagggctacatcgagacaaacttcagggtgaagtttctcacatggtttagcctgcgtgccaccccgcaggagagaaagatagtcggtgtctatgtggatacccttattgaggaccctgtcagcctttctggccagctcgttgacagcttctcggaggcggtatatagcaaaaagcggacgccttctggtttctgcatggacctgtggcattgaagcaccacaagcacctaccgtttgctttgtagggagcacacattcgggcccattcttttgttgcagatcgttgcattgattcttcattggaaatttcgctgaagtatttgacttgcacatcttcattgaaacttaacttttcaatgacagtaggttaagttaatgggcaatttctttttttctttttccgttctttacatttgctccatagtaggttaccgtgctatcatctgtaccgtccatgttaaccttagagcatcaatgagccgcatcgttcggtcagcctggggcatagtggattttgtggcgtgtggctgctcgaaggatgattgtcaggctggaccaggaatgcgcctttctgtgggatgaagcagattcgtatggacgttgtcagtgaaatggttgtgctgtacctggggttttgcattttcttgctgactttgttgggaatgggaggaatgacgtttaagatgcagaatgtctgccttattaattaatcttatgttgactcatacttctctatcaactgcgtttatggttcgctggtgttctg

SEQ ID NO: 42186 - DNA, 1787 bp, Zea Mays
tatttttttataatttatgattaaaatacagatgcctaaatttttagcaaaattctaaatttaaatggttgcttgtcaaacttaatataactgaaccaccggcaaccgcgtgctctcctccacaggaccaccgccgcctcctcctcctcctctctgctgcggccgctgtaccgtcggtcgcctggacgggtgcggcggccacgtcttcgtcttcatcgtgacccacgacggagaggacacacacacacacagagagagagagaggcctggcgtcagggaggaagacgtctcgcctcgtctcgtcgtcttctgcggcgtccgttcttcaagccctcccccgtcgcccaccagtagcccgcccgcccgctccccaaggaggacgcagcggtttgccatgagaagacagctttggttgtgccaaagccaaacacgaacaccagcctaggaattccagcatgggttcagggaatctggtaacgaagaaggtggtaaggaggcccagctccatcgaccaggacataaagttcgatcaaagctgggtggaggatgtcgcgtgcccaatctgtctcgattccccccacaatgcagtgttgctcaggtgcgcctcgtatgagaagggctgtaggcctttcatatgcgacaccgaccagactcgctccaactgtctcgagaggttcagaggcgctcatggactgccactgccagtgccagccaacgccagagcctcctcccgtaccgtggctcctctcaacagcatccataccattaccatctcttcgtcgaatgcaaacaacaaccgcccggcttgcccgctgtgtagaggcgatgtgatggggtggttcgtcatcggcgaggctcgctcgcaccttaaccagaagagaagatgctgcgaagagagccgctgctcgtacgtcggcagcttccacgagctccagaggcacacccagcaaaagcatccggactcgcgcccttccgcgatcgaccctgctcgccgggccgattgggagaacctgcagcggtcttccgacgtggtagatgtcctgagcacaatacacgcgcaggttccaaacggtgtggttcttggagactatgtcatcgagtacggggacggtgacgaagctggagacgacgactacgaggtttaccacggggttagagcaagctggtggacgtcctgtatcttctgcaaagcgttctgtaggtcttcccccccaggaggagtccggagaaggacgagaacaggggaaaggagaagcagtggtggaagtggaacaaggagcagcagcaacaggtctagctctagtcaagaaaggttcactcttgatgaagttgacgatggatatgtagttgcaggggccatggccagggctgccgtgtcagggacaatggatgctcgttacagggatccaacacttggacaccgacgttcgcattcctaggaacattaaccggggaggaaaataaggaaagctgtgctggtgtaggatgcaacaaaaaatcagatccgttctacctctgctcatttttattcttttttttctcttgggagcttcatgtacatatatatataaatatataaagattgtagggaacttttttttactgttgattcacagcaggttccagcatgttaggttcttcggtgtaaatatttagcttccttcccactacctggtggcaacgctggagaccgaccagcttctcctgccttggaaatccatcctttgtatctcagattgcttctctgaaatacagccacctgttaaggcgcttccaagctggttttc

SEQ ID NO: 42187 - DNA, 2652 bp, Zea Mays
ccaaaacaaccccttcgttttgcttcccctcttcgattcggtcctttccttcccaaccaaaccccctcaaacctgcgttcagggaaaaacatctttctttctctcagtcagtctattctcctcccacttgcaatccaaacgaaagcaagaagccgccgccgcttacagctagaggagaggagagagaggggagggaagggagggcccgagagggaggctccaggggccctgcattgcgtcgggctcgggactgtcgattgggccgccgggatggatcacggcggcgaggaccgcgtcgtggcggcgagcctcgcggcggcgcggcgcacgctgcgcgccggcttggacaagtcgcgcgcgctgggccacgcgctagcccgcgcggggccccgcctgaaggagatccaagcggcgctgccggtgctggaggccgcagtgcgcccgatccgcgcgccgcgggccgagctcgccgccgccgggccccacatcgaccgcgccgtgggccccgccgccgccgtgctcaaggtgttcgatgccgtgcacggtctcgagccgccgctcctggcgcccggcgccgcgggctctggcgcggctggggacttgccggggtacctcgccgtcctggcgcagctcgaggaggcgcacaggttcctcgccgacaactgcgggctcgccgcgcagtggctcgccgacattgtcgagtacctcggcgaccgtttcctcgtcgacccgcgcttcctcgccgacatcgaggtcacgctcgacgagctcaaggcaccccctaccggcgacctcgacggagggctcctggccgccgccctcggtatcctcgaggccgagttccgccgcctcctcgccgaccattccgcgccgctcgcgatgccgcagcccggcgccgccgctggctcaaccgcgccatcccgcgtgcctgccgctgccgtccacaaactcaccctcattctcgatcgcctcgtggccaacggcaggcaagaccgctgcgtggccgtttatatcgacgcgcgcgggggtgtggtcagtgccagtcttcgcgctcttggcctagactacctgcgtgagccgtctcaggatgcacaggcattgggacctgctcttgagctgtgggggcggcatctagagtttgtggtccgccgtctcctcgagtcggagcggcagctctgtgccaaggtgtttggcctgcataaggatgtcgcgtccgcatgctttgcagaggtggcggcacaagctggggttcttgaattcttgaggtttggccgtgcagttgctgatgccaagaaggatcccatcaagcttcagcgtctgctcgaggtgtttgattctttgaataagctgagactggatttcaataggttgttcggtggcaaagcatgtgcggagattcagagccagacaagggaccttgtcaagttgttgatagacggtgctgtcgagatctttgaggagttgatcgtgcaggtggagctacagcggcacatgcctcccccagtcgatgggggcgtgccacgcttagttacctttgttgtcgagtactgcaaccgtctgcttggtgagcaatacaggcccatgcttgggcaggtgctaactatccatcgcagctggcgcaaagaggtgttcaatgacaggatgcttgttgatgtggtgctaaacattgtcaaggcccttgaagctaattttgatgtttggtccaaggcatatgacaatgctacgctctcgtatctcttcatgatgaatactcattggcatttctttaggcatttgaaggctactaagttaggagagatcttgggtgatgtgtggctgcgagagcatgaacaatacaaggactactatttgtcaatgttcatcagggagagctggggagcactttcgccactactgaaccgggagggattaatactgttctccaagggccaggctacggcaagggacctggtgaagcagcgcctcaaaacattcaattcaagcttcgatgagatgcattgcaggcaatcatcatgggttataccagacaaggatttgcgggagaggacatgtaatcttgtggtgcagactattgttcctgcctatcggagctacttgcagaactatgggccacttgttgagcaagatggaaacaccagcaagtatgtaaggatggatggaaggaactaaggaacttgaaatcatggacactgccacactgcactattgggcattcgcattcagggcaatagaagcatctgaaatccgtttggagaattttgtttgtttattccccattgcactaagataccttggagcaatctgacagtcttaatgggccacagaaagtttgggcaggaaacaaacacttagtggcagatgaaatagcttttgatctggactcgcatccaatagccgagacacccttcttccatgcctgcatggggtcatttagacgccggggaactgcagctgcctaccaaactcttgatcgagctcagcaccagccaccagattgaaattgttggcaggacatggacgttggatgagcatggggattttcagaaggaatggttcgtgcagaacatgccaattgtcatagagccatggaggtcctctagcggatcaatcaaggccacaaacatgcaaacacaagagtcaaaacaagcacag

SEQ ID NO: 42188 - DNA, 2522 bp, Zea Mays
ctcccacttgcaatccaaacgaaagcaagaagccgccgccgcttacagctagaggagaggagagagaggggagggaagggagggcccgagagggaggctccaggggccctgcattgcgtcgggctcgggactgtcgattgggccgccgggatggatcacggcggcgaggaccgcgtcgtggcggcgagcctcgcggcggcgcggcgcacgctgcgcgccggcttggacaagtcgcgcgcgctgggccacgcgctagcccgcgcggggccccgcctgaaggagatccaagcggcgctgccggtgctggaggccgcagtgcgcccgatccgcgcgccgcgggccgagctcgccgccgccgggccccacatcgaccgcgccgtgggccccgccgccgccgtgctcaaggtgttcgatgccgtgcacggtctcgagccgccgctcctggcgcccggcgccgcgggctctggcgcggctggggacttgccggggtacctcgccgtcctggcgcagctcgaggaggcgcacaggttcctcgccgacaactgcgggctcgccgcgcagtggctcgccgacattgtcgagtacctcggcgaccgtttcctcgtcgacccgcgcttcctcgccgacatcgaggtcacgctcgacgagctcaaggcaccccctaccggcgacctcgacggagggctcctggccgccgccctcggtatcctcgaggccgagttccgccgcctcctcgccgaccattccgcgccgctcgcgatgccgcagcccggcgccgccgctggctcaaccgcgccatcccgcgtgcctgccgctgccgtccacaaactcaccctcattctcgatcgcctcgtggccaacggcaggcaagaccgctgcgtggccgtttatatcgacgcgcgcgggggtgtggtcagtgccagtcttcgcgctcttggcctagactacctgcgtgagccgtctcaggatgcacaggcattgggacctgctcttgagctgtgggggcggcatctagagtttgtggtccgccgtctcctcgagtcggagcggcagctctgtgccaaggtgtttggcctgcataaggatgtcgcgtccgcatgctttgcagaggtggcggcacaagctggggttcttgaattcttgaggttgttcggtggcaaagcatgtgcggagattcagagccagacaagggaccttgtcaagttgttgatagacggtgctgtcgagatctttgaggagttgatcgtgcaggtggagctacagcggcacatgcctcccccagtcgatgggggcgtgccacgcttagttacctttgttgtcgagtactgcaaccgtctgcttggtgagcaatacaggcccatgcttgggcaggtgctaactatccatcgcagctggcgcaaagaggtgttcaatgacaggatgcttgttgatgtggtgctaaacattgtcaaggcccttgaagctaattttgatgtttggtccaaggcatatgacaatgctacgctctcgtatctcttcatgatgaatactcattggcatttctttaggcatttgaaggctactaagttaggagagatcttgggtgatgtgtggctgcgagagcatgaacaatacaaggactactatttgtcaatgttcatcagggagagctggggagcactttcgccactactgaaccgggagggattaatactgttctccaagggccaggctacggcaagggacctggtgaagcagcgcctcaaaacattcaattcaagcttcgatgagatgcattgcaggcaatcatcatgggttataccagacaaggatttgcgggagaggacatgtaatcttgtggtgcagactattgttcctgcctatcggagctacttgcagaactatgggccacttgttgagcaagatggaaacaccagcaagtatgtaaggtacactgttgatggtttggagaagatgctcagtgccctttacatgccccggcccaggagggctgggagcttccagatcaaacactcgagtggatggatggaaggaactaaggaacttgaaatcatggacactgccacactgcactattgggcattcgcattcagggcaatagaagcatctgaaatccgtttggagaattttgtttgtttattccccattgcactaagataccttggagcaatctgacagtcttaatgggccacagaaagtttgggcaggaaacaaacacttagtggcagatgaaatagcttttgatctggactcgcatccaatagccgagacacccttcttccatgcctgcatggggtcatttagacgccggggaactgcagctgcctaccaaactcttgatcgagctcagcaccagccaccagattgaaattgttggcaggacatggacgttggatgagcatggggattttcagaaggaatggttcgtgcagaacatgccaattgtcatagagccatggaggtcctctagcggatcaatcaaggccacaaacatgcaaacacaagagtcaaaacaagcacag

SEQ ID NO: 42189 - DNA, 2097 bp, Zea Mays
atgccaagaacataggagtaacagatggattatcaccagtagcctttgcaaaccgagatacacaagctatttgatcaaggcacgctaataacagccatctcaggaatacagcgaggaatcaaggtcacagaggggtttgcaatgttccactgtccacacctatatataacaacaacatccacggctatcacaaaaagttcaagaacacagaaggtgccaacgtctaatattaagacaacacgctaggatcgtcatttctccttcaaaacataggatcatgatggattaattaaagggtcctctgcagcctcgaaatcggtcctcaatccagtggaactcttcagcagcttcaacacggactatcctgaaaacagaacatttcccaaatggttagtagatcagattacgacagtgatttagagttgcattacagtaaaccataataaaaattcctaaacattgtgcacccccttcggaaggaacaatcctgcaaatacagaaacagatgcaaatttaattacatgcacatcacaagaggggtcaccaagtaacttaaatatacaagctctaactcaaataccacccagttcaagcttcacaacaatatggatgaagatacatggacatccagcctgtcaatgcgtttgcatatcagattcttcctttgcattcttaacaaacaggaaaaaacataaggcagaaaataaacacaatacagtcatacaaatcaactactgcttgataatacatgttcaaatggtaacaagtgcccaactagctgacaacagtcaagcatcacaagtgagtacaaccagcagcccaaaacagcgcctccctctgcagggactccaccagccacctttcctctccgagagaccatgccccagccacccgcccggcctccagccagcacagccaacaacggcctgcatgatcagccgcctggccccaaccctggccaccctgaccctgctggctattgtagccacacacagccgtcccctacacccaccaatggtcagcccctacaagcttgtgcagttgtgctgtttaatggatggatatgtttgcatggagacatatcaacactcaatagataatcccattcctatactttggtgctgaactggcaaaacatacatgattaatctacttcatctaggctgttcttgcacagagctgtaaaagccaaagcatcagataaagtatgtaacaggcttttaatggggcttcaaacaaatgaagaaaatgaaaatacagtagttgtctaatgtctcatgcttgtattttgagtttccatcagtatacaagtccagaatctagtttttgttgtgctcaaatcagtggccaaagaacttgatccatgatttgcttctttcctagattcacttatttgaaagatttgcatttaaccttaagtacaagcctttggttacctaattaatgtgtagatttctccatatatctgttagcagaatatgatactttaaaattaattccagatagtttcctaattactgtagtcagatttcttaactagagtactataaatattctaaaactgaccatatatcctccttttaaaggctggcacaacatattgattagaaccaaaatcagcatatataacttatttttttcaaaaataaataaatccaagcataatttacccaaccttcatatttgtttataacactttcaaatataatgtagaaattgattcaatttgtagccagccactgacattgccatttttgtgctttttacttatcatattatctattgctgtatggctagcacgatttgtaatcttctattatttagcccccctgccccatttctggatccgccactgatacacagcatgaagttgtatatattcattaaagaacaagaaatcactgtggcgaactaaaaccataccatgaagttggttcctaaaatacagaagtcatctacgataatagatttgagctgcataatctaaggatatagaaaaagaactcaaaacagaaaaaaatattattgtacacaaaattgggagtaagaaagactcacgttaatcagacgaacattgccaactctgggcgactaaat

SEQ ID NO: 42190 - DNA, 4768 bp, Zea Mays
ctcctgcgtgcgcgctagatccgcgtcgatcgagtccatggcggtggcgcgggcgggggcgagtagggtttggtttggtttggtttggtggacgaaatggaagatgcgaattgcgatgcgagattggagaagggaaggggactagctagcgggactgcggggagacgggagacgcccttcacccctgaccagtgacaacgtgtattgggttgaaatgtcggcacaatggctagatcttgtccgttgattgtcgtagacgcgatctgggccgttcatttgtggtaccgacttctccaaacaaaggcctcgcccccaaacggccaacccaatcgatcgtccccaatccgttcaggcagtccccgacatcgccatcgccgccgccgctctccatcataaacaatctactcctcgtcgcctcgcgtccgtatacttgaccgcccccttctcctacttgtaattcccctcctgcttgtgtggcaggggcctctcccgcgcgatggggaagcacgagttcctgacgccgaaggcgatcgcgaaccggatcaaggcgaaggggctgcagaagctgcggtggtactgccagatgtgtcagaagcagtgccgcgacgagaacgggttcaagtgccactgcatgtcggagtcgcaccagcggcagatgcaggtgttcggcatggcgcccgaccgcgtcgtcgagggcttctccgaggaattcctcgagtccttcctctccctcatccgccgcgcgcaccgccactcccgcgtcgccgccaccgttgtctacaacgagtacatcgccgaccggcaccacgtccacatgaactctacgcggtgggccacgctcaccgagttcgtcaagctcctggggcgcgaagggtactgcaaggttgaggacacgcccaaggggtggttcatgacctacatcgaccgtgactcggagcaggccgtcaaggaccgcctcaagcgcaagaggatcaagtcagacatggctgaggacgagcgccaggagcgcatgatcgcccgccagattgagcgtgcgcacaagtccttagccaaacctaacgatggtgatgctgccgagggcgagcccgagtctggtggtgaagaagagtattcaggttcggatgatgatggggaggagctggaggatgtctcgaaagaggcaaacaaggcaacagggaagattgcgattgcgcttcagacggctgtgcgagggcctaaggttaatccttttgaagataagccggaggtgaaatttcgtttcgacgaggagggcgacttgggtaccggagaggagaaggatgagctggccaagaagaagggaaaggatgtgaaggcagcagatgcaaggaggtcagcattggacgagctgatgaaggaggaggagatggccaaggagaggagcaataggaaggactactggctgtgccctgggatcgtggtcaaggtgatgagcaagtcattggcagagaaggggtactacaagcagaaaggggtggtaaggaaagttatggataaatatgttggggagatagagatgttggagagcaagcatgttctcagggttgaccaagatgagctcgagaccgtgatccctcagatcggtgggctggtgcggatattgaatggtgcttatcggggatcaaatgccaggttgctctcagtggacactgagaaattctgtgcaaaagtgcaggttgagaaaggtctctatgatgggaaggttcttagggctgtcaaatacgaggacatttgcaagatatcctcatgatatacagtgatccattccattttcctggatcatcaccgaagcaaacaagcactatgcaacccagtgtactagctctgccagttacatatctgatagtgtttgtgcttgttactgcttgtgatggaatatcttctgttgaagcagtgttcaatatgttgttgtttctagttcattgtagctgctgaaaggctatgtgtggggaaacggtgtcatgtatatttgcttgttactagaccctgataattttgcaatatttggttaacttctatatttctgtctctagttaacctttaaccagatttattcttggtagtttgagcattacttttcaatcagttcttttgatcatgttgtcatatttttggatgctgatatgaaagtaaatgactcaactaaaagaacacggccaaaccataattgggaatcagtataagtagtttttataacggtatttttctatgatctatgatttgcatcttttttgtgaattgtgagtgtacttttgaaagttgtttgatttgatgacaactgtgaagtttctgcatttgacttctgaactgtagctttaaaagaagtagcaaaaggttgcatatatcttgttaacaaatttattgatgcaacatacattgtctagcaattccagatgaaatatacctagttcaaatatctcacaagtgacagcacggtcgccacttctgctttatccccaggtttcacctaaaaaagctccccgaactagtaaaatttaacaaattaacactgaaatgaaactgctattactctctgaaacttgagttctcttcagcctaataatagcatataagaatgctaaaatagtttcttaaaagcatcaatttacatatatactttttgttgagtatctctgctctgttcccgaactggaatttctgtagagttgtatctgcttggatggaacagaatgaaaagtcttcttggacaagtacgacgtccataccacgttaatcattgggtataacttatcttggaccttaatcctgattcgttggttgcatagatttgatatgtttgattgctggaagtgaccgccgtacctttctctataaaaataaaaaaagaggatgttttcatcttggacgcatccaggaccccttatcattgtgagttgatattttctcaagttatcttacagccgagctacttgggtttgtttcagattccatgtatacatttgaatatctgataaaaaaaagacaagttctatgaggtctttcttgccctttgctatatgttagtgttcttcagttgctaataagttcttagttactgttgtgactaatgcctgcgagtccagtgataataatcatctagctgtaactgtaagacccttttcatatgcatgtgttctgtgaccagttaccattcttatgtttatgtgcttgaaagcacctgtaatctactacaactaactataactaaaaatgacagacctagtgcctgagtctcgcacatgagtgggatctgaggaagagataaactgaggcaagccgttccctataaatgtggagaggttgcttcgaactcacaacctgctcactcagtgagacagttctcaccactgcataggtctgccctaagtctactaccactaaacactggaaatttgttttttgttcaagttcatcttgcatactttcaacagtgatctcccgaaacatgaatgtgaagtgtggcatgacaatatgcttcccttggtatgcacatgccatttccaccgtccatgaaaccatgacaccagatctggcaaatgtgtcagcttcctccattggggatgccatggcatgtgcaaccgtttgactctgttgttctgttcttcgcctatcgatcgtgaatgactaatgtgtcaggaagaaggcagcaactgttacttcagttatgcactctgatgcagcaacgcgagttcactttttttttttggccacaggcaaaggcaccatctatttgtttaaggtgcatcctcagtaatgatagtactttctatttgtttaatatgtgtttctcagtgagccaataaagttaaggtgcatgaacctctgatatagcatttgatacactgtactttacacagcacccaggaggaactcttgtgtgggtgtaggtacggctagaaggaagaaccatgcatgctacattcatataacctttttcagaggtttaagaaatcaaaactaatctgactttgattgtctgaaagaatttatgatgctgctgcttactttttgctgtagggggtcgatgcctactttagctgtgcaatcattcctcaatattaaaccgagtttgatcaagtaccttgaatctacaagtagcagtgatttgacaggcaaaagcggtagcaagaactgcgctttcagcagttgtacagacatgggagatatgacatagccaaggtcttggcgctgatattgacctcataacccctgaataaagaaagatgctaccagagattagtaaacgatcttaagcagaaaaaggtatcatttgcgaatgattagcaccagcaaaaaaaaactggggacacatacaactatctcaaacaccaggtctttcagtgttagtttcggatgccacctaaagctaggactagaggcgtccttctccaatccatgaactgtcaattggtctgcactgcaccaatgatgaggtcgaagcaaatcatgcatggtagttgctaagataagcggagcagagttggtgctgatggcgaacatctgggcccttttctcatcattagcggagtggggggaatctttcatcagttggatcgcacttgcattcttcacaagttcgtcaggtatttgacatgatatggaaagatcaacttaatatttagacgtatataattcagggaaccttttaggcaacttcacactcaactggctgttagctagttgttttctttgttgaggaaatactcctgaactctgcatgcacaatgataatgatgtcactaaagttccc

SEQ ID NO: 42191 - DNA, 3874 bp, Zea Mays
tgcgcgtcaccggacgggcgtctgacgatgattacggtggcggtgggcggtggccacggttacggcgtcctgtcgagtgtcgacgaactcgtccgcctcttttctttttcgcggttggcgctgccgctaccagaaaacaagggatgagaaaaccggggatcgcgggattttttcttcttcttcacgagcgttaatcgtgccgtccgttttcctcctccattcagccggagcgttgccgattcctacgcctggttgttggccaaggtgggtggtcgttgcttgaggctccgaaactccaggacctccaacgtcactgacggcacgagtcgtgcgcaacgcacggcgcgttgaagccggcgcccgaatcggataggctcgacggcgatgtgatgataagtagcagatgaccagagtctactctccccagtcgagcgagagtgaagagtcgtagcggagcggagcggaactgagtgtcgatcgccgactcgaatcgcggaggccggtacccggggatgagggttcaggacggggacgtggacggcggcggcgaggtgaccgcgccgccgcagcacctggtgttcgcctactacatcaccggtcacggcttcgggcacgccacccgcgccctcgaggtggtgaggcacctggtcgccgcggggcacgacgtgcacgtggtcaccgccgcgcccgagttcgtcttcaccaccgagatcgcctcccccagcctccacatccgcaaggtcctgctcgactgcggcgccgtccaggccgacgccctcacagtggaccgcctcgcctcgctcgagaagtatcaccagacggccgtggtgccccgggagtccatcctcaagaccgaggcggagtggctcaactccatcaaggccgaccttgtggtttcagatgttgtacccgtcgcgtgtagggcagctgcagatgctggcattcgatccgtgtgcgtcacaaatttcaggctgggacttcatttatgcagagtacgttgtagctgctggacatcatcatcgctcaattgtgtggcagatagcagaggattactcccattgtgaattcttgctcagactccccggatactgccctatgcctgctttccgtgatgtcattgatgttcctctggtggtcagaagattgcacagatctagaactgaggtgagaaaggaactagggatcgcaaatgatgttaaggtggtcattttcaactttggaggacagcctgccggatgggaactgaagaaagagtggttgcctgacggttggctatgtttggtatgtggtgcatctgatactcaagagctccctctaaatttcattaagcttgcaaaggatgcctacacacctgatttgatggcggcatctgactgcatgcttgggaaaatcggatatggcactgtgagtgaggctttggcttacaatctgccatttgtatttgttcgaagagattatttcaatgaggaaccatttttgcggaatatgcttgagcattatcaatgtggcattgagatgatacggagggatttacttactggccattggaaaccttatcttcaacgtgctatcacacttcaaccctgctatgatggtcccataaatggtggcaaggtagctgcacatatcctccaagatactgctgttgggaagaagtatatttctggaaagttgagcggagcaagacggttgcgtgatgccattgtgcttggctatcagcttcaaagggctcctgggagagatgtaggaattccttactggtattctcactctgagaaagaaattagtgttggcccagcgcccacatctcatgatatgaatggaagtgatgagtcatcgttcgaggactttgagatactccatggtgacatgcaaggcttaactgatactatgtcctttttgaagagtttatcagggcttgttggaaatgacttaagaagccctgagaagcaaactcgagagagggctgctgcttctgtgctctttgactgggaggaggaaatatatgttgcaagagcacctgggcgattagacgttatgggtggtatcgcagattactctggaagtcttgtattgcagatgcccatccgagaggcatgccatgttgctgttcagagaagtgaccctaccaaacagaagcaatggaagcatacacaggctagacaactagcaaatggaggagcagtaccagtgttacaaattgtatcctttggttctgaattaagtaatcgtgcacctacgtttgacatggacctttctgattttatggatggcgacaaaccaatatcttatgataatgtgaaggaatacttttctcgggatccatcccaaaaatgggctgcctatgttgctggaactatttttgtattgatggctgaactaggggtgcgctttaaagacagcatgagcattttggtttcttcatctgtccctgaaggcaaaggtgtctcctcttctgcatctgtggaggttgcttctatgtctgctatcgccgctgcctatggtttaaacattgctccaagggatcttgctttgctctgtcaaaaggttgagaatcgtgtcgtcggagctccttgtggagtaatggaccaaatgacatctgcttgtggagaagctaacaaactcctagcaatggtttgccagcctgcagaagtgaaggagttggttaacattccaactcatataagattttggggtcttgactctgggatacgtcatagtgttggtgggactgattatgggtctgtaagagtaggcacttacatgggccgcaagatgatcaagtgtgctgcatccaacctactttcagaattgttgctctcgtgtacgtctacgcaaccaggcgactcaagtcccgacgaatatgaaggacatggcgtcgacctcctgaaatctgaagcgtcaatggagtatctatgcaacttaccaccacataggtatgaagctgttttcgcgaaagaaattccggagacgatcactggcgatgcgtttttagagaagtatggagaccacaacgatgcggtaacagaagttgacccaaagcggtcttactgtgtcaaggctcctactagacatcccatatacgagaacttccgagtcgaggccttcaaagcgttgctaacagctgccaaaacagacgagcagctctcagcccttggagagctgatgttccagtgccactacagctacaacgcttgcgggctcggctctgacggcacagacaggctagtgaatctagttcaagaaatccggcacaggaagagctcgcgcgccggagggcccagcctgttcggcgcgaagatcaccggcggagggtccggcggctcggtctgcgtgatggggaagaactgcctgaaaagcagcgaggagatcctcgagatccagaagaggtacaaagcggcgactgggtacctcccgactgttttcgacggctcgtctcccggcgccggcaagtttgggtacctgaagattcggcgccggtccacgtcgccgtctgattgaagaagaagaagaaggaagagctctgctcggtcggccgtaccctcacggtcgtattgatcgtatcgtatcccacgcactacgcccaagatgccaataaatgggacagattgatcggcaataataatactagtagccatagaaaactctagtgataagctgcgaaacaacttgtatgtcgaagaaaatatttgaaaccatggtatctttgtggtcgatatctgaagtgagatgatgtgaatggctattggcgtatgttcatgtttgagctgtacggagaagaaaaggccgtatccaacaagagttcatctgcatagttacctcaaacacattatagaatgcactgaatataagagataagcaagctgataaatat

SEQ ID NO: 42192 - DNA, 3873 bp, Zea Mays
tgcgcgtcaccggacgggcgtctgacgatgattacggtggcggtgggcggtggccacggttacggcgtcctgtcgagtgtcgacgaactcgtccgcctcttttctttttcgcggttggcgctgccgctaccagaaaacaagggatgagaaaaccggggatcgcgggattttttcttcttcttcacgagcgttaatcgtgccgtccgttttcctcctccattcagccggagcgttgccgattcctacgcctggttgttggccaaggtgggtggtcgttgcttgaggctccgaaactccaggacctccaacgtcactgacggcacgagtcgtgcgcaacgcacggcgcgttgaagccggcgcccgaatcggataggctcgacggcgatgtgatgataagtagcagatgaccagagtctactctccccagtcgagcgagagtgaagagtcgtagcggagcggagcggaactgagtgtcgatcgccgactcgaatcgcggaggccggtacccggggatgagggttcaggacggggacgtggacggcggcggcgaggtgaccgcgccgccgcagcacctggtgttcgcctactacatcaccggtcacggcttcgggcacgccacccgcgccctcgaggtggtgaggcacctggtcgccgcggggcacgacgtgcacgtggtcaccgccgcgcccgagttcgtcttcaccaccgagatcgcctcccccagcctccacatccgcaaggtcctgctcgactgcggcgccgtccaggccgacgccctcacagtggaccgcctcgcctcgctcgagaagtatcaccagacggccgtggtgccccgggagtccatcctcaagaccgaggcggagtggctcaactccatcaaggccgaccttgtggtttcagatgttgtacccgtcgcgtgtagggcagctgcagatgctggcattcgatccgtgtgcgtcacaaatttcagctgggacttcatttatgcagagtacgttgtagctgctggacatcatcatcgctcaattgtgtggcagatagcagaggattactcccattgtgaattcttgctcagactccccggatactgccctatgcctgctttccgtgatgtcattgatgttcctctggtggtcagaagattgcacagatctagaactgaggtgagaaaggaactagggatcgcaaatgatgttaaggtggtcattttcaactttggaggacagcctgccggatgggaactgaagaaagagtggttgcctgacggttggctatgtttggtatgtggtgcatctgatactcaagagctccctctaaatttcattaagcttgcaaaggatgcctacacacctgatttgatggcggcatctgactgcatgcttgggaaaatcggatatggcactgtgagtgaggctttggcttacaatctgccatttgtatttgttcgaagagattatttcaatgaggaaccatttttgcggaatatgcttgagcattatcaatgtggcattgagatgatacggagggatttacttactggccattggaaaccttatcttcaacgtgctatcacacttcaaccctgctatgatggtcccataaatggtggcaaggtagctgcacatatcctccaagatactgctgttgggaagaagtatatttctggaaagttgagcggagcaagacggttgcgtgatgccattgtgcttggctatcagcttcaaagggctcctgggagagatgtaggaattccttactggtattctcactctgagaaagaaattagtgttggcccagcgcccacatctcatgatatgaatggaagtgatgagtcatcgttcgaggactttgagatactccatggtgacatgcaaggcttaactgatactatgtcctttttgaagagtttatcagggcttgttggaaatgacttaagaagccctgagaagcaaactcgagagagggctgctgcttctgtgctctttgactgggaggaggaaatatatgttgcaagagcacctgggcgattagacgttatgggtggtatcgcagattactctggaagtcttgtattgcagatgcccatccgagaggcatgccatgttgctgttcagagaagtgaccctaccaaacagaagcaatggaagcatacacaggctagacaactagcaaatggaggagcagtaccagtgttacaaattgtatcctttggttctgaattaagtaatcgtgcacctacgtttgacatggacctttctgattttatggatggcgacaaaccaatatcttatgataatgtgaaggaatacttttctcgggatccatcccaaaaatgggctgcctatgttgctggaactatttttgtattgatggctgaactaggggtgcgctttaaagacagcatgagcattttggtttcttcatctgtccctgaaggcaaaggtgtctcctcttctgcatctgtggaggttgcttctatgtctgctatcgccgctgcctatggtttaaacattgctccaagggatcttgctttgctctgtcaaaaggttgagaatcgtgtcgtcggagctccttgtggagtaatggaccaaatgacatctgcttgtggagaagctaacaaactcctagcaatggtttgccagcctgcagaagtgaaggagttggttaacattccaactcatataagattttggggtcttgactctgggatacgtcatagtgttggtgggactgattatgggtctgtaagagtaggcacttacatgggccgcaagatgatcaagtgtgctgcatccaacctactttcagaattgttgctctcgtgtacgtctacgcaaccaggcgactcaagtcccgacgaatatgaaggacatggcgtcgacctcctgaaatctgaagcgtcaatggagtatctatgcaacttaccaccacataggtatgaagctgttttcgcgaaagaaattccggagacgatcactggcgatgcgtttttagagaagtatggagaccacaacgatgcggtaacagaagttgacccaaagcggtcttactgtgtcaaggctcctactagacatcccatatacgagaacttccgagtcgaggccttcaaagcgttgctaacagctgccaaaacagacgagcagctctcagcccttggagagctgatgttccagtgccactacagctacaacgcttgcgggctcggctctgacggcacagacaggctagtgaatctagttcaagaaatccggcacaggaagagctcgcgcgccggagggcccagcctgttcggcgcgaagatcaccggcggagggtccggcggctcggtctgcgtgatggggaagaactgcctgaaaagcagcgaggagatcctcgagatccagaagaggtacaaagcggcgactgggtacctcccgactgttttcgacggctcgtctcccggcgccggcaagtttgggtacctgaagattcggcgccggtccacgtcgccgtctgattgaagaagaagaagaaggaagagctctgctcggtcggccgtaccctcacggtcgtattgatcgtatcgtatcccacgcactacgcccaagatgccaataaatgggacagattgatcggcaataataatactagtagccatagaaaactctagtgataagctgcgaaacaacttgtatgtcgaagaaaatatttgaaaccatggtatctttgtggtcgatatctgaagtgagatgatgtgaatggctattggcgtatgttcatgtttgagctgtacggagaagaaaaggccgtatccaacaagagttcatctgcatagttacctcaaacacattatagaatgcactgaatataagagataagcaagctgataaatat

SEQ ID NO: 42193 - DNA, 3654 bp, Zea Mays
cgagcgttaatcgtgccgtccgttttcctcctccattcagccgggtgggtggtcgttgcttgaggctccgaaactccaggacctccaacgtcactgacggcacgagtcgtgcgcaacgcacggcgcgttgaagccggcgcccgaatcggataggctcgacggcgatgtgatgataagtagcagatgaccagagtctactctccccagtcgagcgagagtgaagagtcgtagcggagcggagcggaactgagtgtcgatcgccgactcgaatcgcggaggccggtacccggggatgagggttcaggacggggacgtggacggcggcggcgaggtgaccgcgccgccgcagcacctggtgttcgcctactacatcaccggtcacggcttcgggcacgccacccgcgccctcgaggtggtgaggcacctggtcgccgcggggcacgacgtgcacgtggtcaccgccgcgcccgagttcgtcttcaccaccgagatcgcctcccccagcctccacatccgcaaggtcctgctcgactgcggcgccgtccaggccgacgccctcacagtggaccgcctcgcctcgctcgagaagtatcaccagacggccgtggtgccccgggagtccatcctcaagaccgaggcggagtggctcaactccatcaaggccgaccttgtggtttcagatgttgtacccgtcgcgtgtagggcagctgcagatgctggcattcgatccgtgtgcgtcacaaatttcaggctgggacttcatttatgcagagtacgttgtagctgctggacatcatcatcgctcaattgtgtggcagatagcagaggattactcccattgtgaattcttgctcagactccccggatactgccctatgcctgctttccgtgatgtcattgatgttcctctggtggtcagaagattgcacagatctagaactgaggtgagaaaggaactagggatcgcaaatgatgttaaggtggtcattttcaactttggaggacagcctgccggatgggaactgaagaaagagtggttgcctgacggttggctatgtttggtatgtggtgcatctgatactcaagagctccctctaaatttcattaagcttgcaaaggatgcctacacacctgatttgatggcggcatctgactgcatgcttgggaaaatcggatatggcactgtgagtgaggctttggcttacaatctgccatttgtatttgttcgaagagattatttcaatgaggaaccatttttgcggaatatgcttgagcattatcaatgtggcattgagatgatacggagggatttacttactggccattggaaaccttatcttcaacgtgctatcacacttcaaccctgctatgatggtcccataaatggtggcaaggtagctgcacatatcctccaagatactgctgttgggaagaagtatatttctggaaagttgagcggagcaagacggttgcgtgatgccattgtgcttggctatcagcttcaaagggctcctgggagagatgtaggaattccttactggtattctcactctgagaaagaaattagtgttggcccagcgcccacatctcatgatatgaatggaagtgatgagtcatcgttcgaggactttgagatactccatggtgacatgcaaggcttaactgatactatgtcctttttgaagagtttatcagggcttgttggaaatgacttaagaagccctgagaagcaaactcgagagagggctgctgcttctgtgctctttgactgggaggaggaaatatatgttgcaagagcacctgggcgattagacgttatgggtggtatcgcagattactctggaagtcttgtattgcagatgcccatccgagaggcatgccatgttgctgttcagagaagtgaccctaccaaacagaagcaatggaagcatacacaggctagacaactagcaaatggaggagcagtaccagtgttacaaattgtatcctttggttctgaattaagtaatcgtgcacctacgtttgacatggacctttctgattttatggatggcgacaaaccaatatcttatgataatgtgaaggaatacttttctcgggatccatcccaaaaatgggctgcctatgttgctggaactatttttgtattgatggctgaactaggggtgcgctttaaagacagcatgagcattttggtttcttcatctgtccctgaaggcaaaggtgtctcctcttctgcatctgtggaggttgcttctatgtctgctatcgccgctgcctatggtttaaacattgctccaagggatcttgctttgctctgtcaaaaggttgagaatcgtgtcgtcggagctccttgtggagtaatggaccaaatgacatctgcttgtggagaagctaacaaactcctagcaatggtttgccagcctgcagaagtgaaggagttggttaacattccaactcatataagattttggggtcttgactctgggatacgtcatagtgttggtgggactgattatgggtctgtaagagtaggcacttacatgggccgcaagatgatcaagtgtgctgcatccaacctactttcagaattgttgctctcgtgtacgtctacgcaaccaggcgactcaagtcccgacgaatatgaaggacatggcgtcgacctcctgaaatctgaagcgtcaatggagtatctatgcaacttaccaccacataggtatgaagctgttttcgcgaaagaaattccggagacgatcactggcgatgcgtttttagagaagtatggagaccacaacgatgcggtaacagaagttgacccaaagcggtcttactgtgtcaaggctcctactagacatcccatatacgagaacttccgagtcgaggccttcaaagcgttgctaacagctgccaaaacagacgagcagctctcagcccttggagagctgatgttccagtgccactacagctacaacgcttgcgggctcggctctgacggcacagacaggctagtgaatctagttcaagaaatccggcacaggaagagctcgcgcgccggagggcccagcctgttcggcgcgaagatcaccggcggagggtccggcggctcggtctgcgtgatggggaagaactgcctgaaaagcagcgaggagatcctcgagatccagaagaggtacaaagcggcgactgggtacctcccgactgttttcgacggctcgtctcccggcgccggcaagtttgggtacctgaagattcggcgccggtccacgtcgccgtctgattgaagaagaagaagaaggaagagctctgctcggtcggccgtaccctcacggtcgtattgatcgtatcgtatcccacgcactacgcccaagatgccaataaatgggacagattgatcggcaataataatactagtagccatagaaaactctagtgataagctgcgaaacaacttgtatgtcgaagaaaatatttgaaaccatggtatctttgtggtcgatatctgaagtgagatgatgtgaatggctattggcgtatgttcatgtttgagctgtacggagaagaaaaggccgtatccaacaagagttcatctgcatagttacctcaaacacattatagaatgcactgaatataagagataagcaagctgataaatat

SEQ ID NO: 42194 - DNA, 3083 bp, Zea Mays
ctcgcctcgctcgagaaggtatcaccagacggccgtggtgccccgggagtccatcctcaagaccgaggcggagtggctcaactccatcaaggccgaccttgtggtttcagatgttgtacccgtcgcgtgtagggcagctgcagatgctggcattcgatccgtgtgcgtcacaaatttcagctgggacttcatttatgcagagtacgttgtagctgctggacatcatcatcgctcaattgtgtggcagatagcagaggattactcccattgtgaattcttgctcagactccccggatactgccctatgcctgctttccgtgatgtcattgatgttcctctggtggtcagaagattgcacagatctagaactgaggtgagaaaggaactagggatcgcaaatgatgttaaggtggtcattttcaactttggaggacagcctgccggatgggaactgaagaaagagtggttgcctgacggttggctatgtttggtatgtggtgcatctgatactcaagagctccctctaaatttcattaagcttgcaaaggatgcctacacacctgatttgatggcggcatctgactgcatgcttgggaaaatcggatatggcactgtgagtgaggctttggcttacaatctgccatttgtatttgttcgaagagattatttcaatgaggaaccatttttgcggaatatgcttgagcattatcaatgtggcattgagatgatacggagggatttacttactggccattggaaaccttatcttcaacgtgctatcacacttcaaccctgctatgatggtcccataaatggtggcaaggtagctgcacatatcctccaagatactgctgttgggaagaagtatatttctggaaagttgagcggagcaagacggttgcgtgatgccattgtgcttggctatcagcttcaaagggctcctgggagagatgtaggaattccttactggtattctcactctgagaaagaaattagtgttggcccagcgcccacatctcatgatatgaatggaagtgatgagtcatcgttcgaggactttgagatactccatggtgacatgcaaggcttaactgatactatgtcctttttgaagagtttatcagggcttgttggaaatgacttaagaagccctgagaagcaaactcgagagagggctgctgcttctgtgctctttgactgggaggaggaaatatatgttgcaagagcacctgggcgattagacgttatgggtggtatcgcagattactctggaagtcttgtattgcagatgcccatccgagaggcatgccatgttgctgttcagagaagtgaccctaccaaacagaagcaatggaagcatacacaggctagacaactagcaaatggaggagcagtaccagtgttacaaattgtatcctttggttctgaattaagtaatcgtgcacctacgtttgacatggacctttctgattttatggatggcgacaaaccaatatcttatgataatgtgaaggaatacttttctcgggatccatcccaaaaatgggctgcctatgttgctggaactatttttgtattgatggctgaactaggggtgcgctttaaagacagcatgagcattttggtttcttcatctgtccctgaaggcaaaggtgtctcctcttctgcatctgtggaggttgcttctatgtctgctatcgccgctgcctatggtttaaacattgctccaagggatcttgctttgctctgtcaaaaggttgagaatcgtgtcgtcggagctccttgtggagtaatggaccaaatgacatctgcttgtggagaagctaacaaactcctagcaatggtttgccagcctgcagaagtgaaggagttggttaacattccaactcatataagattttggggtcttgactctgggatacgtcatagtgttggtgggactgattatgggtctgtaagagtaggcacttacatgggccgcaagatgatcaagtgtgctgcatccaacctactttcagaattgttgctctcgtgtacgtctacgcaaccaggcgactcaagtcccgacgaatatgaaggacatggcgtcgacctcctgaaatctgaagcgtcaatggagtatctatgcaacttaccaccacataggtatgaagctgttttcgcgaaagaaattccggagacgatcactggcgatgcgtttttagagaagtatggagaccacaacgatgcggtaacagaagttgacccaaagcggtcttactgtgtcaaggctcctactagacatcccatatacgagaacttccgagtcgaggccttcaaagcgttgctaacagctgccaaaacagacgagcagctctcagcccttggagagctgatgttccagtgccactacagctacaacgcttgcgggctcggctctgacggcacagacaggctagtgaatctagttcaagaaatccggcacaggaagagctcgcgcgccggagggcccagcctgttcggcgcgaagatcaccggcggagggtccggcggctcggtctgcgtgatggggaagaactgcctgaaaagcagcgaggagatcctcgagatccagaagaggtacaaagcggcgactgggtacctcccgactgttttcgacggctcgtctcccggcgccggcaagtttgggtacctgaagattcggcgccggtccacgtcgccgtctgattgaagaagaagaagaaggaagagctctgctcggtcggccgtaccctcacggtcgtattgatcgtatcgtatcccacgcactacgcccaagatgccaataaatgggacagattgatcggcaataataatactagtagccatagaaaactctagtgataagctgcgaaacaacttgtatgtcgaagaaaatatttgaaaccatggtatctttgtggtcgatatctgaagtgagatgatgtgaatggctattggcgtatgttcatgtttgagctgtacggagaagaaaaggccgtatccaacaagagttcatctgcatagttacctcaaacacattatagaatgcactgaatataagagataagcaagctgataaatat

SEQ ID NO: 42195 - DNA, 2874 bp, Zea Mays
agatgttgtacccgtcgcgtgtagggcagctgcagatgctggcattcgatccgtgtgcgtcacaaatttcagagctgggacttcatttatgcagagtacgttgtagctgctggacatcatcatcgctcaattgtgtggcagatagcagaggattactcccattgtgaattcttgctcagactccccggatactgccctatgcctgctttccgtgatgtcattgatgttcctctggtggtcagaagattgcacagatctagaactgaggtgagaaaggaactagggatcgcaaatgatgttaaggtggtcattttcaactttggaggacagcctgccggatgggaactgaagaaagagtggttgcctgacggttggctatgtttgggaaaatcggatatggcactgtgagtgaggctttggcttacaatctgccatttgtatttgttcgaagagattatttcaatgaggaaccatttttgcggaatatgcttgagcattatcaatgtggcattgagatgatacggagggatttacttactggccattggaaaccttatcttcaacgtgctatcacacttcaaccctgctatgatggtcccataaatggtggcaaggtagctgcacatatcctccaagatactgctgttgggaagaagtatatttctggaaagttgagcggagcaagacggttgcgtgatgccattgtgcttggctatcagcttcaaagggctcctgggagagatgtaggaattccttactggtattctcactctgagaaagaaattagtgttggcccagcgcccacatctcatgatatgaatggaagtgatgagtcatcgttcgaggactttgagatactccatggtgacatgcaaggcttaactgatactatgtcctttttgaagagtttatcagggcttgttggaaatgacttaagaagccctgagaagcaaactcgagagagggctgctgcttctgtgctctttgactgggaggaggaaatatatgttgcaagagcacctgggcgattagacgttatgggtggtatcgcagattactctggaagtcttgtattgcagatgcccatccgagaggcatgccatgttgctgttcagagaagtgaccctaccaaacagaagcaatggaagcatacacaggctagacaactagcaaatggaggagcagtaccagtgttacaaattgtatcctttggttctgaattaagtaatcgtgcacctacgtttgacatggacctttctgattttatggatggcgacaaaccaatatcttatgataatgtgaaggaatacttttctcgggatccatcccaaaaatgggctgcctatgttgctggaactatttttgtattgatggctgaactaggggtgcgctttaaagacagcatgagcattttggtttcttcatctgtccctgaaggcaaaggtgtctcctcttctgcatctgtggaggttgcttctatgtctgctatcgccgctgcctatggtttaaacattgctccaagggatcttgctttgctctgtcaaaaggttgagaatcgtgtcgtcggagctccttgtggagtaatggaccaaatgacatctgcttgtggagaagctaacaaactcctagcaatggtttgccagcctgcagaagtgaaggagttggttaacattccaactcatataagattttggggtcttgactctgggatacgtcatagtgttggtgggactgattatgggtctgtaagagtaggcacttacatgggccgcaagatgatcaagtgtgctgcatccaacctactttcagaattgttgctctcgtgtacgtctacgcaaccaggcgactcaagtcccgacgaatatgaaggacatggcgtcgacctcctgaaatctgaagcgtcaatggagtatctatgcaacttaccaccacataggtatgaagctgttttcgcgaaagaaattccggagacgatcactggcgatgcgtttttagagaagtatggagaccacaacgatgcggtaacagaagttgacccaaagcggtcttactgtgtcaaggctcctactagacatcccatatacgagaacttccgagtcgaggccttcaaagcgttgctaacagctgccaaaacagacgagcagctctcagcccttggagagctgatgttccagtgccactacagctacaacgcttgcgggctcggctctgacggcacagacaggctagtgaatctagttcaagaaatccggcacaggaagagctcgcgcgccggagggcccagcctgttcggcgcgaagatcaccggcggagggtccggcggctcggtctgcgtgatggggaagaactgcctgaaaagcagcgaggagatcctcgagatccagaagaggtacaaagcggcgactgggtacctcccgactgttttcgacggctcgtctcccggcgccggcaagtttgggtacctgaagattcggcgccggtccacgtcgccgtctgattgaagaagaagaagaaggaagagctctgctcggtcggccgtaccctcacggtcgtattgatcgtatcgtatcccacgcactacgcccaagatgccaataaatgggacagattgatcggcaataataatactagtagccatagaaaactctagtgataagctgcgaaacaacttgtatgtcgaagaaaatatttgaaaccatggtatctttgtggtcgatatctgaagtgagatgatgtgaatggctattggcgtatgttcatgtttgagctgtacggagaagaaaaggccgtatccaacaagagttcatctgcatagttacctcaaacacattatagaatgcactgaatataagagataagcaagctgataaatat

SEQ ID NO: 42196 - DNA, 2920 bp, Zea Mays
gtcacaaatttcagcagctgggacttcatttatgcagagtacgttgtagctgctggacatcatcatcgctcaattgtgtggcagatagcagaggattactcccattgtgaattcttgctcagactccccggatactgccctatgcctgctttccgtgatgtcattgatgttcctctggtggtcagaagattgcacagatctagaactgaggtgagaaaggaactagggatcgcaaatgatgttaaggtggtcattttcaactttggaggacagcctgccggatgggaactgaagaaagagtggttgcctgacggttggctatgtttggtatgtggtgcatctgatactcaagagctccctctaaatttcattaagcttgcaaaggatgcctacacacctgatttgatggcggcatctgactgcatgcttgggaaaatcggatatggcactgtgagtgaggctttggcttacaatctgccatttgtatttgttcgaagagattatttcaatgaggaaccatttttgcggaatatgcttgagcattatcaatgtggcattgagatgatacggagggatttacttactggccattggaaaccttatcttcaacgtgctatcacacttcaaccctgctatgatggtcccataaatggtggcaaggtagctgcacatatcctccaagatactgctgttgggaagaagtatatttctggaaagttgagcggagcaagacggttgcgtgatgccattgtgcttggctatcagcttcaaagggctcctgggagagatgtaggaattccttactggtattctcactctgagaaagaaattagtgttggcccagcgcccacatctcatgatatgaatggaagtgatgagtcatcgttcgaggactttgagatactccatggtgacatgcaaggcttaactgatactatgtcctttttgaagagtttatcagggcttgttggaaatgacttaagaagccctgagaagcaaactcgagagagggctgctgcttctgtgctctttgactgggaggaggaaatatatgttgcaagagcacctgggcgattagacgttatgggtggtatcgcagattactctggaagtcttgtattgcagatgcccatccgagaggcatgccatgttgctgttcagagaagtgaccctaccaaacagaagcaatggaagcatacacaggctagacaactagcaaatggaggagcagtaccagtgttacaaattgtatcctttggttctgaattaagtaatcgtgcacctacgtttgacatggacctttctgattttatggatggcgacaaaccaatatcttatgataatgtgaaggaatacttttctcgggatccatcccaaaaatgggctgcctatgttgctggaactatttttgtattgatggctgaactaggggtgcgctttaaagacagcatgagcattttggtttcttcatctgtccctgaaggcaaaggtgtctcctcttctgcatctgtggaggttgcttctatgtctgctatcgccgctgcctatggtttaaacattgctccaagggatcttgctttgctctgtcaaaaggttgagaatcgtgtcgtcggagctccttgtggagtaatggaccaaatgacatctgcttgtggagaagctaacaaactcctagcaatggtttgccagcctgcagaagtgaaggagttggttaacattccaactcatataagattttggggtcttgactctgggatacgtcatagtgttggtgggactgattatgggtctgtaagagtaggcacttacatgggccgcaagatgatcaagtgtgctgcatccaacctactttcagaattgttgctctcgtgtacgtctacgcaaccaggcgactcaagtcccgacgaatatgaaggacatggcgtcgacctcctgaaatctgaagcgtcaatggagtatctatgcaacttaccaccacataggtatgaagctgttttcgcgaaagaaattccggagacgatcactggcgatgcgtttttagagaagtatggagaccacaacgatgcggtaacagaagttgacccaaagcggtcttactgtgtcaaggctcctactagacatcccatatacgagaacttccgagtcgaggccttcaaagcgttgctaacagctgccaaaacagacgagcagctctcagcccttggagagctgatgttccagtgccactacagctacaacgcttgcgggctcggctctgacggcacagacaggctagtgaatctagttcaagaaatccggcacaggaagagctcgcgcgccggagggcccagcctgttcggcgcgaagatcaccggcggagggtccggcggctcggtctgcgtgatggggaagaactgcctgaaaagcagcgaggagatcctcgagatccagaagaggtacaaagcggcgactgggtacctcccgactgttttcgacggctcgtctcccggcgccggcaagtttgggtacctgaagattcggcgccggtccacgtcgccgtctgattgaagaagaagaagaaggaagagctctgctcggtcggccgtaccctcacggtcgtattgatcgtatcgtatcccacgcactacgcccaagatgccaataaatgggacagattgatcggcaataataatactagtagccatagaaaactctagtgataagctgcgaaacaacttgtatgtcgaagaaaatatttgaaaccatggtatctttgtggtcgatatctgaagtgagatgatgtgaatggctattggcgtatgttcatgtttgagctgtacggagaagaaaaggccgtatccaacaagagttcatctgcatagttacctcaaacacattatagaatgcactgaatataagagataagcaagctgataaatat

SEQ ID NO: 42197 - DNA, 3259 bp, Zea Mays
tgtcgacctgcgaccatggagacctccgactttgccctatgtgatccgttcatggcgattatttctccctcctctccggcgttcgtccctatgcctctctctccattcgcaagttcgccaaagaaaatcctcttgagcttgaccttccagcgatcaagctcggtgagcacgaagacgtaaccgaggaagccgtgtctactactttgagaagggcaatcagccgtctttctactctccaggcacatgatggacactggcctggggattatggtggccctatgttccttatgccaggcttgatcataacattgtatgtgactggagcactaaacactgtcttgtcatcagaacaccagaaggagatccgtcggtatctttataatcatcagaatgaagatggtggctggggcttgcacattgagggtccaagcaccatgtttggctcagcactgacctacgttactttgagattgcttggagagggaccagatagtggagatggagcaatggagaaaggccgaaactggatcttagaccatggcggagcaacatatataacatcctgggggaagttttggctctcggtacttggtgtatttgaatggtctggtaacaacccggtaccaccagaagtatggctactgccatatctcctgccatttcacccagggaggatgtggtgtcattgtcgaatggtgtatttgccaatgtgctacatctatgggaagaggtttgttggtcgaatcacaccactcgtgttggaattaagaaaggaacttttcaaagacccttacagcaagattgattgggacaaggcccgcaatctatgtgctaaggaagatctgtactatccacatccatttgttcaagatgtcttatgggccactctccataaatttgttgaaccagttatgatgagttggcctggcagtaaattgagggagaaagctctggagacagccatgcaacatgttcactatgaggatgagaacactcggtacatttgcattggtcctgtaaacaaggtattaaatatgcttgcttgctggattgaagatccaaactcagaggccttcaaactccacatcccacgagtctatgactacttgtggcttgctgaagatggcatgaagatgcagggttataatggtagccaactttgggatacagctttcatagttcaagccattgtggctaccaaccttaccgaagagtttggtcccacccttaaactagcacacaactatatcaagaaatcacaggttcttgacgactgccctggtgatctgaatgactggtaccgccacacatctaaaggcgcatggccattctccaccgcggatcatggttggcctatatctgattgcactgctgaaggactaaaggcttcattattgttatcaaagatttctcctgaaattgttggtggaccgatagaagctaatagattttatgatgctgtcagttgtctgatgtcttatatgaatgataatggtggttttgcgacttatgaactcacaagatcctatgcctggctggagctgatcaatcctgctgagacctttggggatattgtgattgattacccgtatgttgaatgtacatcagcagcaatccaggccctgacatcattcagaaaactataccctgggcaccgcaggaaagaggtggacagctgtatcagcaaagctgctaatttcattgagagcattcagaaaagtgacggttcatggtatggctcttgggctgtttgtttcacgtacggcacttggtttggtgtgaagggactaattgctgctggtagaacatttgagagcagtcctgcaatcagaaaggcatgcggctttctgttatcaaaagagcttccttccggtggctggggagaaagctatttatcgtctcaagaccaggtttacaccaatctcaaaggcaaccgagctcatgcagcgaacactggttgggccatgctggcgctgattgatgcaggacaggcccagagagatcccgcgcctctacaccgagcagcaaaggttttgatcaacttgcagtcagaggacggagaatttccccagcaagagatcataggagtgttcaacaagaactgcatgatcagttactcccagtacaggaacaccttcccgatctgggctctgggagagtaccggtgccgagtcctgggagctggcaagcggtagtgacccggcctggccccgtcaacttgactgaaaggcgctttgttgtcttggtgttcttggtgttctatcttggcacgccgagggctgtcttgccggccgcctagctgtctcatgaatcaatcagcttttttgtgagtagctagctatgtgcggtggttggaataatgcagctatgcttttttttagggttgcgctcctagttctaataatgtactacgtatattggaagcagaataaatgttagattgaactaatggtgccattaaagatgacaatagaactcttccgaagcaaccaagttattacattgcacaaatcaatagaacttcaactgctagcgtcacaaaaccgtggattattcaagcgcgcgcagctctaccggcgacctccacgagttcccatggcgacaaggccttcttcttttttattattttctgttcgttcagaacacaagcaaaatcccgctcccgcgttgcagagacgacgccacagaagccacgtctgactgatttccacgcgccaaccgggggcacggcggcgctcccgctccatctccagttctccaccacaatccacaaggaaggaagcatcagcgcatcaggtcgtagtgggacgaggagccgccgtacgatggcggcggcctggggagctggaggagctcctgcgccgtcgccatggcggcgtcgagagcctggagccgcgcgtgcgcgtggtggcccagggccgcgctgccgccgccgtcctgccacagccccggcgacgaggcctcctgcagcacggagacggagccggcggcgaggcagctgctcggggcagcgcggtggtggtgcagctcagccgccggcggcggcggcgggtggttggtgttggtgccgccgccaccggccggactgtttgacagaagagagagagcacgctgaaggtccggggcgccgtccgggctggagacggccgcacaggcttcaacgcctgcgcctgaaaagatgcatctttttttcgatatcatctctgaatgtcatcatgttcgtcggaaaatggcgcatttttattaccttgatgatcaa

SEQ ID NO: 42198 - DNA, 3301 bp, Zea Mays
cgacctgcgaccatggagacctccgactttgcgtatcaattcctcgcgcggtctcattttcgttcgatttcctaaagcctatgtgatccgttcatggcgattatttctccctcctctccggcgttcgtccctatgcctctctctccattcgcaagttcgccaaagaaaatcctcttgagcttgaccttccagcgatcaagctcggtgagcacgaagacgtaaccgaggaagccgtgtctactactttgagaagggcaatcagccgtctttctactctccaggcacatgatggacactggcctggggattatggtggccctatgttccttatgccaggcttgatcataacattgtatgtgactggagcactaaacactgtcttgtcatcagaacaccagaaggagatccgtcggtatctttataatcatcagaatgaagatggtggctggggcttgcacattgagggtccaagcaccatgtttggctcagcactgacctacgttactttgagattgcttggagagggaccagatagtggagatggagcaatggagaaaggccgaaactggatcttagaccatggcggagcaacatatataacatcctgggggaagttttggctctcggtacttggtgtatttgaatggtctggtaacaacccggtaccaccagaagtatggctactgccatatctcctgccatttcacccagggaggatgtggtgtcattgtcgaatggtgtatttgccaatgtgctacatctatgggaagaggtttgttggtcgaatcacaccactcgtgttggaattaagaaaggaacttttcaaagacccttacagcaagattgattgggacaaggcccgcaatctatgtgctaaggaagatctgtactatccacatccatttgttcaagatgtcttatgggccactctccataaatttgttgaaccagttatgatgagttggcctggcagtaaattgagggagaaagctctggagacagccatgcaacatgttcactatgaggatgagaacactcggtacatttgcattggtcctgtaaacaaggtattaaatatgcttgcttgctggattgaagatccaaactcagaggccttcaaactccacatcccacgagtctatgactacttgtggcttgctgaagatggcatgaagatgcagggttataatggtagccaactttgggatacagctttcatagttcaagccattgtggctaccaaccttaccgaagagtttggtcccacccttaaactagcacacaactatatcaagaaatcacaggttcttgacgactgccctggtgatctgaatgactggtaccgccacacatctaaaggcgcatggccattctccaccgcggatcatggttggcctatatctgattgcactgctgaaggactaaaggcttcattattgttatcaaagatttctcctgaaattgttggtggaccgatagaagctaatagattttatgatgctgtcagttgtctgatgtcttatatgaatgataatggtggttttgcgacttatgaactcacaagatcctatgcctggctggagctgatcaatcctgctgagacctttggggatattgtgattgattacccgtatgttgaatgtacatcagcagcaatccaggccctgacatcattcagaaaactataccctgggcaccgcaggaaagaggtggacagctgtatcagcaaagctgctaatttcattgagagcattcagaaaagtgacggttcatggtatggctcttgggctgtttgtttcacgtacggcacttggtttggtgtgaagggactaattgctgctggtagaacatttgagagcagtcctgcaatcagaaaggcatgcggctttctgttatcaaaagagcttccttccggtggctggggagaaagctatttatcgtctcaagaccaggtttacaccaatctcaaaggcaaccgagctcatgcagcgaacactggttgggccatgctggcgctgattgatgcaggacaggcccagagagatcccgcgcctctacaccgagcagcaaaggttttgatcaacttgcagtcagaggacggagaatttccccagcaagagatcataggagtgttcaacaagaactgcatgatcagttactcccagtacaggaacaccttcccgatctgggctctgggagagtaccggtgccgagtcctgggagctggcaagcggtagtgacccggcctggccccgtcaacttgactgaaaggcgctttgttgtcttggtgttcttggtgttctatcttggcacgccgagggctgtcttgccggccgcctagctgtctcatgaatcaatcagcttttttgtgagtagctagctatgtgcggtggttggaataatgcagctatgcttttttttagggttgcgctcctagttctaataatgtactacgtatattggaagcagaataaatgttagattgaactaatggtgccattaaagatgacaatagaactcttccgaagcaaccaagttattacattgcacaaatcaatagaacttcaactgctagcgtcacaaaaccgtggattattcaagcgcgcgcagctctaccggcgacctccacgagttcccatggcgacaaggccttcttcttttttattattttctgttcgttcagaacacaagcaaaatcccgctcccgcgttgcagagacgacgccacagaagccacgtctgactgatttccacgcgccaaccgggggcacggcggcgctcccgctccatctccagttctccaccacaatccacaaggaaggaagcatcagcgcatcaggtcgtagtgggacgaggagccgccgtacgatggcggcggcctggggagctggaggagctcctgcgccgtcgccatggcggcgtcgagagcctggagccgcgcgtgcgcgtggtggcccagggccgcgctgccgccgccgtcctgccacagccccggcgacgaggcctcctgcagcacggagacggagccggcggcgaggcagctgctcggggcagcgcggtggtggtgcagctcagccgccggcggcggcggcgggtggttggtgttggtgccgccgccaccggccggactgtttgacagaagagagagagcacgctgaaggtccggggcgccgtccgggctggagacggccgcacaggcttcaacgcctgcgcctgaaaagatgcatctttttttcgatatcatctctgaatgtcatcatgttcgtcggaaaatggcgcatttttattaccttgatgatcaa

SEQ ID NO: 42199 - DNA, 3090 bp, Zea Mays
gtccctatgcctctctctccattcgcaagttcgccaaagaaaatcctcttgagcttgaccttccagcgatcaagctcggtgagcacgaagacgtaaccgaggaagccgtgtctactactttgagaagggcaatcagccgtctttctactctccaggcacatgatggacactggcctggggattatggtggccctatgttccttatgccaggcttgatcataacattgtatgtgactggagcactaaacactgtcttgtcatcagaacaccagaaggagatccgtcggtatctttataatcatcagaatgaagatggtggctggggcttgcacattgagggtccaagcaccatgtttggctcagcactgacctacgttactttgagattgcttggagagggaccagatagtggagatggagcaatggagaaaggccgaaactggatcttagaccatggcggagcaacatatataacatcctgggggaagttttggctctcgggaggatgtggtgtcattgtcgaatggtgtatttgccaatgtgctacatctatgggaagaggtttgttggtcgaatcacaccactcgtgttggaattaagaaaggaacttttcaaagacccttacagcaagattgattgggacaaggcccgcaatctatgtgctaaggaagatctgtactatccacatccatttgttcaagatgtcttatgggccactctccataaatttgttgaaccagttatgatgagttggcctggcagtaaattgagggagaaagctctggagacagccatgcaacatgttcactatgaggatgagaacactcggtacatttgcattggtcctgtaaacaaggtattaaatatgcttgcttgctggattgaagatccaaactcagaggccttcaaactccacatcccacgagtctatgactacttgtggcttgctgaagatggcatgaagatgcagggttataatggtagccaactttgggatacagctttcatagttcaagccattgtggctaccaaccttaccgaagagtttggtcccacccttaaactagcacacaactatatcaagaaatcacaggttcttgacgactgccctggtgatctgaatgactggtaccgccacacatctaaaggcgcatggccattctccaccgcggatcatggttggcctatatctgattgcactgctgaaggactaaaggcttcattattgttatcaaagatttctcctgaaattgttggtggaccgatagaagctaatagattttatgatgctgtcagttgtctgatgtcttatatgaatgataatggtggttttgcgacttatgaactcacaagatcctatgcctggctggagctgatcaatcctgctgagacctttggggatattgtgattgattacccgtatgttgaatgtacatcagcagcaatccaggccctgacatcattcagaaaactataccctgggcaccgcaggaaagaggtggacagctgtatcagcaaagctgctaatttcattgagagcattcagaaaagtgacggttcatggtatggctcttgggctgtttgtttcacgtacggcacttggtttggtgtgaagggactaattgctgctggtagaacatttgagagcagtcctgcaatcagaaaggcatgcggctttctgttatcaaaagagcttccttccggtggctggggagaaagctatttatcgtctcaagaccaggtttacaccaatctcaaaggcaaccgagctcatgcagcgaacactggttgggccatgctggcgctgattgatgcaggacaggcccagagagatcccgcgcctctacaccgagcagcaaaggttttgatcaacttgcagtcagaggacggagaatttccccagcaagagatcataggagtgttcaacaagaactgcatgatcagttactcccagtacaggaacaccttcccgatctgggctctgggagagtaccggtgccgagtcctgggagctggcaagcggtagtgacccggcctggccccgtcaacttgactgaaaggcgctttgttgtcttggtgttcttggtgttctatcttggcacgccgagggctgtcttgccggccgcctagctgtctcatgaatcaatcagcttttttgtgagtagctagctatgtgcggtggttggaataatgcagctatgcttttttttagggttgcgctcctagttctaataatgtactacgtatattggaagcagaataaatgttagattgaactaatggtgccattaaagatgacaatagaactcttccgaagcaaccaagttattacattgcacaaatcaatagaacttcaactgctagcgtcacaaaaccgtggattattcaagcgcgcgcagctctaccggcgacctccacgagttcccatggcgacaaggccttcttcttttttattattttctgttcgttcagaacacaagcaaaatcccgctcccgcgttgcagagacgacgccacagaagccacgtctgactgatttccacgcgccaaccgggggcacggcggcgctcccgctccatctccagttctccaccacaatccacaaggaaggaagcatcagcgcatcaggtcgtagtgggacgaggagccgccgtacgatggcggcggcctggggagctggaggagctcctgcgccgtcgccatggcggcgtcgagagcctggagccgcgcgtgcgcgtggtggcccagggccgcgctgccgccgccgtcctgccacagccccggcgacgaggcctcctgcagcacggagacggagccggcggcgaggcagctgctcggggcagcgcggtggtggtgcagctcagccgccggcggcggcggcgggtggttggtgttggtgccgccgccaccggccggactgtttgacagaagagagagagcacgctgaaggtccggggcgccgtccgggctggagacggccgcacaggcttcaacgcctgcgcctgaaaagatgcatctttttttcgatatcatctctgaatgtcatcatgttcgtcggaaaatggcgcatttttattaccttgatgatcaa

SEQ ID NO: 42200 - DNA, 3182 bp, Zea Mays
atcgcttctcatgctctgcatcttctgtcggacgagttcgccaaagaaaatcctcttgagcttgaccttccagcgatcaagctcggtgagcacgaagacgtaaccgaggaagccgtgtctactactttgagaagggcaatcagccgtctttctactctccaggcacatgatggacactggcctggggattatggtggccctatgttccttatgccaggcttgatcataacattgtatgtgactggagcactaaacactgtcttgtcatcagaacaccagaaggagatccgtcggtatctttataatcatcagaatgaagatggtggctggggcttgcacattgagggtccaagcaccatgtttggctcagcactgacctacgttactttgagattgcttggagagggaccagatagtggagatggagcaatggagaaaggccgaaactggatcttagaccatggcggagcaacatatataacatcctgggggaagttttggctctcggtacttggtgtatttgaatggtctggtaacaacccggtaccaccagaagtatggctactgccatatctcctgccatttcacccagggaggatgtggtgtcattgtcgaatggtgtatttgccaatgtgctacatctatgggaagaggtttgttggtcgaatcacaccactcgtgttggaattaagaaaggaacttttcaaagacccttacagcaagattgattgggacaaggcccgcaatctatgtgctaaggaagatctgtactatccacatccatttgttcaagatgtcttatgggccactctccataaatttgttgaaccagttatgatgagttggcctggcagtaaattgagggagaaagctctggagacagccatgcaacatgttcactatgaggatgagaacactcggtacatttgcattggtcctgtaaacaaggtattaaatatgcttgcttgctggattgaagatccaaactcagaggccttcaaactccacatcccacgagtctatgactacttgtggcttgctgaagatggcatgaagatgcagggttataatggtagccaactttgggatacagctttcatagttcaagccattgtggctaccaaccttaccgaagagtttggtcccacccttaaactagcacacaactatatcaagaaatcacaggttcttgacgactgccctggtgatctgaatgactggtaccgccacacatctaaaggcgcatggccattctccaccgcggatcatggttggcctatatctgattgcactgctgaaggactaaaggcttcattattgttatcaaagatttctcctgaaattgttggtggaccgatagaagctaatagattttatgatgctgtcagttgtctgatgtcttatatgaatgataatggtggttttgcgacttatgaactcacaagatcctatgcctggctggagctgatcaatcctgctgagacctttggggatattgtgattgattacccgtatgttgaatgtacatcagcagcaatccaggccctgacatcattcagaaaactataccctgggcaccgcaggaaagaggtggacagctgtatcagcaaagctgctaatttcattgagagcattcagaaaagtgacggttcatggtatggctcttgggctgtttgtttcacgtacggcacttggtttggtgtgaagggactaattgctgctggtagaacatttgagagcagtcctgcaatcagaaaggcatgcggctttctgttatcaaaagagcttccttccggtggctggggagaaagctatttatcgtctcaagaccaggtttacaccaatctcaaaggcaaccgagctcatgcagcgaacactggttgggccatgctggcgctgattgatgcaggacaggcccagagagatcccgcgcctctacaccgagcagcaaaggttttgatcaacttgcagtcagaggacggagaatttccccagcaagagatcataggagtgttcaacaagaactgcatgatcagttactcccagtacaggaacaccttcccgatctgggctctgggagagtaccggtgccgagtcctgggagctggcaagcggtagtgacccggcctggccccgtcaacttgactgaaaggcgctttgttgtcttggtgttcttggtgttctatcttggcacgccgagggctgtcttgccggccgcctagctgtctcatgaatcaatcagcttttttgtgagtagctagctatgtgcggtggttggaataatgcagctatgcttttttttagggttgcgctcctagttctaataatgtactacgtatattggaagcagaataaatgttagattgaactaatggtgccattaaagatgacaatagaactcttccgaagcaaccaagttattacattgcacaaatcaatagaacttcaactgctagcgtcacaaaaccgtggattattcaagcgcgcgcagctctaccggcgacctccacgagttcccatggcgacaaggccttcttcttttttattattttctgttcgttcagaacacaagcaaaatcccgctcccgcgttgcagagacgacgccacagaagccacgtctgactgatttccacgcgccaaccgggggcacggcggcgctcccgctccatctccagttctccaccacaatccacaaggaaggaagcatcagcgcatcaggtcgtagtgggacgaggagccgccgtacgatggcggcggcctggggagctggaggagctcctgcgccgtcgccatggcggcgtcgagagcctggagccgcgcgtgcgcgtggtggcccagggccgcgctgccgccgccgtcctgccacagccccggcgacgaggcctcctgcagcacggagacggagccggcggcgaggcagctgctcggggcagcgcggtggtggtgcagctcagccgccggcggcggcggcgggtggttggtgttggtgccgccgccaccggccggactgtttgacagaagagagagagcacgctgaaggtccggggcgccgtccgggctggagacggccgcacaggcttcaacgcctgcgcctgaaaagatgcatctttttttcgatatcatctctgaatgtcatcatgttcgtcggaaaatggcgcatttttattaccttgatgatcaa

SEQ ID NO: 42201 - DNA, 3625 bp, Zea Mays
aaacagtgtcgtatttatagtctatctattgcacgctactgtctcgtccatattcttgagaggcgcccgccatctaccacgaggcgctggcagagggagactggccgactggcccagtggccctatagaagaaacgggatcccgccaggcctcccgggaccgggagccacgccacgcaggcacgcacgcggaggggagcgccggccgtccgcggcggattgggatctccctcgcccgcccgtccactcgagactcgacggcacccgccgcatttgagctgagctgaggaggcgtgggggacggcgcggggatgtggcgcctgcggatcgcggaggggggcggggacccctggctccgcacgaagaacgcccacgtcggccgccaggtctgggagttcgacgcctccgccgaccccgaccccgccgtcgacgccgcgcgccgcgccttcgccggcagcaggggccacctcaagcacagcgccgacctcctcatgcgcatccagttcgccaaagaaaatcctcttgagcttgaccttccagcgatcaagctcggtgagcacgaagacgtaaccgaggaagccgtgtctactactttgagaagggcaatcagccgtctttctactctccaggcacatgatggacactggcctggggattatggtggccctatgttccttatgccaggcttgatcataacattgtatgtgactggagcactaaacactgtcttgtcatcagaacaccagaaggagatccaatgaagatggtggctggggcttgcacattgagggtccaagcaccatgtttggctcagcactgacctacgttactttgagattgcttggagagggaccagatagtggagatggagcaatggagaaaggccgaaactggatcttagaccatggcggagcaacatatataacatcctgggggaagttttggctctcggtacttggtgtatttgaatggtctggtaacaacccggtaccaccagaagtatggctactgccatatctcctgccatttcacccagggaggatgtggtgtcattgtcgaatggtgtatttgccaatgtgctacatctatgggaagaggtttgttggtcgaatcacaccactcgtgttggaattaagaaaggaacttttcaaagacccttacagcaagattgattgggacaaggcccgcaatctatgtgctaaggaagatctgtactatccacatccatttgttcaagatgtcttatgggccactctccataaatttgttgaaccagttatgatgagttggcctggcagtaaattgagggagaaagctctggagacagccatgcaacatgttcactatgaggatgagaacactcggtacatttgcattggtcctgtaaacaaggtattaaatatgcttgcttgctggattgaagatccaaactcagaggccttcaaactccacatcccacgagtctatgactacttgtggcttgctgaagatggcatgaagatgcagggttataatggtagccaactttgggatacagctttcatagttcaagccattgtggctaccaaccttaccgaagagtttggtcccacccttaaactagcacacaactatatcaagaaatcacaggttcttgacgactgccctggtgatctgaatgactggtaccgccacacatctaaaggcgcatggccattctccaccgcggatcatggttggcctatatctgattgcactgctgaaggactaaaggcttcattattgttatcaaagatttctcctgaaattgttggtggaccgatagaagctaatagattttatgatgctgtcagttgtctgatgtcttatatgaatgataatggtggttttgcgacttatgaactcacaagatcctatgcctggctggagctgatcaatcctgctgagacctttggggatattgtgattgattacccgtatgttgaatgtacatcagcagcaatccaggccctgacatcattcagaaaactataccctgggcaccgcaggaaagaggtggacagctgtatcagcaaagctgctaatttcattgagagcattcagaaaagtgacggttcatggtatggctcttgggctgtttgtttcacgtacggcacttggtttggtgtgaagggactaattgctgctggtagaacatttgagagcagtcctgcaatcagaaaggcatgcggctttctgttatcaaaagagcttccttccggtggctggggagaaagctatttatcgtctcaagaccaggtttacaccaatctcaaaggcaaccgagctcatgcagcgaacactggttgggccatgctggcgctgattgatgcaggacaggcccagagagatcccgcgcctctacaccgagcagcaaaggttttgatcaacttgcagtcagaggacggagaatttccccagcaagagatcataggagtgttcaacaagaactgcatgatcagttactcccagtacaggaacaccttcccgatctgggctctgggagagtaccggtgccgagtcctgggagctggcaagcggtagtgacccggcctggccccgtcaacttgactgaaaggcgctttgttgtcttggtgttcttggtgttctatcttggcacgccgagggctgtcttgccggccgcctagctgtctcatgaatcaatcagcttttttgtgagtagctagctatgtgcggtggttggaataatgcagctatgcttttttttagggttgcgctcctagttctaataatgtactacgtatattggaagcagaataaatgttagattgaactaatggtgccattaaagatgacaatagaactcttccgaagcaaccaagttattacattgcacaaatcaatagaacttcaactgctagcgtcacaaaaccgtggattattcaagcgcgcgcagctctaccggcgacctccacgagttcccatggcgacaaggccttcttcttttttattattttctgttcgttcagaacacaagcaaaatcccgctcccgcgttgcagagacgacgccacagaagccacgtctgactgatttccacgcgccaaccgggggcacggcggcgctcccgctccatctccagttctccaccacaatccacaaggaaggaagcatcagcgcatcaggtcgtagtgggacgaggagccgccgtacgatggcggcggcctggggagctggaggagctcctgcgccgtcgccatggcggcgtcgagagcctggagccgcgcgtgcgcgtggtggcccagggccgcgctgccgccgccgtcctgccacagccccggcgacgaggcctcctgcagcacggagacggagccggcggcgaggcagctgctcggggcagcgcggtggtggtgcagctcagccgccggcggcggcggcgggtggttggtgttggtgccgccgccaccggccggactgtttgacagaagagagagagcacgctgaaggtccggggcgccgtccgggctggagacggccgcacaggcttcaacgcctgcgcctgaaaagatgcatctttttttcgatatcatctctgaatgtcatcatgttcgtcggaaaatggcgcatttttattaccttgatgatcaa

SEQ ID NO: 42202 - DNA, 1146 bp, Zea Mays
cccgccatctaccacgaggcgctggcagagggagactggccgactggcccagtggccctatagaagaaacgggatcccgccaggcctcccgggaccgggagccacgccacgcaggcacgcacgcggaggggagcgccggccgtccgcggcggattgggatctccctcgcccgcccgtccactcgagactcgacggcacccgccgcatttgagctgagctgaggaggcgtgggggacggcgcggggatgtggcgcctgcggatcgcggaggggggcggggacccctggctccgcacgaagaacgcccacgtcggccgccaggtctgggagttcgacgcctccgccgaccccgaccccgccgtcgacgccgcgcgccgcgccttcgccggcagcaggggccacctcaagcacagcgccgacctcctcatgcgcatccagttcgccaaagaaaatcctcttgagcttgaccttccagcgatcaagctcggtgagcacgaagacgtaaccgaggaagccgtgtctactactttgagaagggcaatcagccgtctttctactctccaggcacatgatggacactggcctggggattatggtggccctatgttccttatgccaggcttgatcataacattgtatgtgactggagcactaaacactgtcttgtcatcagaacaccagaaggagatccaatgataatggtggttttgcgacttatgaactcacaagatcctatgcctggctggagctgatcaatcctgctgagacctttggggatattgtgattgattacccgtatgttgaatgtacatcagcagcaatccaggccctgacatcattcagaaaactataccctgggcaccgcaggaaagaggtggacagctgtatcagcaaagctgctaatttcattgagagcattcagaaaagtgacggttcatggtatggctcttgggctgtttgtttcacgtacggcacttggtttggtgtgaagggactaattgctgctggtagaacatttgagagcagtcctgcaatcagaaaggcatgcggctttctgttatcaaaagagcttccttccggtggctggggagaaagctatttatcgtctcaagaccagggaaaacttgactattcagatcgcatcatt

SEQ ID NO: 42203 - DNA, 3267 bp, Zea Mays
ctctttcactgttagtgccacttttttccagaaaagaaaacatttcactgtccatggaaatacagtacctacggccacagaatggttgaaagtggacacagattttctcaactccattcaattcgccaaagaaaatcctcttgagcttgaccttccagcgatcaagctcggtgagcacgaagacgtaaccgaggaagccgtgtctactactttgagaagggcaatcagccgtctttctactctccaggcacatgatggacactggcctggggattatggtggccctatgttccttatgccaggcttgatcataacattgtatgtgactggagcactaaacactgtcttgtcatcagaacaccagaaggagatccgtcggtatctttataatcatcagaatgaagatggtggctggggcttgcacattgagggtccaagcaccatgtttggctcagcactgacctacgttactttgagattgcttggagagggaccagatagtggagatggagcaatggagaaaggccgaaactggatcttagaccatggcggagcaacatatataacatcctgggggaagttttggctctcggtacttggtgtatttgaatggtctggtaacaacccggtaccaccagaagtatggctactgccatatctcctgccatttcacccagggaggatgtggtgtcattgtcgaatggtgtatttgccaatgtgctacatctatgggaagaggtttgttggtcgaatcacaccactcgtgttggaattaagaaaggaacttttcaaagacccttacagcaagattgattgggacaaggcccgcaatctatgtgctaaggaagatctgtactatccacatccatttgttcaagatgtcttatgggccactctccataaatttgttgaaccagttatgatgagttggcctggcagtaaattgagggagaaagctctggagacagccatgcaacatgttcactatgaggatgagaacactcggtacatttgcattggtcctgtaaacaaggtattaaatatgcttgcttgctggattgaagatccaaactcagaggccttcaaactccacatcccacgagtctatgactacttgtggcttgctgaagatggcatgaagatgcagggttataatggtagccaactttgggatacagctttcatagttcaagccattgtggctaccaaccttaccgaagagtttggtcccacccttaaactagcacacaactatatcaagaaatcacaggttcttgacgactgccctggtgatctgaatgactggtaccgccacacatctaaaggcgcatggccattctccaccgcggatcatggttggcctatatctgattgcactgctgaaggactaaaggcttcattattgttatcaaagatttctcctgaaattgttggtggaccgatagaagctaatagattttatgatgctgtcagttgtctgatgtcttatatgaatgataatggtggttttgcgacttatgaactcacaagatcctatgcctggctggagctgatcaatcctgctgagacctttggggatattgtgattgattacccgtatgttgaatgtacatcagcagcaatccaggccctgacatcattcagaaaactataccctgggcaccgcaggaaagaggtggacagctgtatcagcaaagctgctaatttcattgagagcattcagaaaagtgacggttcatggtatggctcttgggctgtttgtttcacgtacggcacttggtttggtgtgaagggactaattgctgctggtagaacatttgagagcagtcctgcaatcagaaaggcatgcggctttctgttatcaaaagagcttccttccggtggctggggagaaagctatttatcgtctcaagaccaggtttacaccaatctcaaaggcaaccgagctcatgcagcgaacactggttgggccatgctggcgctgattgatgcaggacaggcccagagagatcccgcgcctctacaccgagcagcaaaggttttgatcaacttgcagtcagaggacggagaatttccccagcaagagatcataggagtgttcaacaagaactgcatgatcagttactcccagtacaggaacaccttcccgatctgggctctgggagagtaccggtgccgagtcctgggagctggcaagcggtagtgacccggcctggccccgtcaacttgactgaaaggcgctttgttgtcttggtgttcttggtgttctatcttggcacgccgagggctgtcttgccggccgcctagctgtctcatgaatcaatcagcttttttgtgagtagctagctatgtgcggtggttggaataatgcagctatgcttttttttagggttgcgctcctagttctaataatgtactacgtatattggaagcagaataaatgttagattgaactaatggtgccattaaagatgacaatagaactcttccgaagcaaccaagttattacattgcacaaatcaatagaacttcaactgctagcgtcacaaaaccgtggattattcaagcgcgcgcagctctaccggcgacctccacgagttcccatggcgacaaggccttcttcttttttattattttctgttcgttcagaacacaagcaaaatcccgctcccgcgttgcagagacgacgccacagaagccacgtctgactgatttccacgcgccaaccgggggcacggcggcgctcccgctccatctccagttctccaccacaatccacaaggaaggaagcatcagcgcatcaggtcgtagtgggacgaggagccgccgtacgatggcggcggcctggggagctggaggagctcctgcgccgtcgccatggcggcgtcgagagcctggagccgcgcgtgcgcgtggtggcccagggccgcgctgccgccgccgtcctgccacagccccggcgacgaggcctcctgcagcacggagacggagccggcggcgaggcagctgctcggggcagcgcggtggtggtgcagctcagccgccggcggcggcggcgggtggttggtgttggtgccgccgccaccggccggactgtttgacagaagagagagagcacgctgaaggtccggggcgccgtccgggctggagacggccgcacaggcttcaacgcctgcgcctgaaaagatgcatctttttttcgatatcatctctgaatgtcatcatgttcgtcggaaaatggcgcatttttattaccttgatgatcaa

SEQ ID NO: 42204 - DNA, 3228 bp, Zea Mays
gccacttttttccagaaaagaaaacatttcactgtccatggaaatacagtacctacggccacagaatggttgaaagtggacacagattttctcaactccattcaattcgccaaagaaaatcctcttgagcttgaccttccagcgatcaagctcggtgagcacgaagacgtaaccgaggaagccgtgtctactactttgagaagggcaatcagccgtctttctactctccaggcacatgatggacactggcctggggattatggtggccctatgttccttatgccaggcttgatcataacattgtatgtgactggagcactaaacactgtcttgtcatcagaacaccagaaggagatccgtcggtatctttataatcatcagaatgaagatggtggctggggcttgcacattgagggtccaagcaccatgtttggctcagcactgacctacgttactttgagattgcttggagagggaccagatagtggagatggagcaatggagaaaggccgaaactggatcttagaccatggcggagcaacatatataacatcctgggggaagttttggctctcggtacttggtgtatttgaatggtctggtaacaacccggtaccaccagaagtatggctactgccatatctcctgccatttcacccagggaggatgtggtgtcattgtcgaatggtgtatttgccaatgtgctacatctatgggaagaggtttgttggtcgaatcacaccactcgtgttggaattaagaaaggaacttttcaaagacccttacagcaagattgattgggacaaggcccgcaatctatgtgctaaggaagatctgtactatccacatccatttgttcaagatgtcttatgggccactctccataaatttgttgaaccagttatgatgagttggcctggcagtaaattgagggagaaagctctggagacagccatgcaacatgttcactatgaggatgagaacactcggtacatttgcattggtcctgtaaacaaggtattaaatatgcttgcttgctggattgaagatccaaactcagaggccttcaaactccacatcccacgagtctatgactacttgtggcttgctgaagatggcatgaagatgcagggttataatggtagccaactttgggatacagctttcatagttcaagccattgtggctaccaaccttaccgaagagtttggtcccacccttaaactagcacacaactatatcaagaaatcacaggttcttgacgactgccctggtgatctgaatgactggtaccgccacacatctaaaggcgcatggccattctccaccgcggatcatggttggcctatatctgattgcactgctgaaggactaaaggcttcattattgttatcaaagatttctcctgaaattgttggtggaccgatagaagctaatagattttatgatgctgtcagttgtctgatgtcttatatgaatgataatggtggttttgcgacttatgaactcacaagatcctatgcctggctggagctgatcaatcctgctgagacctttggggatattgtgattgattaccccaatccaggccctgacatcattcagaaaactataccctgggcaccgcaggaaagaggtggacagctgtatcagcaaagctgctaatttcattgagagcattcagaaaagtgacggttcatggtatggctcttgggctgtttgtttcacgtacggcacttggtttggtgtgaagggactaattgctgctggtagaacatttgagagcagtcctgcaatcagaaaggcatgcggctttctgttatcaaaagagcttccttccggtggctggggagaaagctatttatcgtctcaagaccaggtttacaccaatctcaaaggcaaccgagctcatgcagcgaacactggttgggccatgctggcgctgattgatgcaggacaggcccagagagatcccgcgcctctacaccgagcagcaaaggttttgatcaacttgcagtcagaggacggagaatttccccagcaagagatcataggagtgttcaacaagaactgcatgatcagttactcccagtacaggaacaccttcccgatctgggctctgggagagtaccggtgccgagtcctgggagctggcaagcggtagtgacccggcctggccccgtcaacttgactgaaaggcgctttgttgtcttggtgttcttggtgttctatcttggcacgccgagggctgtcttgccggccgcctagctgtctcatgaatcaatcagcttttttgtgagtagctagctatgtgcggtggttggaataatgcagctatgcttttttttagggttgcgctcctagttctaataatgtactacgtatattggaagcagaataaatgttagattgaactaatggtgccattaaagatgacaatagaactcttccgaagcaaccaagttattacattgcacaaatcaatagaacttcaactgctagcgtcacaaaaccgtggattattcaagcgcgcgcagctctaccggcgacctccacgagttcccatggcgacaaggccttcttcttttttattattttctgttcgttcagaacacaagcaaaatcccgctcccgcgttgcagagacgacgccacagaagccacgtctgactgatttccacgcgccaaccgggggcacggcggcgctcccgctccatctccagttctccaccacaatccacaaggaaggaagcatcagcgcatcaggtcgtagtgggacgaggagccgccgtacgatggcggcggcctggggagctggaggagctcctgcgccgtcgccatggcggcgtcgagagcctggagccgcgcgtgcgcgtggtggcccagggccgcgctgccgccgccgtcctgccacagccccggcgacgaggcctcctgcagcacggagacggagccggcggcgaggcagctgctcggggcagcgcggtggtggtgcagctcagccgccggcggcggcggcgggtggttggtgttggtgccgccgccaccggccggactgtttgacagaagagagagagcacgctgaaggtccggggcgccgtccgggctggagacggccgcacaggcttcaacgcctgcgcctgaaaagatgcatctttttttcgatatcatctctgaatgtcatcatgttcgtcggaaaatggcgcatttttattaccttgatgatcaa

SEQ ID NO: 42205 - DNA, 4482 bp, Zea Mays
ctgcgagcacacaccacactaggcactagcacacctcccctctcaggctctcagcgccccgccgccgccacgcaattgccagtcctcgcgatatgggcgcgcaagaggaggcagtggacgagatgctgcgcgccgccgccgccgaggtttcaacctcctcggtgaagcgccgcctccgcatcttccaccacaccctacctcctctcatcgcgaaggccatagagtcaccgtcagatactgtattgttagtcgatctcattttccagacattgccaatatatgacgatcgagcatcacgaaaagcagtagacgatttggttattcaggctcttggtgaacccaccttcatgaagccctttgctgcggtacttgtacaatctatggaaaagaatctaaaggttacaaacccccttacaagcttaaagcttctcagatggtcacactatcttctgaaatggagtcagtttgccacacttacaaaaggcgcctttaccagactggccaatgcacaagcagtcttatgtcaagtccttatggatgggtccttccgtcggcgccggacttgcaaacagttattcattcatctcttctccgagcacagtggaatatataagatgtacatagaggagctcagagatttaaggatttccatgagagattctcctgcatttttgaatctaatactggattttaccattacctctccatcattatccactcagtaccagtcagtattccttgatttgtatgtcaaaatcatcttgagttcaaaagatcggccaccgaaagcagccactgaagcttttaagcctcttttcttgaacattgggcatgaggattttaagaatactattataccatcatgcataaagatgctgaaaagaaatcctgaaatcgtactacagtctattggatatcttcttaagacagtccatttagacctaagcaagtattccatggagtttatgccagttgttctgcatcaagctcggcattcagatgaagagaggaggattaatgctttgagtattataggaacactaagtgagaagtcaagtgatccagatgctctaccttccatggtcaatgctatcaaagctgttttaggaggctcagaaggaaaactatcacttctataccagagaattggaatgataaatgctttagagcagctatcaagatctcctccaaagcaaataggcagacttgccccctcagtatcaactttccttctaacgtgttacaaggatgatggtatcgaggaagtgaaattggcgattctatcagcaatagggtcctgggctttggtatcagctgaagctgtccaaccagatgttgtttcatttattgctgcaggcttgaaagagaaagacactttaaggaaggggcatctgaaatttttacgagttatatgcaaaaactctgagtctttaacaaaggttgcttctttattggatcatttgattcagttgtcaaaaactggcttcagcaaggcaacacagcggttggatggaatctatgcactctttgcagtatcaaggcttgctgctgttgatacaaaagcagatggtgccattctgaaggagaaactgtggacattgattgctcaaaatgaaccctcattgatctctttacagttgcttcccaaactagcagatgatgattgcttagccgtcctggatcttgttcaatcactgtttgtagaacagttcttcagggttcgagaatatttttcaatccattcattgctgcagctgctaatatatctactttgccatccaagctgggaagttagaaaggtagcttacgatgttaccaagaaaattttctcaagctccagtggtctagccgaagatattctatttttattcacagactggttgtcactggttggagagagactgtcaatattgaaacaaggtgatatggatagcccttcggattctcagctaccattctttccatctaccgaggtccttgtcaagtgtttgtttttgattgcaccttatgctgttgtgcatagtctgagatcatattctcgaattattttgtgctcccaccacccttgccttaccagctcctcaagcccagctggcgtatataagaggttgcaaagaaggcttagacaagaacagatcttttttgttgacttaattactcccaacatctctgttatctgcaaggaattactttcacaggatggtctatttagttccaacaatcaagtacagagtgcagcattatgttcgctatcaacacttatgacaattactcccaacgacacatttctagagtttgagaagcacttcataggactccaggagcgcaccttgcacgattccttctctgagagtgatattaagatattctatactccagaggggcagttgtcaaccgagcaaggagtttacattgctgaggctgttgctaacaaaaatacaaaacttgcaaaggggcgtttccgtgcatatgatgatcagatgcagagacagctcggtctattgtccctgcaaagaatgagaagaaagaatcctcaggcattggcaagcgagaaactgggaaatctacaaaaaggactgctcctatagacaaggctaagactgctaaagaggaggccagagagttgctcttgaaggaggaagcatctgtgcgtatgaaggttgggcaagtgcagaaggatctctccttaatgttggatgctcttggcaagttggctattgctaatcctatatttactcatggtcaactgccgtcactggtaaactatgttgaacctttgctaagttctccaatagtaagcgatgctgcattttgtacaatgttgaggctagcacgttgcacagcccctcctctttgcaattgggcgctcgacattgctgctgcgattcgtgtgatatctgttggtgattttgaaatggttttggatcttacacctgtgatcatggaagatgatagtaagaagccatcatctggcatctttgaacaaatagtaaatgggctgactattgcgtgcaaagcgggtcctcttccagcagattcatttactttcgtctttccgatcatggaaaggatccttctatcttcaaaaaagacatgtcttcatgatgatgtgcttcacatactatctatgcatatggatccaatactaccacttcctcgacctaggatgttatcagttctttatcatgtgctaagcactgttcctgcctatcaaccttcagttgggcctatgctgaatgagctatgcctaggtctaagaggccatgagttagcacaggctcttgtcggtgtatatgcaaaagaactgcatgttaggcttgcctgcttaactgctataaaatgtgttcctgtgcactctgtgcaacgagatttgcaggtgtcaacaagcctctggattgctgctcatgatccggagaaggtggttgctgaattagcagaggaattatgggaccgctttggttttgatgccatcactgattactctggtattttcaatgcactttcccataaaaattacaatgttcgtgctgcatctgctgaggctctggctgcggcattggatgaaaatcaagacaaaatgcaagatgcactttctacccttttctctctgtacattcgtgatattggcactagtgttgaatttggagatgcacactggctcggaaggcagggtattgcattagcactccactctatcgctgacgttttggcctctaaagatcttcctgttgtcatgacatttctcatctcacgcgccctggctgatccaaacgtcgatgttcgtggtagaatgattaatgctggcatccttattattgacaggcatggaaaggaaaatgttcctttgctatttcctatttttgagagctacttgaataaaagggcatcagatgagaaaacatatgatcttgtgagggaaggtgttgttatttttactggtgctctggcgaaacatctatcaaaggatgatcccaaagttcacagtgtcattgaaaagttgttagatgtccttaacaccccatcagaggcagttcaacgtgctgtctcagattgtttgtccccacttatggtatccaaacaggaagagggtcaggctcttgtttctagactcttggatcggatgatgaaatgtgaaaagtatggtgagcgacgaggtgcagcctttggccttgctggtgtggttaaaggatttggaatttcttccttgaaaaaatatggcatcgctgtgacattgcagaaaaatttggaagacagaatgtctgcaaaatctcgtgaaggagctttacttggatttgagtgcctgtgtgagaagcttggcaaactatttgagccgtatgtcattcaaatgcttccgttcctacttgtgtgtttctctgatcaagtcctagcagtgcgcgaagctgctgagtgtgctgctcgggcaatgatgtctcagctcactggtcctggtgtgaagcttgttcttccgtcacttcttaaggt

SEQ ID NO: 42206 - DNA, 4318 bp, Zea Mays
gcgagcacacaccacactaggcactagcacacctcccctctcaggctctcagcgccccgccgccgccacgcaattgccagtcctcgcgatatgggcgcgcaagaggaggcagtggacgagatgctgcgcgccgccgccgccgaggtttcaacctcctcggtgaagcgccgcctccgcatcttccaccacaccctacctcctctcatcgcgaaggccatagagtcaccgtcagatactgtattgttagtcgatctcattttccagacattgccaatatatgacgatcgagcatcacgaaaagcagtagacgatttggttattcaggctcttggtgaacccaccttcatgaagccctttgctgcggtacttgtacaatctatggaaaagaatctaaaggttacaaacccccttacaagcttaaagcttctcagatggtcacactatcttctgaaatggagtcagtttgccacacttacaaaaggcgcctttaccagactggccaatgcacaagcagtcttatgtcaagtccttatggatgggtccttccgtcggcgccggacttgcaaacagttattcattcatctcttctccgagcacagtggaatatataagatgtacatagaggagctcagagatttaaggatttccatgagagattctcctgcatttttgaatctaatactggattttaccattacctctccatcattatccactcagtaccagtcagtattccttgatttgtatgtcaaaatcatcttgagttcaaaagatcggccaccgaaagcagccactgaagcttttaagcctcttttcttgaacattgggcatgaggattttaagaatactattataccatcatgcataaagatgctgaaaagaaatcctgaaatcgtactacagtctattggatatcttcttaagacagtccatttagacctaagcaagtattccatggagtttatgccagttgttctgcatcaagctcggcattcagatgaagagaggaggattaatgctttgagtattataggaacactaagtgagaagtcaagtgatccagatgctctaccttccatggtcaatgctatcaaagctgttttaggaggctcagaaggaaaactatcacttctataccagagaattggaatgataaatgctttagagcagctatcaagatctcctccaaagcaaataggcagacttgccccctcagtatcaactttccttctaacgtgttacaaggatgatggtatcgaggaagtgaaattggcgattctatcagcaatagggtcctgggctttggtatcagctgaagctgtccaaccagatgttgtttcatttattgctgcaggcttgaaagagaaagacactttaaggaaggggcatctgaaatttttacgagttatatgcaaaaactctgagtctttaacaaaggttgcttctttattggatcatttgattcagttgtcaaaaactggcttcagcaaggcaacacagcggttggatggaatctatgcactctttgcagtatcaaggcttgctgctgttgatacaaaagcagatggtgccattctgaaggagaaactgtggacattgattgctcaaaatgaaccctcattgatctctttacagttgcttcccaaactagcagatgatgattgcttagccgtcctggatcttgttcaatcactgtttgtagaacagttcttcagggttcgagaatatttttcaatccattcattgctgcagctgctaatatatctactttgccatccaagctgggaagttagaaagactggttgtcactggttggagagagactgtcaatattgaaacaaggtgatatggatagcccttcggattctcagctaccattctttccatctaccgaggtccttgtcaagtgtttgtttttgattgcaccttatgctgttgtgcatagtctgagatcatattctcgaattattttgtgctcccaccacccttgccttaccagctcctcaagcccagctggcgtatataagaggttgcaaagaaggcttagacaagaacagatcttttttgttgacttaattactcccaacatctctgttatctgcaagcacttcataggactccaggagcgcaccttgcacgattccttctctgagagtgatattaagatattctatactccagaggggcagttgtcaaccgagcaaggagtttacattgctgaggctgttgctaacaaaaatacaaaacttgcaaaggggcgtttccgtgcatatgatgatcagatgcaggagacagctcggtctattgtccctgcaaagaatgagaagaaagaatcctcaggcattggcaagcgagaaactgggaaatctacaaaaaggactgctcctatagacaaggctaagactgctaaagaggaggccagagagttgctcttgaaggaggaagcatctgtgcgtatgaaggttgggcaagtgcagaaggatctctccttaatgttggatgctcttggcaagttggctattgctaatcctatatttactcatggtcaactgccgtcactggtaaactatgttgaacctttgctaagttctccaatagtaagcgatgctgcattttgtacaatgttgaggctagcacgttgcacagcccctcctctttgcaattgggcgctcgacattgctgctgcgattcgtgtgatatctgttggtgattttgaaatggttttggatcttacacctgtgatcatggaagatgatagtaagaagccatcatctggcatctttgaacaaatagtaaatgggctgactattgcgtgcaaagcgggtcctcttccagcagattcatttactttcgtctttccgatcatggaaaggatccttctatcttcaaaaaagacatgtcttcatgatgatgtgcttcacatactatctatgcatatggatccaatactaccacttcctcgacctaggatgttatcagttctttatcatgtgctaagcactgttcctgcctatcaaccttcagttgggcctatgctgaatgagctatgcctaggtctaagaggccatgagttagcacaggctcttgtcggtgtatatgcaaaagaactgcatgttaggcttgcctgcttaactgctataaaatgtgttcctgtgcactctgtgcaacgagatttgcaggtgtcaacaagcctctggattgctgctcatgatccggagaaggtggttgctgaattagcagaggaattatgggaccgctttggttttgatgccatcactgattactctggtattttcaatgcactttcccataaaaattacaatgttcgtgctgcatctgctgaggctctggctgcggcattggatgaaaatcaagacaaaatgcaagatgcactttctacccttttctctctgtacattcgtgatattggcactagtgttgaatttggagatgcacactggctcggaaggcagggtattgcattagcactccactctatcgctgacgttttggcctctaaagatcttcctgttgtcatgacatttctcatctcacgcgccctggctgatccaaacgtcgatgttcgtggtagaatgattaatgctggcatccttattattgacaggcatggaaaggaaaatgttcctttgctatttcctatttttgagagctacttgaataaaagggcaagtactactttcctattaataattgtactagcatcagatgagaaaacatatgatcttgtgagggaaggtgttgttatttttactggtgctctggcgaaacatctatcaaaggatgatcccaaagttcacagtgtcattgaaaagttgttagatgtccttaacaccccatcagaggcagttcaacgtgctgtctcagattgtttgtccccacttatggtatccaaacaggaagagggtcaggctcttgtttctagactcttggatcggatgatgaaatgtgaaaagtatggtgagcgacgaggtgcagcctttggccttgctggtgtggttaaaggatttggaatttcttccttgaaaaaatatggcatcgctgtgacattgcagaaaaatttggaagacagaatgtctgcaaaatctcgtgaaggagctttacttggatttgagtgcctgtgtgagaagcttggcaaactatttgagccgtatgtcattcaaatgcttccgttcctacttgtgtgtttctctgatcaagtcctagcagtgcgcgaagctgctgagtgtgctgctcgggcaatgatgtctcagctcactggtcctggtgtgaagcttgttcttccgtcacttcttaaggt

SEQ ID NO: 42207 - DNA, 4360 bp, Zea Mays
cgagcacacaccacactaggcactagcacacctcccctctcaggctctcagcgccccgccgccgccacgcaattgccagtcctcgcgatatgggcgcgcaagaggaggcagtggacgagatgctgcgcgccgccgccgccgaggtttcaacctcctcggtgaagcgccgcctccgcatcttccaccacaccctacctcctctcatcgcgaaggccatagagtcaccgtcagatactgtattgttagtcgatctcattttccagacattgccaatatatgacgatcgagcatcacgaaaagcagtagacgatttggttattcaggctcttggtgaacccaccttcatgaagccctttgctgcggtacttgtacaatctatggaaaagaatctaaaggttacaaacccccttacaagcttaaagcttctcagatggtcacactatcttctgaaatggagtcagtttgccacacttacaaaaggcgcctttaccagactggccaatgcacaagcagtcttatgtcaagtccttatggatgggtccttccgtcggcgccggacttgcaaacagttattcattcatctcttctccgagcacagtggaatatataagatgtacatagaggagctcagagatttaaggatttccatgagagattctcctgcatttttgaatctaatactggattttaccattacctctccatcattatccactcagtaccagtcagtattccttgatttgtatgtcaaaatcatcttgagttcaaaagatcggccaccgaaagcagccactgaagcttttaagcctcttttcttgaacattgggcatgaggattttaagaatactattataccatcatgcataaagatgctgaaaagaaatcctgaaatcgtactacagtctattggatatcttcttaagacagtccatttagacctaagcaagtattccatggagtttatgccagttgttctgcatcaagctcggcattcagatgaagagaggaggattaatgctttgagtattataggaacactaagtgagaagtcaagtgatccagatgctctaccttccatggtcaatgctatcaaagctgttttaggaggctcagaaggaaaactatcacttctataccagagaattggaatgataaatgctttagagcagctatcaagatctcctccaaagcaaataggcagacttgccccctcagtatcaactttccttctaacgtgttacaaggatgatggtatcgaggaagtgaaattggcgattctatcagcaatagggtcctgggctttggtatcagctgaagctgtccaaccagatgttgtttcatttattgctgcaggcttgaaagagaaagacactttaaggaaggggcatctgaaatttttacgagttatatgcaaaaactctgagtctttaacaaaggttgcttctttattggatcatttgattcagttgtcaaaaactggcttcagcaaggcaacacagcggttggatggaatctatgcactctttgcagtatcaaggcttgctgctgttgatacaaaagcagatggtgccattctgaaggagaaactgtggacattgattgctcaaaatgaaccctcattgatctctttacagttgcttcccaaactagcagatgatgattgcttagccgtcctggatcttgttcaatcactgtttgtagaacagttcttcagggttcgagaatatttttcaatccattcattgctgcagctgctaatatatctactttgccatccaagctgggaagttagaaaggtagcttacgatgttaccaagaaaattttctcaagctccagtggtctagccgaagatattctatttttattcacagactggttgtcactggttggagagagactgtcaatattgaaacaaggtgatatggatagcccttcggattctcagctaccattctttccatctaccgaggtccttgtcaagtgtttgtttttgattgcaccttatgctgttgtgcatagtctgagatcatattctcgaattattttgtgctcccaccacccttgccttaccagctcctcaagcccagctggcgtatataagaggttgcaaagaaggcttagacaagaacagatcttttttgttgacttaattactcccaacatctctgttatctgcaagcacttcataggactccaggagcgcaccttgcacgattccttctctgagagtgatattaagatattctatactccagaggggcagttgtcaaccgagcaaggagtttacattgctgaggctgttgctaacaaaaatacaaaacttgcaaaggggcgtttccgtgcatatgatgatcagatgcaggagacagctcggtctattgtccctgcaaagaatgagaagaaagaatcctcaggcattggcaagcgagaaactgggaaatctacaaaaaggactgctcctatagacaaggctaagactgctaaagaggaggccagagagttgctcttgaaggaggaagcatctgtgcgtatgaaggttgggcaagtgcagaaggatctctccttaatgttggatgctcttggcaagttggctattgctaatcctatatttactcatggtcaactgccgtcactggtaaactatgttgaacctttgctaagttctccaatagtaagcgatgctgcattttgtacaatgttgaggctagcacgttgcacagcccctcctctttgcaattgggcgctcgacattgctgctgcgattcgtgtgatatctgttggtgattttgaaatggttttggatcttacacctgtgatcatggaagatgatagtaagaagccatcatctggcatctttgaacaaatagtaaatgggctgactattgcgtgcaaagcgggtcctcttccagcagattcatttactttcgtctttccgatcatggaaaggatccttctatcttcaaaaaagacatgtcttcatgatgatgtgcttcacatactatctatgcatatggatccaatactaccacttcctcgacctaggatgttatcagttctttatcatgtgctaagcactgttcctgcctatcaaccttcagttgggcctatgctgaatgagctatgcctaggtctaagaggccatgagttagcacaggctcttgtcggtgtatatgcaaaagaactgcatgttaggcttgcctgcttaactgctataaaatgtgttcctgtgcactctgtgcaacgagatttgcaggtgtcaacaagcctctggattgctgctcatgatccggagaaggtggttgctgaattagcagaggaattatgggaccgctttggttttgatgccatcactgattactctggtattttcaatgcactttcccataaaaattacaatgttcgtgctgcatctgctgaggctctggctgcggcattggatgaaaatcaagacaaaatgcaagatgcactttctacccttttctctctgtacattcgtgatattggcactagtgttgaatttggagatgcacactggctcggaaggcagggtattgcattagcactccactctatcgctgacgttttggcctctaaagatcttcctgttgtcatgacatttctcatctcacgcgccctggctgatccaaacgtcgatgttcgtggtagaatgattaatgctggcatccttattattgacaggcatggaaaggaaaatgttcctttgctatttcctatttttgagagctacttgaataaaagggcatcagatgagaaaacatatgatcttgtgagggaaggtgttgttatttttactggtgctctggcgaaacatctatcaaaggatgatcccaaagttcacagtgtcattgaaaagttgttagatgtccttaacaccccatcagaggcagttcaacgtgctgtctcagattgtttgtccccacttatggtatccaaacaggaagagggtcaggctcttgtttctagactcttggatcggatgatgaaatgtgaaaagtatggtgagcgacgaggtgcagcctttggccttgctggtgtggttaaaggatttggaatttcttccttgaaaaaatatggcatcgctgtgacattgcagaaaaatttggaagacagaatgtctgcaaaatctcgtgaaggagctttacttggatttgagtgcctgtgtgagaagcttggcaaactatttgagccgtatgtcattcaaatgcttccgttcctacttgtgtgtttctctgatcaagtcctagcagtgcgcgaagctgctgagtgtgctgctcgggcaatgatgtctcagctcactggtcctggtgtgaagcttgttcttccgtcacttcttaaggt

SEQ ID NO: 42208 - DNA, 4334 bp, Zea Mays
cgagcacacaccacactaggcactagcacacctcccctctcaggctctcagcgccccgccgccgccacgcaattgccagtcctcgcgatatgggcgcgcaagaggaggcagtggacgagatgctgcgcgccgccgccgccgaggtttcaacctcctcggtgaagcgccgcctccgcatcttccaccacaccctacctcctctcatcgcgaaggccatagagtcaccgtcagatactgtattgttagtcgatctcattttccagacattgccaatatatgacgatcgagcatcacgaaaagcagtagacgatttggttattcaggctcttggtgaacccaccttcatgaagccctttgctgcggtacttgtacaatctatggaaaagaatctaaaggttacaaacccccttacaagcttaaagcttctcagatggtcacactatcttctgaaatggagtcagtttgccacacttacaaaaggcgcctttaccagactggccaatgcacaagcagtcttatgtcaagtccttatggatgggtccttccgtcggcgccggacttgcaaacagttattcattcatctcttctccgagcacagtggaatatataagatgtacatagaggagctcagagatttaaggatttccatgagagattctcctgcatttttgaatctaatactggattttaccattacctctccatcattatccactcagtaccagtcagtattccttgatttgtatgtcaaaatcatcttgagttcaaaagatcggccaccgaaagcagccactgaagcttttaagcctcttttcttgaacattgggcatgaggattttaagaatactattataccatcatgcataaagatgctgaaaagaaatcctgaaatcgtactacagtctattggatatcttcttaagacagtccatttagacctaagcaagtattccatggagtttatgccagttgttctgcatcaagctcggcattcagatgaagagaggaggattaatgctttgagtattataggaacactaagtgagaagtcaagtgatccagatgctctaccttccatggtcaatgctatcaaagctgttttaggaggctcagaaggaaaactatcacttctataccagagaattggaatgataaatgctttagagcagctatcaagatctcctccaaagcaaataggcagacttgccccctcagtatcaactttccttctaacgtgttacaaggatgatggtatcgaggaagtgaaattggcgattctatcagcaatagggtcctgggctttggtatcagctgaagctgtccaaccagatgttgtttcatttattgctgcaggcttgaaagagaaagacactttaaggaaggggcatctgaaatttttacgagttatatgcaaaaactctgagtctttaacaaaggttgcttctttattggatcatttgattcagttgtcaaaaactggcttcagcaaggcaacacagcggttggatggaatctatgcactctttgcagtatcaaggcttgctgctgttgatacaaaagcagatggtgccattctgaaggagaaactgtggacattgattgctcaaaatgaaccctcattgatctctttacagttgcttcccaaactagcagatgatgattgcttagccgtcctggatcttgttcaatcactgtttgtagaacagttcttcagggttcgagaatatttttcaatccattcattgctgcagctgctaatatatctactttgccatccaagctgggaagttagaaaggtagcttacgatgttaccaagaaaattttctcaagctccagtggtctagccgaagatattctatttttattcacagactggttgtcactggttggagagagactgtcaatattgaaacaaggtgatatggatagcccttcggattctcagctaccattctttccatctaccgaggtccttgtcaagtgtttgtttttgattgcaccttatgctgttgtgcatagtctgagatcatattctcgaattattttgtgctcccaccacccttgccttaccagctcctcaagcccagctggcgtatataagaggttgcaaagaaggcttagacaagaacagatcttttttgttgacttaattactcccaacatctctgttatctgcaagcacttcataggactccaggagcgcaccttgcacgattccttctctgagagtgatattaagatattctatactccagaggggcagttgtcaaccgagcaaggagtttacattgctgaggctgttgctaacaaaaatacaaaacttgcaaaggggcgtttccgtgcatatgatgatcagatgcaggagacagctcggtctattgtccctgcaaagaatgagaagaaagaatcctcaggcattggcaagcgagaaactgggaaatctacaaaaaggactgctcctatagacaaggctaagactgctaaagaggaggccagagagttgctcttgaaggaggaagcatctgtgcgtatgaaggttgggcaagtgcagaaggatctctccttaatgttggatgctcttggcaagttggctattgctaatcctatatttactcatggtcaactgccgtcactggtaaactatgttgaacctttgctaagttctccaatagtaagcgatgctgcattttgtacaatgttgaggctagcacgttgcacagcccctcctctttgcaattgggcgctcgacattgctgctgcgattcgtgtgatatctgttggtgattttgaaatggttttggatcttacacctgtgatcatggaagatgatagtaagaagccatcatctggcatctttgaacaaatagtaaatgggctgactattgcgtgcaaagcgggtcctcttccagcagattcatttactttcgtctttccgatcatggaaaggatccttctatcttcaaaaaagacatgtcttcatgatgatgtgcttcacatactatctatgcatatggatccaatactaccacttcctcgacctaggatgttatcagttctttatcatgtgctaagcactgttcctgcctatcaaccttcagttgggcctatgctgaatgagctatgcctaggtctaagaggccatgagttagcacaggctcttgtcggtgtatatgcaaaagaactgcatgttaggcttgcctgcttaactgctataaaatgtgttcctgtgcactctgtgcaacgagatttgcaggtgtcaacaagcctctggattgctgctcatgatccggagaaggtggttgctgaattagcagaggaattatgggaccgctttggttttgatgccatcactgattactctggtattttcaatgcactttcccataaaaattacaatgttcgtgctgcatctgctgaggctctggctgcggcattggatgaaaatcaagacaaaatgcaagatgcactttctacccttttctctctgtacattcgtgatattggcactagtgttgaatttggagatgcacactggctcggaaggcagggtattgcattagcactccactctatcgctgacgttttggcctctaaagatcttcctgttgtcatgacatttctcatctcacgcgccctggctgatccaaacgtcgatgttcgtggtagaatgattaatgctggcatccttattattgacaggcatggaaaggaaaatgttcctttgctatttcctatttttgagagctacttgaataaaagggcaagtactactttcctattaataattgtactagcatcagatgagaaaacatatgatcttgtgagggaaggtgttgttatttttactggtgctctggcgaaacatctatcaaaggatgatcccaaagttcacagtgtcattgaaaagttgttagatgtccttaacaccccatcagaggcagttcaacgtgctgtctcagattgtttgtccccacttatggtatccaaacaggaagagggtcaggctcttgtttctagactcttggatcggatgatgaaatgtgaaaagtatggtgagcgacgaggtgcagcctttggccttgctggtgtggttaaaggatttggaatttcttccttgaaaaaatatggcatcgctgtgacattgcagaaaaatttggaagacagaatgtctgcaaaatctcgtgaaggagctttacttggatttgagtgcctgtgtgagaagcttggcaaactatttgagcctgcgcgaagctgctgagtgtgctgctcgggcaatgatgtctcagctcactggtcctggtgtgaagcttgttcttccgtcacttcttaaggt

SEQ ID NO: 42209 - DNA, 4513 bp, Zea Mays
cgagcacacaccacactaggcactagcacacctcccctctcaggctctcagcgccccgccgccgccacgcaattgccagtcctcgcgatatgggcgcgcaagaggaggcagtggacgagatgctgcgcgccgccgccgccgaggtttcaacctcctcggtgaagcgccgcctccgcatcttccaccacaccctacctcctctcatcgcgaaggccatagagtcaccgtcagatactgtattgttagtcgatctcattttccagacattgccaatatatgacgatcgagcatcacgaaaagcagtagacgatttggttattcaggctcttggtgaacccaccttcatgaagccctttgctgcggtacttgtacaatctatggaaaagaatctaaaggttacaaacccccttacaagcttaaagcttctcagatggtcacactatcttctgaaatggagtcagtttgccacacttacaaaaggcgcctttaccagactggccaatgcacaagcagtcttatgtcaagtccttatggatgggtccttccgtcggcgccggacttgcaaacagttattcattcatctcttctccgagcacagtggaatatataagatgtacatagaggagctcagagatttaaggatttccatgagagattctcctgcatttttgaatctaatactggattttaccattacctctccatcattatccactcagtaccagtcagtattccttgatttgtatgtcaaaatcatcttgagttcaaaagatcggccaccgaaagcagccactgaagcttttaagcctcttttcttgaacattgggcatgaggattttaagaatactattataccatcatgcataaagatgctgaaaagaaatcctgaaatcgtactacagtctattggatatcttcttaagacagtccatttagacctaagcaagtattccatggagtttatgccagttgttctgcatcaagctcggcattcagatgaagagaggaggattaatgctttgagtattataggaacactaagtgagaagtcaagtgatccagatgctctaccttccatggtcaatgctatcaaagctgttttaggaggctcagaaggaaaactatcacttctataccagagaattggaatgataaatgctttagagcagctatcaagatctcctccaaagcaaataggcagacttgccccctcagtatcaactttccttctaacgtgttacaaggatgatggtatcgaggaagtgaaattggcgattctatcagcaatagggtcctgggctttggtatcagctgaagctgtccaaccagatgttgtttcatttattgctgcaggcttgaaagagaaagacactttaaggaaggggcatctgaaatttttacgagttatatgcaaaaactctgagtctttaacaaaggttgcttctttattggatcatttgattcagttgtcaaaaactggcttcagcaaggcaacacagcggttggatggaatctatgcactctttgcagtatcaaggcttgctgctgttgatacaaaagcagatggtgccattctgaaggagaaactgtggacattgattgctcaaaatgaaccctcattgatctctttacagttgcttcccaaactagcagatgatgattgcttagccgtcctggatcttgttcaatcactgtttgtagaacagttcttcagggttcgagaatatttttcaatccattcattgctgcagctgctaatatatctactttgccatccaagctgggaagttagaaaggtagcttacgatgttaccaagaaaattttctcaagctccagtggtctagccgaagatattctatttttattcacagactggttgtcactggttggagagagactgtcaatattgaaacaaggtgatatggatagcccttcggattctcagctaccattctttccatctaccgaggtccttgtcaagtgtttgtttttgattgcaccttatgctgttgtgcatagtctgagatcatattctcgaattattttgtgctcccaccacccttgccttaccagctcctcaagcccagctggcgtatataagaggttgcaaagaaggcttagacaagaacagatcttttttgttgacttaattactcccaacatctctgttatctgcaaggaattactttcacaggatggtctatttagttccaacaatcaagtacagagtgcagcattatgttcgctatcaacacttatgacaattactcccaacgacacatttctagagtttgagaagcacttcataggactccaggagcgcaccttgcacgattccttctctgagagtgatattaagatattctatactccagaggggcagttgtcaaccgagcaaggagtttacattgctgaggctgttgctaacaaaaatacaaaacttgcaaaggggcgtttccgtgcatatgatgatcagatgcaggagacagctcggtctattgtccctgcaaagaatgagaagaaagaatcctcaggcattggcaagcgagaaactgggaaatctacaaaaaggactgctcctatagacaaggctaagactgctaaagaggaggccagagagttgctcttgaaggaggaagcatctgtgcgtatgaaggttgggcaagtgcagaaggatctctccttaatgttggatgctcttggcaagttggctattgctaatcctatatttactcatggtcaactgccgtcactggtaaactatgttgaacctttgctaagttctccaatagtaagcgatgctgcattttgtacaatgttgaggctagcacgttgcacagcccctcctctttgcaattgggcgctcgacattgctgctgcgattcgtgtgatatctgttggtgattttgaaatggttttggatcttacacctgtgatcatggaagatgatagtaagaagccatcatctggcatctttgaacaaatagtaaatgggctgactattgcgtgcaaagcgggtcctcttccagcagattcatttactttcgtctttccgatcatggaaaggatccttctatcttcaaaaaagacatgtcttcatgatgatgtgcttcacatactatctatgcatatggatccaatactaccacttcctcgacctaggatgttatcagttctttatcatgtgctaagcactgttcctgcctatcaaccttcagttgggcctatgctgaatgagctatgcctaggtctaagaggccatgagttagcacaggctcttgtcggtgtatatgcaaaagaactgcatgttaggcttgcctgcttaactgctataaaatgtgttcctgtgcactctgtgcaacgagatttgcaggtgtcaacaagcctctggattgctgctcatgatccggagaaggtggttgctgaattagcagaggaattatgggaccgctttggttttgatgccatcactgattactctggtattttcaatgcactttcccataaaaattacaatgttcgtgctgcatctgctgaggctctggctgcggcattggatgaaaatcaagacaaaatgcaagatgcactttctacccttttctctctgtacattcgtgatattggcactagtgttgaatttggagatgcacactggctcggaaggcagggtattgcattagcactccactctatcgctgacgttttggcctctaaagatcttcctgttgtcatgacatttctcatctcacgcgccctggctgatccaaacgtcgatgttcgtggtagaatgattaatgctggcatccttattattgacaggcatggaaaggaaaatgttcctttgctatttcctatttttgagagctacttgaataaaagggcaagtactactttcctattaataattgtactagcatcagatgagaaaacatatgatcttgtgagggaaggtgttgttatttttactggtgctctggcgaaacatctatcaaaggatgatcccaaagttcacagtgtcattgaaaagttgttagatgtccttaacaccccatcagaggcagttcaacgtgctgtctcagattgtttgtccccacttatggtatccaaacaggaagagggtcaggctcttgtttctagactcttggatcggatgatgaaatgtgaaaagtatggtgagcgacgaggtgcagcctttggccttgctggtgtggttaaaggatttggaatttcttccttgaaaaaatatggcatcgctgtgacattgcagaaaaatttggaagacagaatgtctgcaaaatctcgtgaaggagctttacttggatttgagtgcctgtgtgagaagcttggcaaactatttgagccgtatgtcattcaaatgcttccgttcctacttgtgtgtttctctgatcaagtcctagcagtgcgcgaagctgctgagtgtgctgctcgggcaatgatgtctcagctcactggtcctggtgtgaagcttgttcttccgtcacttcttaaggt

SEQ ID NO: 42210 - DNA, 4477 bp, Zea Mays
gcacacaccacactaggcactagcacacctcccctctcaggctctcagcgccccgccgccgccacgcaattgccagtcctcgcgatatgggcgcgcaagaggaggcagtggacgagatgctgcgcgccgccgccgccgaggtttcaacctcctcggtgaagcgccgcctccgcatcttccaccacaccctacctcctctcatcgcgaaggccatagagtcaccgtcagatactgtattgttagtcgatctcattttccagacattgccaatatatgacgatcgagcatcacgaaaagcagtagacgatttggttattcaggctcttggtgaacccaccttcatgaagccctttgctgcggtacttgtacaatctatggaaaagaatctaaaggttacaaacccccttacaagcttaaagcttctcagatggtcacactatcttctgaaatggagtcagtttgccacacttacaaaaggcgcctttaccagactggccaatgcacaagcagtcttatgtcaagtccttatggatgggtccttccgtcggcgccggacttgcaaacagttattcattcatctcttctccgagcacagtggaatatataagatgtacatagaggagctcagagatttaaggatttccatgagagattctcctgcatttttgaatctaatactggattttaccattacctctccatcattatccactcagtaccagtcagtattccttgatttgtatgtcaaaatcatcttgagttcaaaagatcggccaccgaaagcagccactgaagcttttaagcctcttttcttgaacattgggcatgaggattttaagaatactattataccatcatgcataaagatgctgaaaagaaatcctgaaatcgtactacagtctattggatatcttcttaagacagtccatttagacctaagcaagtattccatggagtttatgccagttgttctgcatcaagctcggcattcagatgaagagaggaggattaatgctttgagtattataggaacactaagtgagaagtcaagtgatccagatgctctaccttccatggtcaatgctatcaaagctgttttaggaggctcagaaggaaaactatcacttctataccagagaattggaatgataaatgctttagagcagctatcaagatctcctccaaagcaaataggcagacttgccccctcagtatcaactttccttctaacgtgttacaaggatgatggtatcgaggaagtgaaattggcgattctatcagcaatagggtcctgggctttggtatcagctgaagctgtccaaccagatgttgtttcatttattgctgcaggcttgaaagagaaagacactttaaggaaggggcatctgaaatttttacgagttatatgcaaaaactctgagtctttaacaaaggttgcttctttattggatcatttgattcagttgtcaaaaactggcttcagcaaggcaacacagcggttggatggaatctatgcactctttgcagtatcaaggcttgctgctgttgatacaaaagcagatggtgccattctgaaggagaaactgtggacattgattgctcaaaatgaaccctcattgatctctttacagttgcttcccaaactagcagatgatgattgcttagccgtcctggatcttgttcaatcactgtttgtagaacagttcttcagggttcgagaatatttttcaatccattcattgctgcagctgctaatatatctactttgccatccaagctgggaagttagaaaggtagcttacgatgttaccaagaaaattttctcaagctccagtggtctagccgaagatattctatttttattcacagactggttgtcactggttggagagagactgtcaatattgaaacaaggtgatatggatagcccttcggattctcagctaccattctttccatctaccgaggtccttgtcaagtgtttgtttttgattgcaccttatgctgttgtgcatagtctgagatcatattctcgaattattttgtgctcccaccacccttgccttaccagctcctcaagcccagctggcgtatataagaggttgcaaagaaggcttagacaagaacagatcttttttgttgacttaattactcccaacatctctgttatctgcaaggaattactttcacaggatggtctatttagttccaacaatcaagtacagagtgcagcattatgttcgctatcaacacttatgacaattactcccaacgacacatttctagagtttgagaagcacttcataggactccaggagcgcaccttgcacgattccttctctgagagtgatattaagatattctatactccagaggggcagttgtcaaccgagcaaggagtttacattgctgaggctgttgctaacaaaaatacaaaacttgcaaaggggcgtttccgtgcatatgatgatcagatgcaggagacagctcggtctattgtccctgcaaagaatgagaagaaagaatcctcaggcattggcaagcgagaaactgggaaatctacaaaaaggactgctcctatagacaaggctaagactgctaaagaggaggccagagagttgctcttgaaggaggaagcatctgtgcgtatgaaggttgggcaagtgcagaaggatctctccttaatgttggatgctcttggcaagttggctattgctaatcctatatttactcatggtcaactgccgtcactggtaaactatgttgaacctttgctaagttctccaatagtaagcgatgctgcattttgtacaatgttgaggctagcacgttgcacagcccctcctctttgcaattgggcgctcgacattgctgctgcgattcgtgtgatatctgttggtgattttgaaatggttttggatcttacacctgtgatcatggaagatgatagtaagaagccatcatctggcatctttgaacaaatagtaaatgggctgactattgcgtgcaaagcgggtcctcttccagcagattcatttactttcgtctttccgatcatggaaaggatccttctatcttcaaaaaagacatgtcttcatgatgatgtgcttcacatactatctatgcatatggatccaatactaccacttcctcgacctaggatgttatcagttctttatcatgtgctaagcactgttcctgcctatcaaccttcagttgggcctatgctgaatgagctatgcctaggtctaagaggccatgagttagcacaggctcttgtcggtgtatatgcaaaagaactgcatgttaggcttgcctgcttaactgctataaaatgtgttcctgtgcactctgtgcaacgagatttgcaggtgtcaacaagcctctggattgctgctcatgatccggagaaggtggttgctgaattagcagaggaattatgggaccgctttggttttgatgccatcactgattactctggtattttcaatgcactttcccataaaaattacaatgttcgtgctgcatctgctgaggctctggctgcggcattggatgaaaatcaagacaaaatgcaagatgcactttctacccttttctctctgtacattcgtgatattggcactagtgttgaatttggagatgcacactggctcggaaggcagggtattgcattagcactccactctatcgctgacgttttggcctctaaagatcttcctgttgtcatgacatttctcatctcacgcgccctggctgatccaaacgtcgatgttcgtggtagaatgattaatgctggcatccttattattgacaggcatggaaaggaaaatgttcctttgctatttcctatttttgagagctacttgaataaaagggcatcagatgagaaaacatatgatcttgtgagggaaggtgttgttatttttactggtgctctggcgaaacatctatcaaaggatgatcccaaagttcacagtgtcattgaaaagttgttagatgtccttaacaccccatcagaggcagttcaacgtgctgtctcagattgtttgtccccacttatggtatccaaacaggaagagggtcaggctcttgtttctagactcttggatcggatgatgaaatgtgaaaagtatggtgagcgacgaggtgcagcctttggccttgctggtgtggttaaaggatttggaatttcttccttgaaaaaatatggcatcgctgtgacattgcagaaaaatttggaagacagaatgtctgcaaaatctcgtgaaggagctttacttggatttgagtgcctgtgtgagaagcttggcaaactatttgagccgtatgtcattcaaatgcttccgttcctacttgtgtgtttctctgatcaagtcctagcagtgcgcgaagctgctgagtgtgctgctcgggcaatgatgtctcagctcactggtcctggtgtgaagcttgttcttccgtcacttcttaaggt

SEQ ID NO: 42211 - DNA, 4486 bp, Zea Mays
cacacctcccctctcaggctctcagcgccccgccgccgccacgcaattgccagtcctcgcgatatgggcgcgcaagaggaggcagtggacgagatgctgcgcgccgccgccgccgaggtttcaacctcctcggtgaagcgccgcctccgcatcttccaccacaccctacctcctctcatcgcgaaggccatagagtcaccgtcagatactgtattgttagtcgatctcattttccagacattgccaatatatgacgatcgagcatcacgaaaagcagtagacgatttggttattcaggctcttggtgaacccaccttcatgaagccctttgctgcggtacttgtacaatctatggaaaagaatctaaaggttacaaacccccttacaagcttaaagcttctcagatggtcacactatcttctgaaatggagtcagtttgccacacttacaaaaggcgcctttaccagactggccaatgcacaagcagtcttatgtcaagtccttatggatgggtccttccgtcggcgccggacttgcaaacagttattcattcatctcttctccgagcacagtggaatatataagatgtacatagaggagctcagagatttaaggatttccatgagagattctcctgcatttttgaatctaatactggattttaccattacctctccatcattatccactcagtaccagtcagtattccttgatttgtatgtcaaaatcatcttgagttcaaaagatcggccaccgaaagcagccactgaagcttttaagcctcttttcttgaacattgggcatgaggattttaagaatactattataccatcatgcataaagatgctgaaaagaaatcctgaaatcgtactacagtctattggatatcttcttaagacagtccatttagacctaagcaagtattccatggagtttatgccagttgttctgcatcaagctcggcattcagatgaagagaggaggattaatgctttgagtattataggaacactaagtgagaagtcaagtgatccagatgctctaccttccatggtcaatgctatcaaagctgttttaggaggctcagaaggaaaactatcacttctataccagagaattggaatgataaatgctttagagcagctatcaagatctcctccaaagcaaataggcagacttgccccctcagtatcaactttccttctaacgtgttacaaggatgatggtatcgaggaagtgaaattggcgattctatcagcaatagggtcctgggctttggtatcagctgaagctgtccaaccagatgttgtttcatttattgctgcaggcttgaaagagaaagacactttaaggaaggggcatctgaaatttttacgagttatatgcaaaaactctgagtctttaacaaaggttgcttctttattggatcatttgattcagttgtcaaaaactggcttcagcaaggcaacacagcggttggatggaatctatgcactctttgcagtatcaaggcttgctgctgttgatacaaaagcagatggtgccattctgaaggagaaactgtggacattgattgctcaaaatgaaccctcattgatctctttacagttgcttcccaaactagcagatgatgattgcttagccgtcctggatcttgttcaatcactgtttgtagaacagttcttcagggttcgagaatatttttcaatccattcattgctgcagctgctaatatatctactttgccatccaagctgggaagttagaaaggtagcttacgatgttaccaagaaaattttctcaagctccagtggtctagccgaagatattctatttttattcacagactggttgtcactggttggagagagactgtcaatattgaaacaaggtgatatggatagcccttcggattctcagctaccattctttccatctaccgaggtccttgtcaagtgtttgtttttgattgcaccttatgctgttgtgcatagtctgagatcatattctcgaattattttgtgctcccaccacccttgccttaccagctcctcaagcccagctggcgtatataagaggttgcaaagaaggcttagacaagaacagatcttttttgttgacttaattactcccaacatctctgttatctgcaaggaattactttcacaggatggtctatttagttccaacaatcaagtacagagtgcagcattatgttcgctatcaacacttatgacaattactcccaacgacacatttctagagtttgagaagcacttcataggactccaggagcgcaccttgcacgattccttctctgagagtgatattaagatattctatactccagaggggcagttgtcaaccgagcaaggagtttacattgctgaggctgttgctaacaaaaatacaaaacttgcaaaggggcgtttccgtgcatatgatgatcagatgcagagacagctcggtctattgtccctgcaaagaatgagaagaaagaatcctcaggcattggcaagcgagaaactgggaaatctacaaaaaggactgctcctatagacaaggctaagactgctaaagaggaggccagagagttgctcttgaaggaggaagcatctgtgcgtatgaaggttgggcaagtgcagaaggatctctccttaatgttggatgctcttggcaagttggctattgctaatcctatatttactcatggtcaactgccgtcactggtaaactatgttgaacctttgctaagttctccaatagtaagcgatgctgcattttgtacaatgttgaggctagcacgttgcacagcccctcctctttgcaattgggcgctcgacattgctgctgcgattcgtgtgatatctgttggtgattttgaaatggttttggatcttacacctgtgatcatggaagatgatagtaagaagccatcatctggcatctttgaacaaatagtaaatgggctgactattgcgtgcaaagcgggtcctcttccagcagattcatttactttcgtctttccgatcatggaaaggatccttctatcttcaaaaaagacatgtcttcatgatgatgtgcttcacatactatctatgcatatggatccaatactaccacttcctcgacctaggatgttatcagttctttatcatgtgctaagcactgttcctgcctatcaaccttcagttgggcctatgctgaatgagctatgcctaggtctaagaggccatgagttagcacaggctcttgtcggtgtatatgcaaaagaactgcatgttaggcttgcctgcttaactgctataaaatgtgttcctgtgcactctgtgcaacgagatttgcaggtgtcaacaagcctctggattgctgctcatgatccggagaaggtggttgctgaattagcagaggaattatgggaccgctttggttttgatgccatcactgattactctggtattttcaatgcactttcccataaaaattacaatgttcgtgctgcatctgctgaggctctggctgcggcattggatgaaaatcaagacaaaatgcaagatgcactttctacccttttctctctgtacattcgtgatattggcactagtgttgaatttggagatgcacactggctcggaaggcagggtattgcattagcactccactctatcgctgacgttttggcctctaaagatcttcctgttgtcatgacatttctcatctcacgcgccctggctgatccaaacgtcgatgttcgtggtagaatgattaatgctggcatccttattattgacaggcatggaaaggaaaatgttcctttgctatttcctatttttgagagctacttgaataaaagggcaagtactactttcctattaataattgtactagcatcagatgagaaaacatatgatcttgtgagggaaggtgttgttatttttactggtgctctggcgaaacatctatcaaaggatgatcccaaagttcacagtgtcattgaaaagttgttagatgtccttaacaccccatcagaggcagttcaacgtgctgtctcagattgtttgtccccacttatggtatccaaacaggaagagggtcaggctcttgtttctagactcttggatcggatgatgaaatgtgaaaagtatggtgagcgacgaggtgcagcctttggccttgctggtgtggttaaaggatttggaatttcttccttgaaaaaatatggcatcgctgtgacattgcagaaaaatttggaagacagaatgtctgcaaaatctcgtgaaggagctttacttggatttgagtgcctgtgtgagaagcttggcaaactatttgagccgtatgtcattcaaatgcttccgttcctacttgtgtgtttctctgatcaagtcctagcagtgcgcgaagctgctgagtgtgctgctcgggcaatgatgtctcagctcactggtcctggtgtgaagcttgttcttccgtcacttcttaaggt

SEQ ID NO: 42212 - DNA, 4336 bp, Zea Mays
cacacctcccctctcaggctctcagcgccccgccgccgccacgcaattgccagtcctcgcgatatgggcgcgcaagaggaggcagtggacgagatgctgcgcgccgccgccgccgaggtttcaacctcctcggtgaagcgccgcctccgcatcttccaccacaccctacctcctctcatcgcgaaggccatagagtcaccgtcagatactgtattgttagtcgatctcattttccagacattgccaatatatgacgatcgagcatcacgaaaagcagtagacgatttggttattcaggctcttggtgaacccaccttcatgaagccctttgctgcggtacttgtacaatctatggaaaagaatctaaaggttacaaacccccttacaagcttaaagcttctcagatggtcacactatcttctgaaatggagtcagtttgccacacttacaaaaggcgcctttaccagactggccaatgcacaagcagtcttatgtcaagtccttatggatgggtccttccgtcggcgccggacttgcaaacagttattcattcatctcttctccgagcacagtggaatatataagatgtacatagaggagctcagagatttaaggatttccatgagagattctcctgcatttttgaatctaatactggattttaccattacctctccatcattatccactcagtaccagtcagtattccttgatttgtatgtcaaaatcatcttgagttcaaaagatcggccaccgaaagcagccactgaagcttttaagcctcttttcttgaacattgggcatgaggattttaagaatactattataccatcatgcataaagatgctgaaaagaaatcctgaaatcgtactacagtctattggatatcttcttaagacagtccatttagacctaagcaagtattccatggagtttatgccagttgttctgcatcaagctcggcattcagatgaagagaggaggattaatgctttgagtattataggaacactaagtgagaagtcaagtgatccagatgctctaccttccatggtcaatgctatcaaagctgttttaggaggctcagaaggaaaactatcacttctataccagagaattggaatgataaatgctttagagcagctatcaagatctcctccaaagcaaataggcagacttgccccctcagtatcaactttccttctaacgtgttacaaggatgatggtatcgaggaagtgaaattggcgattctatcagcaatagggtcctgggctttggtatcagctgaagctgtccaaccagatgttgtttcatttattgctgcaggcttgaaagagaaagacactttaaggaaggggcatctgaaatttttacgagttatatgcaaaaactctgagtctttaacaaaggttgcttctttattggatcatttgattcagttgtcaaaaactggcttcagcaaggcaacacagcggttggatggaatctatgcactctttgcagtatcaaggcttgctgctgttgatacaaaagcagatggtgccattctgaaggagaaactgtggacattgattgctcaaaatgaaccctcattgatctctttacagttgcttcccaaactagcagatgatgattgcttagccgtcctggatcttgttcaatcactgtttgtagaacagttcttcagggttcgagaatatttttcaatccattcattgctgcagctgctaatatatctactttgccatccaagctgggaagttagaaaggtagcttacgatgttaccaagaaaattttctcaagctccagtggtctagccgaagatattctatttttattcacagactggttgtcactggttggagagagactgtcaatattgaaacaaggtgatatggatagcccttcggattctcagctaccattctttccatctaccgaggtccttgtcaagtgtttgtttttgattgcaccttatgctgttgtgcatagtctgagatcatattctcgaattattttgtgctcccaccacccttgccttaccagctcctcaagcccagctggcgtatataagaggttgcaaagaaggcttagacaagaacagatcttttttgttgacttaattactcccaacatctctgttatctgcaaggaattactttcacaggatggtctatttagttccaacaatcaagtacagagtgcagcattatgttcgctatcaacacttatgacaattactcccaacgacacatttctagagtttgagaagcacttcataggactccaggagcgcaccttgcacgattccttctctgagagtgatattaagatattctatactccagaggggcagttgtcaaccgagcaaggagtttacattgctgaggctgttgctaacaaaaatacaaaacttgcaaaggggcgtttccgtgcatatgatgatcagatgcagagacagctcggtctattgtccctgcaaagaatgagaagaaagaatcctcaggcattggcaagcgagaaactgggaaatctacaaaaaggactgctcctatagacaaggctaagactgctaaagaggaggccagagagttgctcttgaaggaggaagcatctgtgcgtatgaaggttgggcaagtgcagaaggatctctccttaatgttggatgctcttggcaagttggctattgctaatcctatatttactcatggtcaactgccgtcactggtaaactatgttgaacctttgctaagttctccaatagtaagcgatgctgcattttgtacaatgttgaggctagcacgttgcacagcccctcctctttgcaattgggcgctcgacattgctgctgcgattcgtgtgatatctgttggtgattttgaaatggttttggatcttacacctgtgatcatggaagatgatagtaagaagccatcatctggcatctttgaacaaatagtaaatgggctgactattgcgtgcaaagcgggtcctcttccagcagattcatttactttcgtctttccggttctttatcatgtgctaagcactgttcctgcctatcaaccttcagttgggcctatgctgaatgagctatgcctaggtctaagaggccatgagttagcacaggctcttgtcggtgtatatgcaaaagaactgcatgttaggcttgcctgcttaactgctataaaatgtgttcctgtgcactctgtgcaacgagatttgcaggtgtcaacaagcctctggattgctgctcatgatccggagaaggtggttgctgaattagcagaggaattatgggaccgctttggttttgatgccatcactgattactctggtattttcaatgcactttcccataaaaattacaatgttcgtgctgcatctgctgaggctctggctgcggcattggatgaaaatcaagacaaaatgcaagatgcactttctacccttttctctctgtacattcgtgatattggcactagtgttgaatttggagatgcacactggctcggaaggcagggtattgcattagcactccactctatcgctgacgttttggcctctaaagatcttcctgttgtcatgacatttctcatctcacgcgccctggctgatccaaacgtcgatgttcgtggtagaatgattaatgctggcatccttattattgacaggcatggaaaggaaaatgttcctttgctatttcctatttttgagagctacttgaataaaagggcatcagatgagaaaacatatgatcttgtgagggaaggtgttgttatttttactggtgctctggcgaaacatctatcaaaggatgatcccaaagttcacagtgtcattgaaaagttgttagatgtccttaacaccccatcagaggcagttcaacgtgctgtctcagattgtttgtccccacttatggtatccaaacaggaagagggtcaggctcttgtttctagactcttggatcggatgatgaaatgtgaaaagtatggtgagcgacgaggtgcagcctttggccttgctggtgtggttaaaggatttggaatttcttccttgaaaaaatatggcatcgctgtgacattgcagaaaaatttggaagacagaatgtctgcaaaatctcgtgaaggagctttacttggatttgagtgcctgtgtgagaagcttggcaaactatttgagccgtatgtcattcaaatgcttccgttcctacttgtgtgtttctctgatcaagtcctagcagtgcgcgaagctgctgagtgtgctgctcgggcaatgatgtctcagctcactggtcctggtgtgaagcttgttcttccgtcacttcttaaggt

SEQ ID NO: 42213 - DNA, 4143 bp, Zea Mays
gccgccgccacgcaattgccagtcctcgcgatatgggcgcgcaagaggaggcagtggacgagatgctgcgcgccgccgccgccgaggtttcaacctcctcggtgaagcgccgcctccgcatcttccaccacaccctacctcctctcatcgcgaaggccatagagtcaccgtcagatactgtattgttagtcgatctcattttccagacattgccaatatatgacgatcgagcatcacgaaaagcagtagacgatttggttattcaggctcttggtgaacccaccttcatgaagccctttgctgcggtacttgtacaatctatggaaaagaatctaaaggttacaaacccccttacaagcttaaagcttctcagatggtcacactatcttctgaaatggagtcagtttgccacacttacaaaaggcgcctttaccagactggccaatgcacaagcagtcttatgtcaagtccttatggatgggtccttccgtcggcgccggacttgcaaacagttattcattcatctcttctccgagcacagtggaatatataagatgtacatagaggagctcagagatttaaggatttccatgagagattctcctgcatttttgaatctaatactggattttaccattacctctccatcattatccactcagtaccagtcagtattccttgatttgtatgtcaaaatcatcttgagttcaaaagatcggccaccgaaagcagccactgaagcttttaagcctcttttcttgaacattgggcatgaggattttaagaatactattataccatcatgcataaagatgctgaaaagaaatcctgaaatcgtactacagtctattggatatcttcttaagacagtccatttagacctaagcaagtattccatggagtttatgccagttgttctgcatcaagctcggcattcagatgaagagaggaggattaatgctttgagtattataggaacactaagtgagaagtcaagtgatccagatgctctaccttccatggtcaatgctatcaaagctgttttaggaggctcagaaggaaaactatcacttctataccagagaattggaatgataaatgctttagagcagctatcaagatctcctccaaagcaaataggcagacttgccccctcagtatcaactttccttctaacgtgttacaaggatgatggtatcgaggaagtgaaattggcgattctatcagcaatagggtcctgggctttggtatcagctgaagctgtccaaccagatgttgtttcatttattgctgcaggcttgaaagagaaagacactttaaggaaggggcatctgaaatttttacgagttatatgcaaaaactctgagtctttaacaaaggttgcttctttattggatcatttgattcagttgtcaaaaactggcttcagcaaggcaacacagcggttggatggaatctatgcactctttgcagtatcaaggcttgctgctgttgatacaaaagcagatggtgccattctgaaggagaaactgtggacattgattgctcaaaatgaaccctcattgatctctttacagttgcttcccaaactagcagatgatgattgcttagccgtcctggatcttgttcaatcactgtttgtagaacagttcttcagggttcgagaatatttttcaatccattcattgctgcagctgctaatatatctactttgccatccaagctgggaagttagaaagactggttgtcactggttggagagagactgtcaatattgaaacaaggtgatatggatagcccttcggattctcagctaccattctttccatctaccgaggtccttgtcaagtgtttgtttttgattgcaccttatgctgttgtgcatagtctgagatcatattctcgaattattttgtgctcccaccacccttgccttaccagctcctcaagcccagctggcgtatataagaggttgcaaagaaggcttagacaagaacagatcttttttgttgacttaattactcccaacatctctgttatctgcaagcacttcataggactccaggagcgcaccttgcacgattccttctctgagagtgatattaagatattctatactccagaggggcagttgtcaaccgagcaaggagtttacattgctgaggctgttgctaacaaaaatacaaaacttgcaaaggggcgtttccgtgcatatgatgatcagatgcaggagacagctcggtctattgtccctgcaaagaatgagaagaaagaatcctcaggcattggcaagcgagaaactgggaaatctacaaaaaggactgctcctatagacaaggctaagactgctaaagaggaggccagagagttgctcttgaaggaggaagcatctgtgcgtatgaaggttgggcaagtgcagaaggatctctccttaatgttggatgctcttggcaagttggctattgctaatcctatatttactcatggtcaactgccgtcactggtaaactatgttgaacctttgctaagttctccaatagtaagcgatgctgcattttgtacaatgttgaggctagcacgttgcacagcccctcctctttgcaattgggcgctcgacattgctgctgcgattcgtgtgatatctgttggtgattttgaaatggttttggatcttacacctgtgatcatggaagatgatagtaagaagccatcatctggcatctttgaacaaatagtaaatgggctgactattgcgtgcaaagcgggtcctcttccagcagattcatttactttcgtctttccggttctttatcatgtgctaagcactgttcctgcctatcaaccttcagttgggcctatgctgaatgagctatgcctaggtctaagaggccatgagttagcacaggctcttgtcggtgtatatgcaaaagaactgcatgttaggcttgcctgcttaactgctataaaatgtgttcctgtgcactctgtgcaacgagatttgcaggtgtcaacaagcctctggattgctgctcatgatccggagaaggtggttgctgaattagcagaggaattatgggaccgctttggttttgatgccatcactgattactctggtattttcaatgcactttcccataaaaattacaatgttcgtgctgcatctgctgaggctctggctgcggcattggatgaaaatcaagacaaaatgcaagatgcactttctacccttttctctctgtacattcgtgatattggcactagtgttgaatttggagatgcacactggctcggaaggcagggtattgcattagcactccactctatcgctgacgttttggcctctaaagatcttcctgttgtcatgacatttctcatctcacgcgccctggctgatccaaacgtcgatgttcgtggtagaatgattaatgctggcatccttattattgacaggcatggaaaggaaaatgttcctttgctatttcctatttttgagagctacttgaataaaagggcaagtactactttcctattaataattgtactagcatcagatgagaaaacatatgatcttgtgagggaaggtgttgttatttttactggtgctctggcgaaacatctatcaaaggatgatcccaaagttcacagtgtcattgaaaagttgttagatgtccttaacaccccatcagaggcagttcaacgtgctgtctcagattgtttgtccccacttatggtatccaaacaggaagagggtcaggctcttgtttctagactcttggatcggatgatgaaatgtgaaaagtatggtgagcgacgaggtgcagcctttggccttgctggtgtggttaaaggatttggaatttcttccttgaaaaaatatggcatcgctgtgacattgcagaaaaatttggaagacagaatgtctgcaaaatctcgtgaaggagctttacttggatttgagtgcctgtgtgagaagcttggcaaactatttgagccgtatgtcattcaaatgcttccgttcctacttgtgtgtttctctgatcaagtcctagcagtgcgcgaagctgctgagtgtgctgctcgggcaatgatgtctcagctcactggtcctggtgtgaagcttgttcttccgtcacttcttaaggt

SEQ ID NO: 42214 - DNA, 2870 bp, Zea Mays
gtggaggcggccgtggaggtgctgcatcgtccaggaccagcttcccaaactagcagatgatgattgcttagccgtcctggatcttgttcaatcactgtttgtagaacagttcttcagggttcgagaatatttttcaatccattcattgctgcagctgctaatatatctactttgccatccaagctgggaagttagaaaggtagcttacgatgttaccaagaaaattttctcaagctccagtggtctagccgaagatattctatttttattcacagactggttgtcactggttggagagagactgtcaatattgaaacaaggtgatatggatagcccttcggattctcagctaccattctttccatctaccgaggtccttgtcaagtgtttgtttttgattgcaccttatgctgttgtgcatagtctgagatcatattctcgaattattttgtgctcccaccacccttgccttaccagctcctcaagcccagctggcgtatataagaggttgcaaagaaggcttagacaagaacagatcttttttgttgacttaattactcccaacatctctgttatctgcaaggaattactttcacaggatggtctatttagttccaacaatcaagtacagagtgcagcattatgttcgctatcaacacttatgacaattactcccaacgacacatttctagagtttgagaagcacttcataggactccaggagcgcaccttgcacgattccttctctgagagtgatattaagatattctatactccagaggggcagttgtcaaccgagcaaggagtttacattgctgaggctgttgctaacaaaaatacaaaacttgcaaaggggcgtttccgtgcatatgatgatcagatgcaggagacagctcggtctattgtccctgcaaagaatgagaagaaagaatcctcaggcattggcaagcgagaaactgggaaatctacaaaaaggactgctcctatagacaaggctaagactgctaaagaggaggccagagagttgctcttgaaggaggaagcatctgtgcgtatgaaggttgggcaagtgcagaaggatctctccttaatgttggatgctcttggcaagttggctattgctaatcctatatttactcatggtcaactgccgtcactggtaaactatgttgaacctttgctaagttctccaatagtaagcgatgctgcattttgtacaatgttgaggctagcacgttgcacagcccctcctctttgcaattgggcgctcgacattgctgctgcgattcgtgtgatatctgttggtgattttgaaatggttttggatcttacacctgtgatcatggaagatgatagtaagaagccatcatctggcatctttgaacaaatagtaaatgggctgactattgcgtgcaaagcgggtcctcttccagcagattcatttactttcgtctttccggttctttatcatgtgctaagcactgttcctgcctatcaaccttcagttgggcctatgctgaatgagctatgcctaggtctaagaggccatgagttagcacaggctcttgtcggtgtatatgcaaaagaactgcatgttaggcttgcctgcttaactgctataaaatgtgttcctgtgcactctgtgcaacgagatttgcaggtgtcaacaagcctctggattgctgctcatgatccggagaaggtggttgctgaattagcagaggaattatgggaccgctttggttttgatgccatcactgattactctggtattttcaatgcactttcccataaaaattacaatgttcgtgctgcatctgctgaggctctggctgcggcattggatgaaaatcaagacaaaatgcaagatgcactttctacccttttctctctgtacattcgtgatattggcactagtgttgaatttggagatgcacactggctcggaaggcagggtattgcattagcactccactctatcgctgacgttttggcctctaaagatcttcctgttgtcatgacatttctcatctcacgcgccctggctgatccaaacgtcgatgttcgtggtagaatgattaatgctggcatccttattattgacaggcatggaaaggaaaatgttcctttgctatttcctatttttgagagctacttgaataaaagggcaagtactactttcctattaataattgtactagcatcagatgagaaaacatatgatcttgtgagggaaggtgttgttatttttactggtgctctggcgaaacatctatcaaaggatgatcccaaagttcacagtgtcattgaaaagttgttagatgtccttaacaccccatcagaggcagttcaacgtgctgtctcagattgtttgtccccacttatggtatccaaacaggaagagggtcaggctcttgtttctagactcttggatcggatgatgaaatgtgaaaagtatggtgagcgacgaggtgcagcctttggccttgctggtgtggttaaaggatttggaatttcttccttgaaaaaatatggcatcgctgtgacattgcagaaaaatttggaagacagaatgtctgcaaaatctcgtgaaggagctttacttggatttgagtgcctgtgtgagaagcttggcaaactatttgagccgtaagtgaggcatctcttcacttaactgttgctctgattccaattgattcgttatattttctttcttgtaggtatgtcattcaaatgcttccgttcctacttgtgtgtttctctgatcaagtcctagcagtgcgcgaagctgctgagtgtgctgctcgggcaatgatgtctcagctcactggtcctggtgtgaagcttgttcttccgtcacttcttaaggt

SEQ ID NO: 42215 - DNA, 2734 bp, Zea Mays
attgtttcctgtaaaaattctgcttgtccaaaccttttgtgttttggtttatttattttggactgaacatttatttgtttaatatgaaatcattgaaatgatctacatactttagtactcttgcttttcagggagtttgcattggtttgagtgaggtcatgggcagtgcaggaaaacaccagctattaagttttatggatgaacttattcctaccattcgtactgctctatgtgacagcacccaagaggtccgtgaatctgctgggttagcgtttagtactctgtacaagagtgctggactgcaagccattgatgagattgtccccacattgctacgagctttggaagatgatgatacatctgcaacagctcttgacggtctaaagcagattttaagtgtcagaacagcagctgttttgccccatatattgcccaaattagtccagcctcccctctcttcattcaatgcacatgcattaggtgctctagcagaggttgctgggccaggtttgaattcacatatcggaactgttctcccagcattgattcttgctatggatgatgaagatgcggatgtacaaaactcagccaggaaagctgctgaaactgttctgttggttattgatgaggaaggagtggaaactttgatacctgagcttctaagagggatcaatgacagtcaggcatcaatgaggcggggttcagcctatctaattggtttcctctttaaaaacactaaattatatttggctgatgaggcttctgatatgatgtcaaccctaataattttgttgagtgatacagacaaggctactgtatcggctgctttagaagcattttcaagagttgttgcatctgttccaaaggaacagctcccgacgcatataaaactagtgcgcgatgctgtctctacagccagagataaagagcgtagaaggcgaaagggtgtgcctattcttgtgcctggcttatgtcttcctaaagcactgcagccttttcttcctatatatcagcagggtttaattagtgggtcggccgagacaaaagaacaggcagctgaaggtctaggagagttaattgacgtaacaagtgagaagactcttaaggaagttgtagtgccaattacaggacctcttattcgcatccttggtgatcggtttccatggcaagttaagtcagctatcctatcaaccctgacaatcatcatcatgaaaggtggaattgcacttaagcccttccttccacaacttcaaactacatttgtaaaatgtctacaggataataataggtctgtccgggcgagggctgcagctgctctgggaaagcttagtgctctcagcacacgggtggatcctttagttagcgatcttctgtccatgttgcagtcaggagatgaatctgtcaaagaaagtgtgctttctgcgcttaaaggtgttatcaaacatgctggtaaaagtgtcagctctgcaataaggtcacgtggatgtgctcttcttgaagatctgctgcaggctgaagctgatgatgtccgcagttgtgctgcaaaagtgattggcacattgtctcagtacatggaggagacagagatttcagatttggtgcaaatcctattgaacatgagcacttcatcagactggtgtaccagacatggtgctttgttatcgttctcatacatatcaatgcattctccatcaaaattgtgtcatttggcatcctttccatctctggtcgatcttttgaaaggttctctcaaagacgacaagttccctgttcgtgaagttgctacaagaactctgggaaagatactctgttttgagctacagccagaagctggcaccttgcaacttgttcagctgcttatcttggccttgcgtgatgattcaagtgaagttaggagaagatctttgtcgtgtatcaaagctgctgcaaagacaaatcattcagctcttgctacacatcactctatattgggcccggcaattgctgaagctttgaaggactctagcatgcctgtacgtctagctgcggaacgctgcgcccttcatgttttccagttaacgaaagggccagataatgttacagcagcacaaaagtacctcgggatgactggcttggaagtgaagaaaatcgcaaagcttgacgtggacagtgatggtagtgagagcagcgatgatgacaagaggacatagactctactcaacagcaatcttttttcggttcagttgttatgatctttacatatagttagctacattgatagcggaatgtggggtcattttttctgtctggcccattttgtgtacatcctttttgacaacaaacaggtaaaagtgacaacgtttgcaaatcgacaaacaatggacacaagttgtattgcaaccaaggactgattcgttagtttgagcacagcacaaccacccagttcaacgataacgcatgtcaatgcccttccctggacagctcgttgggcatcttgttgagcatgctctctgctctgtacctgaacgctggagtccacgaacagactgctctgagcggcgtcaatgtggataggaatgtaatcggacgtatattactggttccatgtttgttttcatattttctcattggatattaatgcaaatattatcgagttgggcatcggatattaatgcaaatattatcgagttgggatttgtgtcggataatatccgaatgaatatctagacttagataataagtttttaagtttttt

SEQ ID NO: 42216 - DNA, 1147 bp, Zea Mays
gtttcctgtaaaaattctgcttgtccaaaccttttgtgttttggtttatttattttggactgaacatttatttgtttaatatgaaatcattgaaatgatctacatactttagtactcttgcttttcagggagtttgcattggtttgagtgaggtcatgggcagtgcaggaaaacaccagctattaagttttatggatgaacttattcctaccattcgtactgctctatgtgacagcacccaagaggtccgtgaatctgctgggttagcgtttagtactctgtacaagagtgctggactgcaagccattgatgagattgtccccacattgctacgagctttggaagatgatgatacatctgcaacagctcttgacggtctaaagcagattttaagtgtcagaacagcagctgttttgccccatatattgcccaaattagtccagcctcccctctcttcattcaatgcacatgcattaggtgctctagcagaggttgctgggccaggtttgaattcacatatcggaactgttctcccagcattgattcttgctatggatgatgaagatgcggatgtacaaaactcagccaggaaagctgctgaaactgttctgttggttattgatgaggaaggagtggaaactttgatacctgagcttctaagagggatcaatgacagtcaggcatcaatgaggcggggttcagcctatctaattggtttcctctttaaaaacactaaattatatttggctgatgaggcttctgatatgatgtcaaccctaataattttgttgagtgatacagacaaggctactgtatcggctgctttagaagcattttcaagagttgttgcatctgttccaaaggaacagctcccgacgcatataaaactagtgcgcgatgctgtctctacagccagagataaagagcgtagaaggcgaaagggtgtgcctattcttgtgcctggcttatgtcttcctaaagcactgcagccttttcttcctatatatcagcagggtttaattagtgggtcggccgagacaaaagaacaggcagctgaaggtctaggagagttaattgacgtaacaagtgagaagactcttaaggaagttgtagtgccaattacaggatttttttgtgtgtattcatg

SEQ ID NO: 42217 - DNA, 2810 bp, Zea Mays
ttcctgtaaaaattctgcttgtccaaaccttttgtgttttggtttatttattttggactgaacatttatttgtttaatatgaaatcattgaaatgatctacatactttagtactcttgcttttcagggagtttgcattggtttgagtgaggtcatgggcagtgcaggaaaacaccagctattaagttttatggatgaacttattcctaccattcgtactgctctatgtgacagcacccaagaggtccgtgaatctgctgggttagcgtttagtactctgtacaagagtgctggactgcaagccattgatgagattgtccccacattgctacgagctttggaagatgatgatacatctgcaacagctcttgacggtctaaagcagattttaagtgtcagaacagcagctgttttgccccatatattgcccaaattagtccagcctcccctctcttcattcaatgcacatgcattaggtgctctagcagaggttgctgggccaggtttgaattcacatatcggaactgttctcccagcattgattcttgctatggatgatgaagatgcggatgtacaaaactcagccaggaaagctgctgaaactgttctgttggttattgatgaggaaggagtggaaactttgatacctgagcttctaagagggatcaatgacagtcaggcatcaatgaggcggggttcagcctatctaattggtttcctctttaaaaacactaaattatatttggctgatgaggcttctgatatgatgtcaaccctaataattttgttgagtgatacagacaaggctactgtatcggctgctttagaagcattttcaagagttgttgcatctgttccaaaggaacagctcccgacgcatataaaactagtgcgcgatgctgtctctacagccagagataaagagcgtagaaggcgaaagggtgtgcctattcttgtgcctggcttatgtcttcctaaagcactgcagccttttcttcctatatatcagcagggtttaattagtgggtcggccgagacaaaagaacaggcagctgaaggtctaggagagttaattgacgtaacaagtgagaagactcttaaggaagttgtagtgccaattacaggacctcttattcgcatccttggtgatcggtttccatggcaagttaagtcagctatcctatcaaccctgacaatcatcatcatgaaaggtggaattgcacttaagcccttccttccacaacttcaaactacatttgtaaaatgtctacaggataataataggtctgtccgggcgagggctgcagctgctctgggaaagcttagtgctctcagcacacgggtggatcctttagttagcgatcttctgtccatgttgcagtcaggagatgaatctgtcaaagaaagtgtgctttctgcgcttaaaggtgttatcaaacatgctggtaaaagtgtcagctctgcaataaggtcacgtggatgtgctcttcttgaagatctgctgcaggctgaagctgatgatgtccgcagttgtgctgcaaaagtgattggcacattgtctcagtacatggaggagacagagatttcagatttggtgcaaatcctattgaacatgagcacttcatcagactggtgtaccagacatggtgctttgttatcgttctcatacatatcaatgcattctccatcaaaattgtgtcatttggcatcctttccatctctggtcgatcttttgaaaggttctctcaaagacgacaagttccctgttcgtgaagttgctacaagaactctgggaaagatactctgttttgagctacagccagaagctggcaccttgcaacttgttcagctgcttatcttggccttgcgtgatgattcaagtgaagttaggagaagatctttgtcgtgtatcaaagctgctgcaaagacaaatcattcagctcttgctacacatcactctatattgggcccggcaattgctgaagctttgaaggactctagcatgcctgtacgtctagctgcggaacgctgcgcccttcatgttttccagttaacgaaagataatgttacagcagcacaaaagtacctcgggatgactggcttggaagtgaagaaaatcgcaaagcttgacgtggacagtgatggtagtgagagcagcgatgatgacaagaggacatagactctactcaacagcaatcttttttcggttcagttgttatgatctttacatatagttagctacattgatagcggaatgtggggtcattttttctgtctggcccattttgtgtacatcctttttgacaacaaacaggtaaaagtgacaacgtttgcaaatcgacaaacaatggacacaagttgtattgcaaccaaggactgattcgttagtttgagcacagcacaaccacccagttcaacgataacgcatgtcaatgtaagccacgcataccatatagtatcatatcgtcgagtattgttcgtaccacatcttcctcccagttgatctccttgggcaaggtaggcccttccctggacagctcgttgggcatcttgttgagcatgctctctgctctgtacctgaacgctggagtccacgaacagactgctctgagcggcgtcaatgtggataggaatgtaatcggacgtatattactggttccatgtttgttttcatattttctcattggatattaatgcaaatattatcgagttgggcatcggatattaatgcaaatattatcgagttgggatttgtgtcggataatatccgaatgaatatctagacttagataataagtttttaagtttttt

SEQ ID NO: 42218 - DNA, 1085 bp, Zea Mays
gagcccccggccccgaccccgccgccgcctttgtcacattccacacaccccacttgcacaagctagcgcggccgccgcctgtttaagctttacggagaatattagttaggtcggctgcctggatatggtccttgttgaagaacccaatgcccatttgaccgtgtccagaaggctcgattctttcggcagtgcacaacagcggcaagattctccctttgctgcccgcgtgcgtgcgtgtgtatataggtgtagacaggcagagagagagagagggagagagaggccctgcgctgcaaatcctcggtggttttgcagcttccagagcttgagattgagaccagcgcggcagttctttcttggtcgtcgatggcgctgaggaggatcatcaaggagctcaaggacctgcagagggatccacccacgtcctgcagcgcagggcctgtgtccgacgacatgttccactggcaagcgacgatcatggggcccagcgacagcccctactcggggggcgtgttcctggtcgccatccacttccctccggactacccgttcaagcctcccaaggtggcgttcaagacgaaggtgttccaccccaacatcaacagcaacggcagcatctgcctggacatcctcaaggagcagtggagccccgcgctgacggtctccaaggtgctgctctccgtctgctccctgctcaccgaccccaacccggacgacccgctcgtcccggagatcgcccacatgtgcaagaccgaccgcctcaggtacgagtccaccgccaggggatggacgcacaagtacgccatgggataacctgatgtgagccgtaacaacaacgacgctttggccgagtggttaaggcgtgtgcctgctaagtacatggggtttccccgcgagagttcgaatctctcaggcgtcgtctttttttttcctttttttttctattttgcctacccacatggacacatggttcccttcttcacaagctctggtactgtaacattcagaaatgcaaatggttatcatatcgtgagaattctccggtggtcttgctcgtacctcctgctggtcgtctgaagaagata

SEQ ID NO: 42219 - DNA, 868 bp, Zea Mays
cggatctgggcggcggcggctaggcgctttgtacgctccgcttggactatgcggcgggtgagctcttcttctccattcccatccctttctctgacgatgacattgagttggctgggcgctttggaatgtgcggctggtgagctctctctagcgtgcattaggtcttggcaggattctgtttttgacggctctctctccagcttgcatcagctctctgcagctcatttcagttttgacgactcctccagccaggagtagctgcctgggagcgagacggagcgctgccgggagtctccattgcttcaattggagtagctgcctgggaggagcacgagacgggggtacctgctactgcatagaactggtgaaacagaggtagtttgagctgcctggattttactgaactggagtagctgactggagtttactgaactggttgaaagttcccagtttgagctgccaaacagagactaggatcccagcgcagcagggcagcaacactatgatcccagcgcggcgggcaagcggtgatccgagcgacgcgggccgcgagctcccaacccaacgtgcaatgacaggaagcgaacgggaacgccgccggcaaggacgacgggagcacggtctacgtaccagaggcggcgcggtcaaagaggacaggagcgcagccgccaaagacgacgggaacgccagcggcaaagaggacgggaccgctgccgggtggagcttggggagcgatggatccgttctgagaaacggaaaccgagataaacaaccgtaacagcgcgggagcacgcatcaaaggagatcgggtaccaaagtaccgaggccgaacgtattataatattataaatccaatttcgttgttcgg

SEQ ID NO: 42220 - DNA, 1863 bp, Zea Mays
gtccatatgtgtgatatagttggtgaatgaacatgtcaaaggagagtaaattctttagcttcacctcatcagtctaccagtgtgtcaacgagtttgcatactggatttctgcgttctcgaagtacctcaggattgcctaggcaaccttcatatactactggatttgggactgctttaaatatagaggcacttgttgctgccgcggaacaaagagatacaccaattgaggacaagattctttttatgatcaacaatatatccatctcaaatatggaagctaaggcaaaggaatttaacgaggtcatacaggaacagtattatccttggtttgcacaatacatggtcatgaaaagggcaagcattgaaccaaatttccatgatctgtatctgaagttctttgataaagtaaactcaaaatccttgaacaaggaaatactgaaagccacatatgagaactgcaaggtcttgttaagatcaaaccttatcaaatctagttccgaggagcgctccttgctaaaaaacctaggcagttggttgggaaagttcaccattggtaggaatcaggcactaagggctaaggagattgatccaaaatctcttatcgtggaggtcttgttaagatcagaccttatcaaatctagttccgaggagcgctccttgctaaaaaacctaggcagttggttgggaaagttcaccattggtaggaatcaggcactaagggctaaggagattgatccaaaatctcttatcgtggaggcatatgagaaaggattgatgattgcggtcataccattcacttcaaagatccttgaaccttgccagtcaagtatcgcatatcgacctccaaatccctggaccatgggaattctaagtctacttgctgaaatttataatcttccaaacctcaagatgaatctgaaatttgatattgaggtcctcaacattcctttttttgatagtttctttattgactttgtatctgccctagctacccatggccatgctaaatgttcttttgggatttcaggtgctattaagaaccttactgttgacataaaggatgtgaaaccaacttccctgctcaaagatcgtctgcgcgaagtcgagggaaatccagatttttcaaataaagatgttactgcatctcaaacccctgtggttgcagaagtcccttcagggaccatcccttcactaactcatatggaacaacaacctgaggtcaatatcacatcccgagctatgagccttccaaatatacttaatcagtatgctgctcctgtccgtctacctacaaacagcacggtagaagatgacaaagttgctctgatgatgcctgagcaagtgccctcgttgacccaggtttcgccagcacaaacacaatcaacatcaccatctccattttctgttaaccagcttatggcagctattccacgagaagagatacgtttcaaaataaatccaaaggattatgcactggagtctgataacaatacgataactcgatccgcacatttgatggttggaacattagccggaagtctggcacatgttacttgcaaggaacctcttcgtgttgcactatattctaatcttcggaatctcattcagaaccttatgagcggcagtgaaactatcgagcaacttattcacacgctaatcaatgataacttggatcttggctgtgccatcattgaggctgtggcaacatgtcaggcaaggatcatcaagtttgacgtcggctacgtggtcatggtgactggcgggaggaacaccgggcgtgtaggagtcatcaagaacagggagaagcacaagggcagctttgagaccatccacgtgcttcttggagctttttgctatgtctag

SEQ ID NO: 42221 - DNA, 385 bp, Zea Mays
gtctgataacaatacgataactcgatccgcacatttgatggttggaacattagccggaagtctggcacatgttacttgcaaggaacctcttcgtgttgcactatattctaatcttcggaatctcattcagaaccttatgagcggcagtgaaactatcgagcaacttattcacacgctaatcaatgataacttggatcttggctgtgccatcattgaggctgtggcaacatgtcaggcaaggatcatcaagtttgacgtcggctacgtggtcatggtgactggcgggaggaacaccgggcgtgtaggagtcatcaagaacagggagaagcacaagggcagctttgagaccatccacgtgcttcttggagctttttgctatgtctag

SEQ ID NO: 42222 - DNA, 1282 bp, Zea Mays
ttttattacagtgtaaaggaacttgtgattggcattctcagcatcacagctttgtgaacatggatcgacttcgacaggtcaagaaaacaacgacctgcagacggagattgaacctaacactaccaagcaatacatgggtcatgggatgggacgaaagagaagagaagggtgaagggacatgcaggatgcgcatagcagagcagacacgcacgcacaaggacgtcgtctcatggccaggtggtgaactcgaagaccttgccgacgatctcgagcccggtggggatctgccagacgaagagcaggacgttgacggcgttgagcgcgatgtgcaggctgcgggccgtctcgtcccccttctgcatcgccgggacgagcgcggccgcggcggcccacagcacggtgatggcggcgcccgcgaagaggtgcgggcccgggaacagcttgccggtgcggaaccaggtgttgagcgcgccgccgacggactcgagcacgccgaggccgaggaggagggagcccgcgttgaagtggcggtcccggaacgaccccttgagcagcgccttccgctcgtcggtgagctcctcgatccgggcctccgccggcgacggcgacttgctggccgcagcgggcggcggggttgtggtggaggaggagtccgcgccggcgccgaccgccgcgggagtggccgcggcggcgggcttgagctgcttcttgagcgcgttgatctcgtcctggacggtgcgcacccggcgccactgccagccgaggtaccccgcccagagcgtgtacgcgaagagcccgcccatgatgagcgggtgcagcagcgcgaagctgcggccctcgaggatccccaactcgccgcccaccgccagcgccgcgtccgccggcagcagcagcagcgccgccaccgccgccgcggacaccggcgccaccgcctccatgggaggcctggagcaccggcaccgggtggtgcctggtggtagtagacgcggcctgctgctcttggacggaggggccggccggccggtggtaccggctgccgtgcaggtcactgggaggaggaggaggcgggcccggacggccgtgagcggcgcggccatggcgctgctgcttcttcccttggcgtgtggtcggtgaggcggtgacagacactgactgggtggtgggggatggggcgaggggcgggaggactgggagaggaggagataaggcgatcgaccgagtggacgagacgacaagtgtcctctgtgttgctctgaaggcacaggaagcagccagcgtgtgc

SEQ ID NO: 42223 - DNA, 1170 bp, Zea Mays
taagcacaaacatatgcagtagaacaaacatgacaagctcagtatcggagaattaaaaaaaaatcttttcaaactgcttatccacatctctaaccacatcaaatggtgcggctggggccttatcgcaaagcgtgatgagtctcttcacccaaaccataggtgccaaatcaggttttcccataatttgagcgggttgttcaaaatccactggtccaatgttacatatcactccaatcaagggagatacattataccataacccgatgattcaaatgcgccctaaacgaccaaacatatcacaataatcaacacaatataattgcaacttctgccaatcatgagaaagataattgatcaaggctggatgcaatcgaaggggaggaaagcacaaaaaaagagaaaacaaagcacgccaacatcgagaaagattccgccaagctcaagggagagggagtacatcttatgggcgtggagctcatgctgcttcgctcacatggcgccccctcgccataatccttgaagaaccccgcttgtagctagaacacatgcaccggccaaacacgttcgacaattaaacccctcgcaggtcacctcagcgcatgcgcatatcgaagagcacatcagaggcacaccacaaacctacctcgtagctgatgtagatgtccgcgacgcagacccagaactatgcgtagcggctccacgggcggaggtggtcggagatgtgctcctggactcggtgcccaccatgcagaggtctccggacgacggtggactagtggagtagtagccctccaggccaaaggtgatagatatgtgccgccccatgaggcgcgagcggaagtgttgcatgtggccgtcgcgatcgtgaaacgggtggcgcccgtcggagacggtgagagtggcgaaggcgtggaggagcgaggcactggtggtggggggggcaacgatggaggggagcagcgagaaggagcactgctgagaggaggagtcagggccgaagatgtgtggtcctcatcgacaaagtacctggtggatacctcgaggatggggacccgagcgccgaacctccgccgatgggcaggtcgagcgcgaaggggaggttggaaggcaccgaggacggggtgtggcactgaggctgattcacaggcaaaagcgggcgtcgagacgtag

SEQ ID NO: 42224 - DNA, 685 bp, Zea Mays
gcttcttcataaaatgaagatgctgcgtctagatcccagcaagaggatcaccgcccgcgccgccctcgagcacgactacttcagggacctcgagcacgcctagcaggatatggatggatggatgaaccgtttcccctcccctgctccctctgtaaattacggtagcagccgcgatgcttggggccggcgagtacccccgtctgggcggccgttgagttatgtgtgttactctatagtatgactaagctggagtgcctcatgtccaccatgcagtgcagcttttttctccgacttttttttgctgcgtagagaaatgagatgagaaatgtgatccagagatccttgtgccatgggagacctagtagtagactagtagctatgtaggtgtcggcactggcctctcttgaacctgtatgatggctggagagagaggagagacggcggcttctctggttgataagttggtcctggtatggtgtgcttgccgccgatgcacgtcatggtctttcttcctttctgatgaggacttggggtggacgccgagtgagttcgtgctcatgcacggtttgttggccatgcaagctgaagcagctgcagcagagattttggatgcctggttctattgccgaattttttactatttagttttttaaaaaagaaaatatgccaacaaaatatatgtggg

SEQ ID NO: 42225 - DNA, 1746 bp, Zea Mays
aggctaaccagtttaccaatctgacgccgtcacaggtcacaccgtctttactagagagagcgccaatcctccccatcccgaccgccgcccccacctcctccgcggccgcctcgcggcgattccgtccgcatctgaccccgatcccaggggcatcgtcctcacctcctccgccagctgccgctcttccgtcctcttccgcagcttctgcgtggggaagaggcggtggcggccgaaccagcgtagtcgtcgccgacgccgctgccagccgccatggaggcgtacaagctctgggtgcgcaggaacagggacctcgtccgatccctcgagtccctcgccaacgggctcacatggatactccccgagcgcttcgccaactctgagatcgcaccggaagcagtatatgcactactgggtattgtgagttctgtcaatcagcacataattgatgcgcccactgagaatcactcatttgcctccaaggaacaatctatcccatggggtcttgttgtctctgtactaaaggatgtggaggcggttgttgaggttgctgcccagcactttgttggcgatgatcgcaagtggagctttcttgctgttacagaagcagtgaaagcaggtgtcaggttagctgcttttcgggagagtggatacaagatgctcttacaaggaggggaggtggtaaatgaagaagaggtgaccgttcttgaaaatagttatggagtaaatggtaatggagtaccagccatctatccgatggatggacatgcagaaaatggtcacaaaactatggccaagggtctggatggtaaaaatggatttgtatctaagagtcttgagaaaagagcagtagctgctttgaacaaatttggtgagaacgcaaagatgatgtctgatcctatgtggattcggaggctccaacctactcctgagccaactgtgatggttgccgagaagccaactttggcaagtatttggtctgctaaaggcggtactgggcgcttgtttgttttaggggaggttgttcacatattcaggccacttgtatatgtacttctgatcagaaagtttggaataaaatcgtggaccccgtggctagtgtcgctagctgtggaactcacaagtctaggcgtccattcccatgcaaccgatatgaatcacagattaggaaaagtgcatcagctcagttctgctgagagggatgagttgaaaaggcgaaagatgatgtgggctctttatgtgatgagagatcctttctttgccagcgtcacctcctgaaggctgaacaggttctgaatccggtgccattgattggcttccttacagggaaacttgtagagctactggaggggattcagacgagatacacgtacacatcaggttcatagagatggccaatctgagcctgctgctcgcctctcgatttgccctggcggacatgtgctttgtgcgagttggttgatggttaatggttaatggctaggaactggtgcttaatcctgaaacccgtactgctgtttttcttgccaactgtggcatcgtcgtcttgtggctgcgaagctgcagccacctcgttcgtgtatggcggcagatgagacaattcataatctaagtatatagatataaatagtagtattaccggtttgtttgtatttacgatttatcgtgaactgatggaacataatgtgtatacagcgaaaatttatctgattccaaacatttgttgtttaacagcgaaaattggatgcc

SEQ ID NO: 42226 - DNA, 1631 bp, Zea Mays
aggctaaccagtttaccaatctgacgccgtcacaggtcacaccgtctttactagagagagcgccaatcctccccatcccgaccgccgcccccacctcctccgcggccgcctcgcggcgattccgtccgcatctgaccccgatcccaggggcatcgtcctcacctcctccgccagctgccgctcttccgtcctcttccgcagcttctgcgtggggaagaggcggtggcggccgaaccagcgtagtcgtcgccgacgccgctgccagccgccatggaggcgtacaagctctgggtgcgcaggaacagggacctcgtccgatccctcgagtccctcgccaacgggctcacatggatactccccgagcgcttcgccaactctgagatcgcaccggaagcaggatgtggaggcggttgttgaggttgctgcccagcactttgttggcgatgatcgcaagtggagctttcttgctgttacagaagcagtgaaagcaggtgtcaggttagctgcttttcgggagagtggatacaagatgctcttacaaggaggggaggtggtaaatgaagaagaggtgaccgttcttgaaaatagttatggagtaaatggtaatggagtaccagccatctatccgatggatggacatgcagaaaatggtcacaaaactatggccaagggtctggatggtaaaaatggatttgtatctaagagtcttgagaaaagagcagtagctgctttgaacaaatttggtgagaacgcaaagatgatgtctgatcctatgtggattcggaggctccaacctactcctgagccaactgtgatggttgccgagaagccaactttggcaagtatttggtctgctaaaggcggtactgggcgcttgtttgttttaggggaggttgttcacatattcaggccacttgtatatgtacttctgatcagaaagtttggaataaaatcgtggaccccgtggctagtgtcgctagctgtggaactcacaagtctaggcgtccattcccatgcaaccgatatgaatcacagattaggaaaagtgcatcagctcagttctgctgagagggatgagttgaaaaggcgaaagatgatgtgggctctttatgtgatgagagatcctttctttgccagttacagcaagcgtcacctcctgaaggctgaacaggttctgaatccggtgccattgattggcttccttacagggaaacttgtagagctactggaggggattcagacgagatacacgtacacatcaggttcatagagatggccaatctgagcctgctgctcgcctctcgatttgccctggcggacatgtgctttgtgcgagttggttgatggttaatggttaatggctaggaactggtgcttaatcctgaaacccgtactgctgtttttcttgccaactgtggcatcgtcgtcttgtggctgcgaagctgcagccacctcgttcgtgtatggcggcagatgagacaattcataatctaagtatatagatataaatagtagtattaccggtttgtttgtatttacgatttatcgtgaactgatggaacataatgtgtatacagcgaaaatttatctgattccaaacatttgttgtttaacagcgaaaattggatgcc

SEQ ID NO: 42227 - DNA, 1564 bp, Zea Mays
aggctaaccagtttaccaatctgacgccgtcacaggtcacaccgtctttactagagagagcgccaatcctccccatcccgaccgccgcccccacctcctccgcggccgcctcgcggcgattccgtccgcatctgaccccgatcccaggggcatcgtcctcacctcctccgccagctgccgctcttccgtcctcttccgcagcttctgcgtggggaagaggcggtggcggccgaaccagcgtagtcgtcgccgacgccgctgccagccgccatggaggcgtacaagctctgggtgcgcaggaacagggacctcgtccgatccctcgagtccctcgccaacgggctcacatggatactccccgagcgcttcgccaactctgagatcgcaccggaagcagtatatgcactactgggtattgtgagttctgtcaatcagcacataattgatgcgcccactgagaatcactcatttgcctccaaggaacaatctatcccatggggtcttgttgtctctgtactaaaggatgtggaggcggttgttgaggttgctgcccagcactttgttggcgatgatcgcaagtggagctttcttgctgttacagaagcagtgaaagcaggtgtcaggttagctgcttttcgggagagtggatacaagatgctcttacaaggaggggaggtggtaaatgaagaagaggtgaccgttcttgaaaatagttatggagtaaatggtaatggagtaccagccatctatccgatggatggacatgcagaaaatggtcacaaaactatggccaagggtctggatggtaaaaatggatttgtatctaagagtcttgagaaaagagcagtagctgctttgaacaaatttggtgagaacgcaaagatgatgtctgatcctatgtggattcggaggctccaacctactcctgagccaactgtgatggttgccgagaagccaactttggcaagtatttggtctgctaaaggcggtactgggcgcttgtttgttttaggggaggttgttcacatattcaggccacttgtatatgtacttctgatcagaaagtttggaataaaatcgtggaccccgtggctagtgtcgctagctgtggaactcacaagtctaggcgtccattcccatgcaaccgatatgaatcacagattaggaaaagtgcatcagctcagttctgctgagagggatgagttgaaaaggcgaaagatgatgtgggctctttatgtgatgagagatcctttctttgccagttacagcaagcgtcacctcctgaaggctgaacaggttctgaatccggtgccattgattggcttccttacagggaaacttgtagagctactggaggggattcagacgagatacacgtacacatcaggttcatagagatggccaatctgagcctgctgctcgcctctcgatttgccctggcggacatgtgctttgtgcgagttggttgatggttaatggttaatggctaggaactggtgcttaatcctgaaacccgtactgctgtttttcttgccaactgtggcatcgtcgtcttgtggcggta

SEQ ID NO: 42228 - DNA, 5554 bp, Zea Mays
cgaaacaggggcacgttgcagcccacggggctccgcaggctaccaaacggggcacccctctcccgtgccgtgcgacgttggagctgaacaacggagagaaaaagtgaggcggaagacgagggacatacttcaagcgcccgcggcccgcagcctgctcgcccaggtcttcgccggcgacgagcacccaccaggtccgctcagtccatctctccagaaatccccagatgttccacagcaagtcgctccctaggcccaaggacacatcggtggtggtggtcgtccttgagacgacagaagtgtacattgtgatcagcttgtcgacgaggagagacacccaggtcgtatacgtcgatccgaccaccggcgccctgcgctacctggggaagcatggggaggacgtctttgattcggaggcggcggcgctgaaccacatcaccaacggatcaagggttctatccaagagcactacatatgccaaggcagtgctgggatacgcggtgttaggaagccatgctctgctcttggtcgcgacacagttgagcgcgtcggtccccaatctgccgggaggcgggtgcatatacacattggcagagagccagtggataaagatccagctgcagaatcctcagccccaggggactggagaacagaagaacatacgtgagctggccaatctagacattgatggcaagttcttcttttgcgagacaagggatgttaccaggcccttcccgagtcctattacactacgggaaccagatgaggaatttgtttggaacgagtggctgtcaaagccctttaaggacattggtttgccaggacactgtgtcattcttctgcaggggttcgctgagtgccggaactttggaggtgctgggcagcaaggtgggttagtcgcccttattgcacgccgaagtcggttgcatcctggaactcgctatttggcccgtggactgaacgcatgttcaggcacaggcaatgaggtagagtgcgagcaactcgtttgggttccacggaagggcggacagcgcatcccttttagctcgtatatctggcgccgtggaactattccaatatggtggggcgcagaaataaaaaacgcggtgtcagtggaggctgaaatttacgttgccaacgatccttacaacggaagcttacagtactaccaacggttgggtaaaagatatgggaataaatcatctgaagcgaacgtgtccaggcaaaaaagttctggaagggttcccattatttgtgttaacttgctaagatacggcgaaggaaaaacagagtcagttcttgttgatcatttcaaagaatctatacggtacatgaactctactggaaagctgggaagcacgtggattcagttaataaattatgactggcatgccactgtgaagttaaaagggcagcagcagacagttgagggcctatggaggcatcttaaaccacctacaatggtcattggcttcagtgaagggaattactatgatgcaagacagcagcttaatgaatgtaaaggatcagttatctgcaatgacgatgtaaatggtgggttttgcatggaatctattcaaaatggggtgatacgattcaactgtgcagactctcttgatcgaaccaatgctgctagttactttggtgcacttcaagtttttgttgaacagtgtagtcgattgagcatctcgcttgacatagatgcaatgtttgggttgtcaagtagatattctgaatatgatggtagaaacactcgttctttgccccctggatgggaggagcgctttgactctgtaacagggaaatcattttatattgatcataatacacgtactaccacatgggaacatccatgccaggaggctccacagaagccctggaagagatttgatatgacatttgatcagttcaaaggctcaacaatgcttgctccagtgaaccagcttgctgaactttttcttttggcaggcgatatccatgctacgttgtacactggctcaaaagctatgcacagtgatattctgaacatattcaaggaggaaacaggaaagtttagtaaattctcagctgttgagaatgtgaaaattacggtgctaagaaggtaccaaaattttatgaatgatagttcccgtcaaaagcagttagagatgtttcttggtttgaggctatataggcatctcccgtccatccctatgttccctctcaaagtaggtgctatcaaggccatctggatgcatgttaaaaccagttcctagtatcatcccaatggctgatggtggttccagtcttctgagcttcaaaaggaaggatcttatttgggtgtgtcagcaaggtgcagactatgttgaactttttatataccttggggaaccttgtcacgtttgtcaactgcttcttactgtctcccacggtgctgaagattcttcatatccagcaaccgtagatgttagagttggctcaagcatcgactccctcaaactcgtggttgagggtgcttgcattccacaatgctctaatgggacaaatttactgattccagtcactgggagaactgatccagaggacttggctgttacagggaaaagtgcgaggcccaatgttcaagagagctcctatcttcctttgttatatgactttgaagagctagaaggagaattaaactttttgaatcgggttgttgcattatcttttcatccatctgctgtatcaagaacacccattactcttggcgagattgaagtacttggagtttcccttccatgggcagacatgttaaccaatagtgaacgtgctcctgaatttatggagtttatcaataaaaaatcatcaagtgctcactgtaatctaggttccaagtcttttggaaattcttccatgcctgggaatgattctcatggtattgatgagtcttatactaaaagttcatcattagttcaaccgtgtggttcggaaaatttgttggattttctcacaggtgattttgacatgtcggagtcccatataactcaaaatacttttggtgctggagaacaaacaaacttcttagatgatggatttgatgttaatcctttcgcccctgcattggaagtgcctgttcctgttgctaaagtaaacaaggaggttgaagaatgtggcagcacccagctttatattaaattttttgaatccctttctggctataataagggaaagggtcttgactttgagcaaacgatgaagcttgaaataaaacgtctccgtcttggtctttcagccgctgaaagggaccaggcgttgttatcaattggtgtaattcctgccacattagatccaaaccgtttaattgattattcttacctattgaagttatccagcttagctgataatctagcactgctgggccatacagtccttgaggatcgcgctaatgcttcaatagggcttgaaaagggcagtgaacatgctatagacttttggaacatcagtgaaaatgatgaattctgctatggtggggcatgtgaagtccgtgctctgtcttcattacaagctttagcatctagagaaaatcaatcggtattcatggaatgtttccagtgtgaaaagacagtttgcaaagcttgctgtgctgggaaaggggccttccttttgcttaacacctacagggagttgaagatatatggtgggagtcaaagtggtggctactcagcactcacagatagttttgtgtgcaaatcgtgctgcagtgaaattatcaaacgtgcattgtatgtggattatgtccgggttcttcatagtttgcgcagaaaagatcgttcagagaaagcagcactgagtgctgtgaatcaggtctgccaactggagtacaagaaagcatctgatttatctcaaagtattcaatttggtcagagacaattgaagcagatccttgatggtgaagaatcccttgcagaatttccatatgcaaactttttacaaatggttgaaactgccaatgactctgaaccactgctttcattactggcgccttttggtactggagagtatacgtcttactggaaagctccacaaggtatcacttcagtggaattctcaattgttcttggtggtttatcagatattgcaggagtttccataattgtcagttcttgcggttactcagcatctgactgcccaattgtagagatatgggcgagtaataaaatacaccgagaagatcgtacatttataggaaagtgggatgtacaggatataatatcttcatctccacagcttcgtggacctgaaaaatctagtagattgagtgaagaaccaagacacattaaatttcacttcccaaatcctatccgttgtcgtataatttcaataaaaatgacactttcccatagaggttctcattcaaccaagtttagtgaggagtttgatcttctatcattgaatgatagctcatcttatgaatcgaagccaaccaatttacataattcatttatccatgcaaaaagaattgtagtttttggcagtttgttgagaaaggagatggagcctgacacatcaggggggataatgagaatgaaaagttatttagacagatcaccggccttggggagatttaggatcccagttgaagctgagaggctgagagataatgatcttgttcttgagcaatatctcttagctaattcacctggaatagctggattccggcttgattctttcagtgttataagacctcgtgtgacccattcaccttcttcatcagagttggacatgagggagttttcattgacacgaatggaagatagatttataaacccagcaattctgtatatacaggtcacagttgttaaggagtccggcaagttggttgtagaggaataccgtttaccagaagtaaaagcaaacacgccactatattttgatttcccagatctacaacaggatgcgcgctgtgttatctttagattgcttggtgacgtcactgcctttgtcgacgacatttctgagcttgagaacttaaacttgcggaatcttcctttggcgtcgggactgtctttgtcaaataagatcaagttgtactactatgctgatacatatgagatgggaaagatcggcagtctctcagctgtataatgtatgtgaggtcgtcgtacatgccaacctgggatggtaacccgtccctagaagattgttgtaacctactgtttctacgtgttgttgtggaagtaagagctgctgctacagatacatgatgctttttttttactgcttctgtattcttgcttctttttgcttttgattagatgaccccagtttgagggatgtagggattttgcctgtagaatttctggaaattcatctctttttttaatgtagaatagccggaaattcaattcgatcgcagtccacgaaactgccagctacgtttgtcgatacctgtattgggacctggattattgtatagagccaagaacttgcattgatattttttgtttgtttgtttgtttcataccatattttaagcgctggctgcaccagatgttcgttcgtatggtatggtacgtggccatgctgcggctgtaag

SEQ ID NO: 42229 - DNA, 5495 bp, Zea Mays
aggggcacgttgcagcccacggggctccgcaggctaccaaacggggcacccctctcccgtgccgtgcgacgttggagctgaacaacggagagaaaaagtgaggcggaagacgagggacatacttcaagcgcccgcggcccgcagcctgctcgcccaggtcttcgccggcgacgagcacccaccaggtccgctcagtccatctctccagaaatccccagatgttccacagcaagtcgctccctaggcccaaggacacatcggtggtggtggtcgtccttgagacgacagaagtgtacattgtgatcagcttgtcgacgaggagagacacccaggtcgtatacgtcgatccgaccaccggcgccctgcgctacctggggaagcatggggaggacgtctttgattcggaggcggcggcgctgaaccacatcaccaacggatcaagggttctatccaagagcactacatatgccaaggcagtgctgggatacgcggtgttaggaagccatgctctgctcttggtcgcgacacagttgagcgcgtcggtccccaatctgccgggaggcgggtgcatatacacattggcagagagccagtggataaagatccagctgcagaatcctcagccccaggggactggagaacagaagaacatacgtgagctggccaatctagacattgatggcaagttcttcttttgcgagacaagggatgttaccaggcccttcccgagtcctattacactacgggaaccagatgaggaatttgtttggaacgagtggctgtcaaagccctttaaggacattggtttgccaggacactgtgtcattcttctgcaggggttcgctgagtgccggaactttggaggtgctgggcagcaaggtgggttagtcgcccttattgcacgccgaagtcggttgcatcctggaactcgctatttggcccgtggactgaacgcatgttcaggcacaggcaatgaggtagagtgcgagcaactcgtttgggttccacggaagggcggacagcgcatcccttttagctcgtatatctggcgccgtggaactattccaatatggtggggcgcagaaataaaaaacgcggtgtcagtggaggctgaaatttacgttgccaacgatccttacaacggaagcttacagtactaccaacggttgggtaaaagatatgggaataaatcatctgaagcgaacgtgtccaggcaaaaaagttctggaagggttcccattatttgtgttaacttgctaagatacggcgaaggaaaaacagagtcagttcttgttgatcatttcaaagaatctatacggtacatgaactctactggaaagctgggaagcacgtggattcagttaataaattatgactggcatgccactgtgaagttaaaagggcagcagcagacagttgagggcctatggaggcatcttaaaccacctacaatggtcattggcttcagtgaagggaattactatgatgcaagacagcagcttaatgaatgtaaaggatcagttatctgcaatgacgatgtaaatggtgggttttgcatggaatctattcaaaatggggtgatacgattcaactgtgcagactctcttgatcgaaccaatgctgctagttactttggtgcacttcaagtttttgttgaacagtgtagtcgattgagcatctcgcttgacatagatgcaatgtttgggttgtcaagtagatattctgaatatgatggtagaaacactcgttctttgccccctggatgggaggagcgctttgactctgtaacagggaaatcattttatattgatcataatacacgtactaccacatgggaacatccatgccaggaggctccacagaagccctggaagagatttgatatgacatttgatcagttcaaaggctcaacaatgcttgctccagtgaaccagcttgctgaactttttcttttggcaggcgatatccatgctacgttgtacactggctcaaaagctatgcacagtgatattctgaacatattcaaggaggaaacaggaaagtttagtaaattctcagctgttgagaatgtgaaaattacggtgctaagaaggtaccaaaattttatgaatgatagttcccgtcaaaagcagttagagatgtttcttggtttgaggctatataggcatctcccgtccatccctatgttccctctcaaagtgctatcaaggccatctggatgcatgttaaaaccagttcctagtatcatcccaatggctgatggtggttccagtcttctgagcttcaaaaggaaggatcttatttgggtgtgtcagcaaggtgcagactatgttgaactttttatataccttggggaaccttgtcacgtttgtcaactgcttcttactgtctcccacggtgctgaagattcttcatatccagcaaccgtagatgttagagttggctcaagcatcgactccctcaaactcgtggttgagtcactgggagaactgatccagaggacttggctgttacagggaaaagtgcgaggcccaatgttcaagagagctcctatcttcctttgttatatgactttgaagagctagaaggagaattaaactttttgaatcgggttgttgcattatcttttcatccatctgctgtatcaagaacacccattactcttggcgagattgaagtacttggagtttcccttccatgggcagacatgttaaccaatagtgaacgtgctcctgaatttatggagtttatcaataaaaaatcatcaagtgctcactgtaatctaggttccaagtcttttggaaattcttccatgcctgggaatgattctcatggtattgatgagtcttatactaaaagttcatcattagttcaaccgtgtggttcggaaaatttgttggattttctcacaggtgattttgacatgtcggagtcccatataactcaaaatacttttggtgctggagaacaaacaaacttcttagatgatggatttgatgttaatcctttcgcccctgcattggaagtgcctgttcctgttgctaaagtaaacaaggaggttgaagaatgtggcagcacccagctttatattaaattttttgaatccctttctggctataataagggaaagggtcttgactttgagcaaacgatgaagcttgaaataaaacgtctccgtcttggtctttcagccgctgaaagggaccaggcgttgttatcaattggtgtaattcctgccacattagatccaaaccgtttaattgattattcttacctattgaagttatccagcttagctgataatctagcactgctgggccatacagtccttgaggatcgcgctaatgcttcaatagggcttgaaaagggcagtgaacatgctatagacttttggaacatcagtgaaaatgatgaattctgctatggtggggcatgtgaagtccgtgctctgtcttcattacaagctttagcatctagagaaaatcaatcggtattcatggaatgtttccagtgtgaaaagacagtttgcaaagcttgctgtgctgggaaaggggccttccttttgcttaacacctacagggagttgaagatatatggtgggagtcaaagtggtggctactcagcactcacagatagttttgtgtgcaaatcgtgctgcagtgaaattatcaaacgtgcattgtatgtggattatgtccgggttcttcatagtttgcgcagaaaagatcgttcagagaaagcagcactgagtgctgtgaatcaggtctgccaactggagtacaagaaagcatctgatttatctcaaagtattcaatttggtcagagacaattgaagcagatccttgatggtgaagaatcccttgcagaatttccatatgcaaactttttacaaatggttgaaactgccaatgactctgaaccactgctttcattactggcgccttttggtactggagagtatacgtcttactggaaagctccacaaggtatcacttcagtggaattctcaattgttcttggtggtttatcagatattgcaggagtttccataattgtcagttcttgcggttactcagcatctgactgcccaattgtagagatatgggcgagtaataaaatacaccgagaagatcgtacatttataggaaagtgggatgtacaggatataatatcttcatctccacagcttcgtggacctgaaaaatctagtagattgagtgaagaaccaagacacattaaatttcacttcccaaatcctatccgttgtcgtataatttcaataaaaatgacactttcccatagaggttctcattcaaccaagtttagtgaggagtttgatcttctatcattgaatgatagctcatcttatgaatcgaagccaaccaatttacataattcatttatccatgcaaaaagaattgtagtttttggcagtttgttgagaaaggagatggagcctgacacatcaggggggataatgagaatgaaaagttatttagacagatcaccggccttggggagatttaggatcccagttgaagctgagaggctgagagataatgatcttgttcttgagcaatatctcttagctaattcacctggaatagctggattccggcttgattctttcagtgttataagacctcgtgtgacccattcaccttcttcatcagagttggacatgagggagttttcattgacacgaatggaagatagatttataaacccagcaattctgtatatacaggtcacagttgttaaggagtccggcaagttggttgtagaggaataccgtttaccagaagtaaaagcaaacacgccactatattttgatttcccagatctacaacaggatgcgcgctgtgttatctttagattgcttggtgacgtcactgcctttgtcgacgacatttctgagcttgagaacttaaacttgcggaatcttcctttggcgtcgggactgtctttgtcaaataagatcaagttgtactactatgctgatacatatgagatgggaaagatcggcagtctctcagctgtataatgtatgtgaggtcgtcgtacatgccaacctgggatggtaacccgtccctagaagattgttgtaacctactgtttctacgtgttgttgtggaagtaagagctgctgctacagatacatgatgctttttttttactgcttctgtattcttgcttctttttgcttttgattagatgaccccagtttgagggatgtagggattttgcctgtagaatttctggaaattcatctctttttttaatgtagaatagccggaaattcaattcgatcgcagtccacgaaactgccagctacgtttgtcgatacctgtattgggacctggattattgtatagagccaagaacttgcattgatattttttgtttgtttgtttgtttcataccatattttaagcgctggctgcaccagatgttcgttcgtatggtatggtacgtggccatgctgcggctgtaag

SEQ ID NO: 42230 - DNA, 5104 bp, Zea Mays
ggcacccctctcccgtgccgtgcgacgttggagctgaacaacggagagaaaaagtgaggcggaagacgagggacatacttcaagcgcccgcggcccgcagcctgctcgcccaggtcttcgccggcgacgagcacccaccaggtccgctcagtccatctctccagaaatccccagatgttccacagcaagtcgctccctaggcccaaggacacatcggtggtggtggtcgtccttgagacgacagaagtgtacattgtgatcagcttgtcgacgaggagagacacccaggtcgtatacgtcgatccgaccaccggcgccctgcgctacctggggaagcatggggaggacgtctttgattcggaggcggcggcgctgaaccacatcaccaacggatcaagggttctatccaagagcactacatatgccaaggcagtgctgggatacgcggtgttaggaagccatgctctgctcttggtcgcgacacagttgagcgcgtcggtccccaatctgccgggaggcgggtgcatatacacattggcagagagccagtggataaagatccagctgcagaatcctcagccccaggggactggagaacagaagaacatacgtgagctggccaatctagacattgatggcaagttcttcttttgcgagacaagggatgttaccaggcccttcccgagtcctattacactacgggaaccagatgaggaatttgtttggaacgagtggctgtcaaagccctttaaggacattggtttgccaggacactgtgtcattcttctgcaggggttcgctgagtgccggaactttggaggtgctgggcagcaaggtgggttagtcgcccttattgcacgccgaagtcggttgcatcctggaactcgctatttggcccgtggactgaacgcatgttcaggcacaggcaatgaggtagagtgcgagcaactcgtttgggttccacggaagggcggacagcgcatcccttttagctcgtatatctggcgccgtggaactattccaatatggtggggcgcagaaataaaaaacgcggtgtcagtggaggctgaaatttacgttgccaacgatccttacaacggaagcttacagtactaccaacggttgggtaaaagatatgggaataaatcatctgaagcgaacgtgtccaggcaaaaaagttctggaagggttcccattatttgtgttaacttgctaagatacggcgaaggaaaaacagagtcagttcttgttgatcatttcaaagaatctatacggtacatgaactctactggaaagctgggaagcacgtggattcagttaataaattatgactggcatgccactgtgaagttaaaagggcagcagcagacagttgagggcctatggaggcatcttaaaccacctacaatggtcattggcttcagtgaagggaattactatgatgcaagacagcagcttaatgaatgtaaaggatcagttatctgcaatgacgatgtaaatggtgggttttgcatggaatctattcaaaatggggtgatacgattcaactgtgcagactctcttgatcgaaccaatgctgctagttactttggtgcacttcaagtttttgttgaacagtgtagtcgattgagcatctcgcttgacatagatgcaatgtttgggttgtcaagtagatattctgaatatgatggtagaaacactcgttctttgccccctggatgggaggagcgctttgactctgtaacagggaaatcattttatattgatcataatacacgtactaccacatgggaacatccatgccaggaggctccacagaagccctggaagagatttgatatgacatttgatcagttcaaaggctcaacaatgcttgctccagtgaaccagcttgctgaactttttcttttggcaggcgatatccatgctacgttgtacactggctcaaaagctatgcacagtgatattctgaacatattcaaggaggaaacaggaaagtttagtaaattctcagctgttgagaatgtgaaaattacggtgctaagaaggtaccaaaattttatgaatgatagttcccgtcaaaagcagttagagatgtttcttggtttgaggctatataggcatctcccgtccatccctatgttccctctcaaagtgctatcaaggccatctggatgcatgttaaaaccagttcctagtatcatcccaatggctgatggtggttccagtcttctgagcttcaaaaggaaggatcttatttgggtgtgtcagcaaggtgcagactatgttgaactttttatataccttggggaaccttgtcacgtttgtcaactgcttcttactgtctcccacggtgctgaagattcttcatatccagcaaccgtagatgttagagttggctcaagcatcgactccctcaaactcgtggttgagggtgcttgcattccacaatgctctaatgggacaaatttactgattccagtcactgggagaactgatccagaggacttggctgttacagggaaaagtgcgaggcccaatgttcaagagagctcctatcttcctttgttatatgactttgaagagctagaaggagaattaaactttttgaatcgggttgttgcattatcttttcatccatctgctgtatcaagaacacccattactcttggcgagattgaagtacttggagtttcccttccatgggcagacatgttaaccaatagtgaacgtgctcctgaatttatggagtttatcaataaaaaatcatcaagtgctcactgtaatctaggttccaagtcttttggaaattcttccatgcctgggaatgattctcatggtattgatgagtcttatactaaaagttcatcattagttcaaccgtgtggttcggaaaatttgttggattttctcacaggtgattttgacatgtcggagtcccatataactcaaaatacttttggtgctggagaacaaacaaacttcttagatgatggatttgatgttaatcctttcgcccctgcattggaagtgcctgttcctgttgctaaagtaaacaaggaggttgaagaatgtggcagcacccagctttatattaaattttttgaatccctttctggctataataagggaaagggtcttgactttgagcaaacgatgaagcttgaaataaaacgtctccgtcttggtctttcagccgctgaaagggaccaggcgttgttatcaattggtgtaattcctgccacattagatccaaaccgtttaattgattattcttacctattgaagttatccagcttagctgataatctagcactgctgggccatacagtccttgaggatcgcgctaatgcttcaatagggcttgaaaagggcagtgaacatgctatagacttttggaacatcagtgaaaatgatgaattctgctatggtggggcatgtgaagtccgtgctctgtcttcattacaagctttagcatctagagaaaatcaatcggtattcatggaatgtttccagtgtgaaaagacagtttgcaaagcttgctgtgctgggaaaggggccttccttttgcttaacacctacagggagttgaagatatatggtgggagtcaaagtggtggctactcagcactcacagatagttttgtgtgcaaatcgtgctgcagtgaaattatcaaacgtgcattgtatgtggattatgtccgggttcttcatagtttgcgcagaaaagatcgttcagagaaagcagcactgagtgctgtgaatcaggtctgccaactggagtacaagaaagcatctgatttatctcaaagtattcaatttggtcagagacaattgaagcagatccttgatggtgaagaatcccttgcagaatttccatatgcaaactttttacaaatggttgaaactgccaatgactctgaaccactgctttcattactggcgccttttggtactggagagtatacgtcttactggaaagctccacaaggtatcacttcagtggaattctcaattgttcttggtggtttatcagatattgcaggagtttccataattgtcagttcttgcggttactcagcatctgactgcccaattgtagagatatgggcgagtaataaaatacaccgagaagatcgtacatttataggaaagtgggatgtacaggatataatatcttcatctccacagcttcgtggacctgaaaaatctagtagattgagtgaagaaccaagacacattaaatttcacttcccaaatcctatccgttgtcgtataatttcaataaaaatgacactttcccatagaggttctcattcaaccaagtttagtgaggagtttgatcttctatcattgaatgatagctcatcttatgaatcgaagccaaccaatttacataattcatttatccatgcaaaaagaattgtagtttttggcagtttgttgagaaaggagatggagcctgacacatcaggggggataatgagaatgaaaagttatttagacagatcaccggccttggggagatttaggatcccagttgaagctgagaggctgagagataatgatcttgttcttgagcaatatctcttagctaattcacctggaatagctggattccggcttgattctttcagtgttataagacctcgtgtgacccattcaccttcttcatcagagttggacatgagggagttttcattgacacgaatggaagatagatttataaacccagcaattctgtatatacaggtcacagttgttaaggagtccggcaagttggttgtagaggaataccgtttaccagaagtaaaagcaaacacgccactatattttgatttcccagatctacaacaggatgcgcgctgtgttatctttagattgcttggtgacgtcactgcctttgtcgacgacatttctgagcttgagaacttaaacttgcggaatcttcctttggcgtcgggactgtctttgtcaaataagatcaagttgtactactatgctgatacatatgagatgggaaagatcggcagtctctcagctgtataatgtatgtgagttatgtggatggatccttaacatactggagtcaaccacatagcca

SEQ ID NO: 42231 - DNA, 4988 bp, Zea Mays
cacccctctcccgtgccgtgcgacgttggagctgaacaacggagagaaaaagtgaggcggaagacgagggacatacttcaagcgcccgcggcccgcagcctgctcgcccaggtcttcgccggcgacgagcacccaccaggtccgctcagtccatctctccagaaatccccagatgttccacagcaagtcgctccctaggcccaaggacacatcggtggtggtggtcgtccttgagacgacagaagtgtacattgtgatcagcttgtcgacgaggagagacacccaggtcgtatacgtcgatccgaccaccggcgccctgcgctacctggggaagcatggggaggacgtctttgattcggaggcggcggcgctgaaccacatcaccaacggatcaagggttctatccaagagcactacatatgccaaggcagtgctgggatacgcggtgttaggaagccatgctctgctcttggtcgcgacacagttgagcgcgtcggtccccaatctgccgggaggcgggtgcatatacacattggcagagagccagtggataaagatccagctgcagaatcctcagccccaggggactggagaacagaagaacatacgtgagctggccaatctagacattgatggcaagttcttcttttgcgagacaagggatgttaccaggcccttcccgagtcctattacactacgggaaccagatgaggaatttgtttggaacgagtggctgtcaaagccctttaaggacattggtttgccaggacactgtgtcattcttctgcaggggttcgctgagtgccggaactttggaggtgctgggcagcaaggtgggttagtcgcccttattgcacgccgaagtcggttgcatcctggaactcgctatttggcccgtggactgaacgcatgttcaggcacaggcaatgaggtagagtgcgagcaactcgtttgggttccacggaagggcggacagcgcatcccttttagctcgtatatctggcgccgtggaactattccaatatggtggggcgcagaaataaaaaacgcggtgtcagtggaggctgaaatttacgttgccaacgatccttacaacggaagcttacagtactaccaacggttgggtaaaagatatgggaataaatcatctgaagcgaacgtgtccaggcaaaaaagttctggaagggttcccattatttgtgttaacttgctaagatacggcgaaggaaaaacagagtcagttcttgttgatcatttcaaagaatctatacggtacatgaactctactggaaagctgggaagcacgtggattcagttaataaattatgactggcatgccactgtgaagttaaaagggcagcagcagacagttgagggcctatggaggcatcttaaaccacctacaatggtcattggcttcagtgaagggaattactatgatgcaagacagcagcttaatgaatgtaaaggatcagttatctgcaatgacgatgtaaatggtgggttttgcatggaatctattcaaaatggggtgatacgattcaactgtgcagactctcttgatcgaaccaatgctgctagttactttggtgcacttcaagtttttgttgaacagtgtagtcgattgagcatctcgcttgacatagatgcaatgtttgggttgtcaagtagatattctgaatatgatggtagaaacactcgttctttgccccctggatgggaggagcgctttgactctgtaacagggaaatcattttatattgatcataatacacgtactaccacatgggaacatccatgccaggaggctccacagaagccctggaagagatttgatatgacatttgatcagttcaaaggctcaacaatgcttgctccagtgaaccagcttgctgaactttttcttttggcaggcgatatccatgctacgttgtacactggctcaaaagctatgcacagtgatattctgaacatattcaaggaggaaacaggaaagtttagtaaattctcagctgttgagaatgtgaaaattacggtgctaagaaggtaccaaaattttatgaatgatagttcccgtcaaaagcagttagagatgtttcttggtttgaggctatataggcatctcccgtccatccctatgttccctctcaaagtgctatcaaggccatctggatgcatgttaaaaccagttcctagtatcatcccaatggctgatggtggttccagtcttctgagcttcaaaaggaaggatcttatttgggtgtgtcagcaaggtgcagactatgttgaactttttatataccttggggaaccttgtcacgtttgtcaactgcttcttactgtctcccacggtgctgaagattcttcatatccagcaaccgtagatgttagagttggctcaagcatcgactccctcaaactcgtggttgagggaaaagtgcgaggcccaatgttcaagagagctcctatcttcctttgttatatgactttgaagagctagaaggagaattaaactttttgaatcgggttgttgcattatcttttcatccatctgctgtatcaagaacacccattactcttggcgagattgaagtacttggagtttcccttccatgggcagacatgttaaccaatagtgaacgtgctcctgaatttatggagtttatcaataaaaaatcatcaagtgctcactgtaatctaggttccaagtcttttggaaattcttccatgcctgggaatgattctcatggtattgatgagtcttatactaaaagttcatcattagttcaaccgtgtggttcggaaaatttgttggattttctcacaggtgattttgacatgtcggagtcccatataactcaaaatacttttggtgctggagaacaaacaaacttcttagatgatggatttgatgttaatcctttcgcccctgcattggaagtgcctgttcctgttgctaaagtaaacaaggaggttgaagaatgtggcagcacccagctttatattaaattttttgaatccctttctggctataataagggaaagggtcttgactttgagcaaacgatgaagcttgaaataaaacgtctccgtcttggtctttcagccgctgaaagggaccaggcgttgttatcaattggtgtaattcctgccacattagatccaaaccgtttaattgattattcttacctattgaagttatccagcttagctgataatctagcactgctgggccatacagtccttgaggatcgcgctaatgcttcaatagggcttgaaaagggcagtgaacatgctatagacttttggaacatcagtgaaaatgatgaattctgctatggtggggcatgtgaagtccgtgctctgtcttcattacaagctttagcatctagagaaaatcaatcggtattcatggaatgtttccagtgtgaaaagacagtttgcaaagcttgctgtgctgggaaaggggccttccttttgcttaacacctacagggagttgaagatatatggtgggagtcaaagtggtggctactcagcactcacagatagttttgtgtgcaaatcgtgctgcagtgaaattatcaaacgtgcattgtatgtggattatgtccgggttcttcatagtttgcgcagaaaagatcgttcagagaaagcagcactgagtgctgtgaatcaggtctgccaactggagtacaagaaagcatctgatttatctcaaagtattcaatttggtcagagacaattgaagcagatccttgatggtgaagaatcccttgcagaatttccatatgcaaactttttacaaatggttgaaactgccaatgactctgaaccactgctttcattactggcgccttttggtactggagagtatacgtcttactggaaagctccacaaggtatcacttcagtggaattctcaattgttcttggtggtttatcagatattgcaggagtttccataattgtcagttcttgcggttactcagcatctgactgcccaattgtagagatatgggcgagtaataaaatacaccgagaagatcgtacatttataggaaagtgggatgtacaggatataatatcttcatctccacagcttcgtggacctgaaaaatctagtagattgagtgaagaaccaagacacattaaatttcacttcccaaatcctatccgttgtcgtataatttcaataaaaatgacactttcccatagaggttctcattcaaccaagtttagtgaggagtttgatcttctatcattgaatgatagctcatcttatgaatcgaagccaaccaatttacataattcatttatccatgcaaaaagaattgtagtttttggcagtttgttgagaaaggagatggagcctgacacatcaggggggataatgagaatgaaaagttatttagacagatcaccggccttggggagatttaggatcccagttgaagctgagaggctgagagataatgatcttgttcttgagcaatatctcttagctaattcacctggaatagctggattccggcttgattctttcagtgttataagacctcgtgtgacccattcaccttcttcatcagagttggacatgagggagttttcattgacacgaatggaagatagatttataaacccagcaattctgtatatacaggtcacagttgttaaggagtccggcaagttggttgtagaggaataccgtttaccagaagtaaaagcaaacacgccactatattttgatttcccagatctacaacaggatgcgcgctgtgttatctttagattgcttggtgacgtcactgcctttgtcgacgacatttctgagcttgagaacttaaacttgcggaatcttcctttggcgtcgggactgtctttgtcaaataagatcaagttgtactactatgctgatacatatgagatgggaaagatcggcagtctctcagctgtataatgtatgtgagtcatgctcattttcagaag

SEQ ID NO: 42232 - DNA, 4637 bp, Zea Mays
gctgaacaacggagagaaaaagtgaggcggaagacgagggacatacttcaagcgcccgcggcccgcagcctgctcgcccaggtcttcgccggcgacgagcacccaccaggtccgctcagtccatctctccagaaatccccagatgttccacagcaagtcgctccctaggcccaaggacacatcggtggtggtggtcgtccttgagacgacagaagtgtacattgtgatcagcttgtcgacgaggagagacacccaggtcgtatacgtcgatccgaccaccggcgccctgcgctacctggggaagcatggggaggacgtctttgattcggaggcggcggcgctgaaccacatcaccaacggatcaagggttctatccaagagcactacatatgccaaggcagtgctgggatacgcggtgttaggaagccatgctctgctcttggtcgcgacacagttgagcgcgtcggtccccaatctgccgggaggcgggtgcatatacacattggcagagagccagtggataaagatccagctgcagaatcctcagccccaggggactggagaacagaagaacatacgtgagctggccaatctagacattgatggcaagttcttcttttgcgagacaagggatgttaccaggcccttcccgagtcctattacactacgggaaccagatgaggaatttgtttggaacgagtggctgtcaaagccctttaaggacattggtttgccaggacactgtgtcattcttctgcaggggttcgctgagtgccggaactttggaggtgctgggcagcaaggtgggttagtcgcccttattgcacgccgaagtcggttgcatcctggaactcgctatttggcccgtggactgaacgcatgttcaggcacaggcaatgaggtagagtgcgagcaactcgtttgggttccacggaagggcggacagcgcatcccttttagctcgtatatctggcgccgtggaactattccaatatggtggggcgcagaaataaaaaacgcggtgtcagtggaggctgaaatttacgttgccaacgatccttacaacggaagcttacagtactaccaacggttgggtaaaagatatgggaataaatcatctgaagcgaacgtgtccaggcaaaaaagttctggaagggttcccattatttgtgttaacttgctaagatacggcgaaggaaaaacagagtcagttcttgttgatcatttcaaagaatctatacggtacatgaactctactggaaagctgggaagcacgtggattcagttaataaattatgactggcatgccactgtgaagttaaaagggcagcagcagacagttgagggcctatggaggcatcttaaaccacctacaatggtcattggcttcagtgaagggaattactatgatgcaagacagcagcttaatgaatgtaaaggatcagttatctgcaatgacgatgtaaatggtgggttttgcatggaatctattcaaaatggggtgatacgattcaactgtgcagactctcttgatcgaaccaatgctgctagttactttggtgcacttcaagtttttgttgaacagtgtagtcgattgagcatctcgcttgacatagatgcaatgtttgggttgtcaagtagatattctgaatatgatggtagaaacactcgttctttgccccctggatgggaggagcgctttgactctgtaacagggaaatcattttatattgatcataatacacgtactaccacatgggaacatccatgccaggaggctccacagaagccctggaagagatttgatatgacatttgatcagttcaaaggctcaacaatgcttgctccagtgaaccagcttgctgaactttttcttttggcaggcgatatccatgctacgttgtacactggctcaaaagctatgcacagtgatattctgaacatattcaaggaggaaacaggaaagtttagtaaattctcagctgttgagaatgtgaaaattacggtgctaagaaggtaccaaaattttatgaatgatagttcccgtcaaaagcagttagagatgtttcttggtttgaggctatataggcatctcccgtccatccctatgttccctctcaaagtgctatcaaggccatctggatgcatgttaaaaccagttcctagtatcatcccaatggctgatggtggttccagtcttctgagcttcaaaaggaaggatcttatttgggtgtgtcagcaaggtgcagactatgttgaactttttatataccttggggaaccttgtcacgtttgtcaactgcttcttactgtctcccacggtgctgaagattcttcatatccagcaaccgtagatgttagagttggctcaagcatcgactccctcaaactcgtggttgagggtgcttgcattccacaatgctctaatgggacaaatttactgattccagtcactgggagaactgatccagaggacttggctgttacagggaaaagtgcgaggcccaatgttcaagagagctcctatcttcctttgttatatgactttgaagagctagaaggagaattaaactttttgaatcgggttgttgcattatcttttcatccatctgctgtatcaagaacacccattactcttggcgagattgaagtacttggagtttcccttccatgggcagacatgttaaccaatagtgaacgtgctcctgaatttatggagtttatcaataaaaaatcatcaagtgctcactgtaatctaggttccaagtcttttggaaattcttccatgcctgggaatgattctcatggtattgatgagtcttatactaaaagttcatcattagttcaaccgtgtggttcggaaaatttgttggattttctcacaggtgattttgacatgtcggagtcccatataactcaaaatacttttggtgctggagaacaaacaaacttcttagatgatggatttgatgttaatcctttcgcccctgcattggaagtgcctgttcctgttgctaaagtaaacaaggaggttgaagaatgtggcagcacccagctttatattaaattttttgaatccctttctggctataataagggaaagggtcttgactttgagcaaacgatgaagcttgaaataaaacgtctccgtcttggtctttcagccgctgaaagggaccaggcgttgttatcaattggtgtaattcctgccacattagatccaaaccgtttaattgattattcttacctattgaagttatccagcttagctgataatctagcactgctgggccatacagtccttgaggatcgcgctaatgcttcaatagggcttgaaaagggcagtgaacatgctatagacttttggaacatcagtgaaaatgatgaattctgctatggtggggcatgtgaagtccgtgctctgtcttcattacaagctttagcatctagagaaaatcaatcggtattcatggaatgtttccagtgtgaaaagacagtttgcaaagcttgctgtgctgggaaaggggccttccttttgcttaacacctacagggagttgaagatatatggtgggagtcaaagtggtggctactcagcactcacagatagttttgtgtgcaaatcgtgctgcagtgaaattatcaaacgtgcattgtatgtggattatgtccgggttcttcatagtttgcgcagaaaagatcgttcagagaaagcagcactgagtgctgtgaatcaggtctgccaactggagtacaagaaagcatctgatttatctcaaagtattcaatttggtcagagacaattgaagcagatccttgatggtgaagaatcccttgcagaatttccatatgcaaactttttacaaatggttgaaactgccaatgactctgaaccactgctttcattactggcgccttttggtactggagagtatacgtcttactggaaagctccacaaggtatcacttcagtggaattctcaattgttcttggtggtttatcagatattgcaggagtttccataattgtcagttcttgcggttactcagcatctgactgcccaattatcccagttgaagctgagaggctgagagataatgatcttgttcttgagcaatatctcttagctaattcacctggaatagctggattccggcttgattctttcagtgttataagacctcgtgtgacccattcaccttcttcatcagagttggacatgagggagttttcattgacacgaatggaagatagatttataaacccagcaattctgtatatacaggtcacagttgttaaggagtccggcaagttggttgtagaggaataccgtttaccagaagtaaaagcaaacacgccactatattttgatttcccagatctacaacaggatgcgcgctgtgttatctttagattgcttggtgacgtcactgcctttgtcgacgacatttctgagcttgagaacttaaacttgcggaatcttcctttggcgtcgggactgtctttgtcaaataagatcaagttgtactactatgctgatacatatgagatgggaaagatcggcagtctctcagctgtataatgtatgtgagttatgtggatggatccttaacatactggagtcaaccacatagcca

SEQ ID NO: 42233 - DNA, 5361 bp, Zea Mays
gctgaacaacggagagaaaaagtgaggcggaagacgagggacatacttcaagcgcccgcggcccgcagcctgctcgcccaggtcttcgccggcgacgagcacccaccaggtccgctcagtccatctctccagaaatccccagatgttccacagcaagtcgctccctaggcccaaggacacatcggtggtggtggtcgtccttgagacgacagaagtgtacattgtgatcagcttgtcgacgaggagagacacccaggtcgtatacgtcgatccgaccaccggcgccctgcgctacctggggaagcatggggaggacgtctttgattcggaggcggcggcgctgaaccacatcaccaacggatcaagggttctatccaagagcactacatatgccaaggcagtgctgggatacgcggtgttaggaagccatgctctgctcttggtcgcgacacagttgagcgcgtcggtccccaatctgccgggaggcgggtgcatatacacattggcagagagccagtggataaagatccagctgcagaatcctcagccccaggggactggagaacagaagaacatacgtgagctggccaatctagacattgatggcaagttcttcttttgcgagacaagggatgttaccaggcccttcccgagtcctattacactacgggaaccagatgaggaatttgtttggaacgagtggctgtcaaagccctttaaggacattggtttgccaggacactgtgtcattcttctgcaggggttcgctgagtgccggaactttggaggtgctgggcagcaaggtgggttagtcgcccttattgcacgccgaagtcggttgcatcctggaactcgctatttggcccgtggactgaacgcatgttcaggcacaggcaatgaggtagagtgcgagcaactcgtttgggttccacggaagggcggacagcgcatcccttttagctcgtatatctggcgccgtggaactattccaatatggtggggcgcagaaataaaaaacgcggtgtcagtggaggctgaaatttacgttgccaacgatccttacaacggaagcttacagtactaccaacggttgggtaaaagatatgggaataaatcatctgaagcgaacgtgtccaggcaaaaaagttctggaagggttcccattatttgtgttaacttgctaagatacggcgaaggaaaaacagagtcagttcttgttgatcatttcaaagaatctatacggtacatgaactctactggaaagctgggaagcacgtggattcagttaataaattatgactggcatgccactgtgaagttaaaagggcagcagcagacagttgagggcctatggaggcatcttaaaccacctacaatggtcattggcttcagtgaagggaattactatgatgcaagacagcagcttaatgaatgtaaaggatcagttatctgcaatgacgatgtaaatggtgggttttgcatggaatctattcaaaatggggtgatacgattcaactgtgcagactctcttgatcgaaccaatgctgctagttactttggtgcacttcaagtttttgttgaacagtgtagtcgattgagcatctcgcttgacatagatgcaatgtttgggttgtcaagtagatattctgaatatgatggtagaaacactcgttctttgccccctggatgggaggagcgctttgactctgtaacagggaaatcattttatattgatcataatacacgtactaccacatgggaacatccatgccaggaggctccacagaagccctggaagagatttgatatgacatttgatcagttcaaaggctcaacaatgcttgctccagtgaaccagcttgctgaactttttcttttggcaggcgatatccatgctacgttgtacactggctcaaaagctatgcacagtgatattctgaacatattcaaggaggaaacaggaaagtttagtaaattctcagctgttgagaatgtgaaaattacggtgctaagaaggtaccaaaattttatgaatgatagttcccgtcaaaagcagttagagatgtttcttggtttgaggctatataggcatctcccgtccatccctatgttccctctcaaagtgctatcaaggccatctggatgcatgttaaaaccagttcctagtatcatcccaatggctgatggtggttccagtcttctgagcttcaaaaggaaggatcttatttgggtgtgtcagcaaggtgcagactatgttgaactttttatataccttggggaaccttgtcacgtttgtcaactgcttcttactgtctcccacggtgctgaagattcttcatatccagcaaccgtagatgttagagttggctcaagcatcgactccctcaaactcgtggttgagggtgcttgcattccacaatgctctaatgggacaaatttactgattccagtcactgggagaactgatccagaggacttggctgttacagggaaaagtgcgaggcccaatgttcaagagagctcctatcttcctttgttatatgactttgaagagctagaaggagaattaaactttttgaatcgggttgttgcattatcttttcatccatctgctgtatcaagaacacccattactcttggcgagattgaagtacttggagtttcccttccatgggcagacatgttaaccaatagtgaacgtgctcctgaatttatggagtttatcaataaaaaatcatcaagtgctcactgtaatctaggttccaagtcttttggaaattcttccatgcctgggaatgattctcatggtattgatgagtcttatactaaaagttcatcattagttcaaccgtgtggttcggaaaatttgttggattttctcacaggtgattttgacatgtcggagtcccatataactcaaaatacttttggtgctggagaacaaacaaacttcttagatgatggatttgatgttaatcctttcgcccctgcattggaagtgcctgttcctgttgctaaagtaaacaaggaggttgaagaatgtggcagcacccagctttatattaaattttttgaatccctttctggctataataagggaaagggtcttgactttgagcaaacgatgaagcttgaaataaaacgtctccgtcttggtctttcagccgctgaaagggaccaggcgttgttatcaattggtgtaattcctgccacattagatccaaaccgtttaattgattattcttacctattgaagttatccagcttagctgataatctagcactgctgggccatacagtccttgaggatcgcgctaatgcttcaatagggcttgaaaagggcagtgaacatgctatagacttttggaacatcagtgaaaatgatgaattctgctatggtggggcatgtgaagtccgtgctctgtcttcattacaagctttagcatctagagaaaatcaatcggtattcatggaatgtttccagtgtgaaaagacagtttgcaaagcttgctgtgctgggaaaggggccttccttttgcttaacacctacagggagttgaagatatatggtgggagtcaaagtggtggctactcagcactcacagatagttttgtgtgcaaatcgtgctgcagtgaaattatcaaacgtgcattgtatgtggattatgtccgggttcttcatagtttgcgcagaaaagatcgttcagagaaagcagcactgagtgctgtgaatcaggtctgccaactggagtacaagaaagcatctgatttatctcaaagtattcaatttggtcagagacaattgaagcagatccttgatggtgaagaatcccttgcagaatttccatatgcaaactttttacaaatggttgaaactgccaatgactctgaaccactgctttcattactggcgccttttggtactggagagtatacgtcttactggaaagctccacaaggtagagatatgggcgagtaataaaatacaccgagaagatcgtacatttataggaaagtgggatgtacaggatataatatcttcatctccacagcttcgtggacctgaaaaatctagtagattgagtgaagaaccaagacacattaaatttcacttcccaaatcctatccgttgtcgtataatttcaataaaaatgacactttcccatagaggttctcattcaaccaagtttagtgaggagtttgatcttctatcattgaatgatagctcatcttatgaatcgaagccaaccaatttacataattcatttatccatgcaaaaagaattgtagtttttggcagtttgttgagaaaggagatggagcctgacacatcaggggggataatgagaatgaaaagttatttagacagatcaccggccttggggagatttaggatcccagttgaagctgagaggctgagagataatgatcttgttcttgagcaatatctcttagctaattcacctggaatagctggattccggcttgattctttcagtgttataagacctcgtgtgacccattcaccttcttcatcagagttggacatgagggagttttcattgacacgaatggaagatagatttataaacccagcaattctgtatatacaggtcacagttgttaaggagtccggcaagttggttgtagaggaataccgtttaccagaagtaaaagcaaacacgccactatattttgatttcccagatctacaacaggatgcgcgctgtgttatctttagattgcttggtgacgtcactgcctttgtcgacgacatttctgagcttgagaacttaaacttgcggaatcttcctttggcgtcgggactgtctttgtcaaataagatcaagttgtactactatgctgatacatatgagatgggaaagatcggcagtctctcagctgtataatgtatgtgaggtcgtcgtacatgccaacctgggatggtaacccgtccctagaagattgttgtaacctactgtttctacgtgttgttgtggaagtaagagctgctgctacagatacatgatgctttttttttactgcttctgtattcttgcttctttttgcttttgattagatgaccccagtttgagggatgtagggattttgcctgtagaatttctggaaattcatctctttttttaatgtagaatagccggaaattcaattcgatcgcagtccacgaaactgccagctacgtttgtcgatacctgtattgggacctggattattgtatagagccaagaacttgcattgatattttttgtttgtttgtttgtttcataccatattttaagcgctggctgcaccagatgttcgttcgtatggtatggtacgtggccatgctgcggctgtaag

SEQ ID NO: 42234 - DNA, 5459 bp, Zea Mays
gctgaacaacggagagaaaaagtgaggcggaagacgagggacatacttcaagcgcccgcggcccgcagcctgctcgcccaggtcttcgccggcgacgagcacccaccaggtccgctcagtccatctctccagaaatccccagatgttccacagcaagtcgctccctaggcccaaggacacatcggtggtggtggtcgtccttgagacgacagaagtgtacattgtgatcagcttgtcgacgaggagagacacccaggtcgtatacgtcgatccgaccaccggcgccctgcgctacctggggaagcatggggaggacgtctttgattcggaggcggcggcgctgaaccacatcaccaacggatcaagggttctatccaagagcactacatatgccaaggcagtgctgggatacgcggtgttaggaagccatgctctgctcttggtcgcgacacagttgagcgcgtcggtccccaatctgccgggaggcgggtgcatatacacattggcagagagccagtggataaagatccagctgcagaatcctcagccccaggggactggagaacagaagaacatacgtgagctggccaatctagacattgatggcaagttcttcttttgcgagacaagggatgttaccaggcccttcccgagtcctattacactacgggaaccagatgaggaatttgtttggaacgagtggctgtcaaagccctttaaggacattggtttgccaggacactgtgtcattcttctgcaggggttcgctgagtgccggaactttggaggtgctgggcagcaaggtgggttagtcgcccttattgcacgccgaagtcggttgcatcctggaactcgctatttggcccgtggactgaacgcatgttcaggcacaggcaatgaggtagagtgcgagcaactcgtttgggttccacggaagggcggacagcgcatcccttttagctcgtatatctggcgccgtggaactattccaatatggtggggcgcagaaataaaaaacgcggtgtcagtggaggctgaaatttacgttgccaacgatccttacaacggaagcttacagtactaccaacggttgggtaaaagatatgggaataaatcatctgaagcgaacgtgtccaggcaaaaaagttctggaagggttcccattatttgtgttaacttgctaagatacggcgaaggaaaaacagagtcagttcttgttgatcatttcaaagaatctatacggtacatgaactctactggaaagctgggaagcacgtggattcagttaataaattatgactggcatgccactgtgaagttaaaagggcagcagcagacagttgagggcctatggaggcatcttaaaccacctacaatggtcattggcttcagtgaagggaattactatgatgcaagacagcagcttaatgaatgtaaaggatcagttatctgcaatgacgatgtaaatggtgggttttgcatggaatctattcaaaatggggtgatacgattcaactgtgcagactctcttgatcgaaccaatgctgctagttactttggtgcacttcaagtttttgttgaacagtgtagtcgattgagcatctcgcttgacatagatgcaatgtttgggttgtcaagtagatattctgaatatgatggtagaaacactcgttctttgccccctggatgggaggagcgctttgactctgtaacagggaaatcattttatattgatcataatacacgtactaccacatgggaacatccatgccaggaggctccacagaagccctggaagagatttgatatgacatttgatcagttcaaaggctcaacaatgcttgctccagtgaaccagcttgctgaactttttcttttggcaggcgatatccatgctacgttgtacactggctcaaaagctatgcacagtgatattctgaacatattcaaggaggaaacaggaaagtttagtaaattctcagctgttgagaatgtgaaaattacggtgctaagaaggtaccaaaattttatgaatgatagttcccgtcaaaagcagttagagatgtttcttggtttgaggctatataggcatctcccgtccatccctatgttccctctcaaagtgctatcaaggccatctggatgcatgttaaaaccagttcctagtatcatcccaatggctgatggtggttccagtcttctgagcttcaaaaggaaggatcttatttgggtgtgtcagcaaggtgcagactatgttgaactttttatataccttggggaaccttgtcacgtttgtcaactgcttcttactgtctcccacggtgctgaagattcttcatatccagcaaccgtagatgttagagttggctcaagcatcgactccctcaaactcgtggttgagggtgcttgcattccacaatgctctaatgggacaaatttactgattccagtcactgggagaactgatccagaggacttggctgttacagggaaaagtgcgaggcccaatgttcaagagagctcctatcttcctttgttatatgactttgaagagctagaaggagaattaaactttttgaatcgggttgttgcattatcttttcatccatctgctgtatcaagaacacccattactcttggcgagattgaagtacttggagtttcccttccatgggcagacatgttaaccaatagtgaacgtgctcctgaatttatggagtttatcaataaaaaatcatcaagtgctcactgtaatctaggttccaagtcttttggaaattcttccatgcctgggaatgattctcatggtattgatgagtcttatactaaaagttcatcattagttcaaccgtgtggttcggaaaatttgttggattttctcacaggtgattttgacatgtcggagtcccatataactcaaaatacttttggtgctggagaacaaacaaacttcttagatgatggatttgatgttaatcctttcgcccctgcattggaagtgcctgttcctgttgctaaagtaaacaaggaggttgaagaatgtggcagcacccagctttatattaaattttttgaatccctttctggctataataagggaaagggtcttgactttgagcaaacgatgaagcttgaaataaaacgtctccgtcttggtctttcagccgctgaaagggaccaggcgttgttatcaattggtgtaattcctgccacattagatccaaaccgtttaattgattattcttacctattgaagttatccagcttagctgataatctagcactgctgggccatacagtccttgaggatcgcgctaatgcttcaatagggcttgaaaagggcagtgaacatgctatagacttttggaacatcagtgaaaatgatgaattctgctatggtggggcatgtgaagtccgtgctctgtcttcattacaagctttagcatctagagaaaatcaatcggtattcatggaatgtttccagtgtgaaaagacagtttgcaaagcttgctgtgctgggaaaggggccttccttttgcttaacacctacagggagttgaagatatatggtgggagtcaaagtggtggctactcagcactcacagatagttttgtgtgcaaatcgtgctgcagtgaaattatcaaacgtgcattgtatgtggattatgtccgggttcttcatagtttgcgcagaaaagatcgttcagagaaagcagcactgagtgctgtgaatcaggtctgccaactggagtacaagaaagcatctgatttatctcaaagtattcaatttggtcagagacaattgaagcagatccttgatggtgaagaatcccttgcagaatttccatatgcaaactttttacaaatggttgaaactgccaatgactctgaaccactgctttcattactggcgccttttggtactggagagtatacgtcttactggaaagctccacaaggtatcacttcagtggaattctcaattgttcttggtggtttatcagatattgcaggagtttccataattgtcagttcttgcggttactcagcatctgactgcccaattgtagagatatgggcgagtaataaaatacaccgagaagatcgtacatttataggaaagtgggatgtacaggatataatatcttcatctccacagcttcgtggacctgaaaaatctagtagattgagtgaagaaccaagacacattaaatttcacttcccaaatcctatccgttgtcgtataatttcaataaaaatgacactttcccatagaggttctcattcaaccaagtttagtgaggagtttgatcttctatcattgaatgatagctcatcttatgaatcgaagccaaccaatttacataattcatttatccatgcaaaaagaattgtagtttttggcagtttgttgagaaaggagatggagcctgacacatcaggggggataatgagaatgaaaagttatttagacagatcaccggccttggggagatttaggatcccagttgaagctgagaggctgagagataatgatcttgttcttgagcaatatctcttagctaattcacctggaatagctggattccggcttgattctttcagtgttataagacctcgtgtgacccattcaccttcttcatcagagttggacatgagggagttttcattgacacgaatggaagatagatttataaacccagcaattctgtatatacaggtcacagttgttaaggagtccggcaagttggttgtagaggaataccgtttaccagaagtaaaagcaaacacgccactatattttgatttcccagatctacaacaggatgcgcgctgtgttatctttagattgcttggtgacgtcactgcctttgtcgacgacatttctgagcttgagaacttaaacttgcggaatcttcctttggcgtcgggactgtctttgtcaaataagatcaagttgtactactatgctgatacatatgagatgggaaagatcggcagtctctcagctgtataatgtcgtcgtacatgccaacctgggatggtaacccgtccctagaagattgttgtaacctactgtttctacgtgttgttgtggaagtaagagctgctgctacagatacatgatgctttttttttactgcttctgtattcttgcttctttttgcttttgattagatgaccccagtttgagggatgtagggattttgcctgtagaatttctggaaattcatctctttttttaatgtagaatagccggaaattcaattcgatcgcagtccacgaaactgccagctacgtttgtcgatacctgtattgggacctggattattgtatagagccaagaacttgcattgatattttttgtttgtttgtttgtttcataccatattttaagcgctggctgcaccagatgttcgttcgtatggtatggtacgtggccatgctgcggctgtaag

SEQ ID NO: 42235 - DNA, 5182 bp, Zea Mays
gctgaacaacggagagaaaaagtgaggcggaagacgagggacatacttcaagcgcccgcggcccgcagcctgctcgcccaggtcttcgccggcgacgagcacccaccaggtccgctcagtccatctctccagaaatccccagatgttccacagcaagtcgctccctaggcccaaggacacatcggtggtggtggtcgtccttgagacgacagaagtgtacattgtgatcagcttgtcgacgaggagagacacccaggtcgtatacgtcgatccgaccaccggcgccctgcgctacctggggaagcatggggaggacgtctttgattcggaggcggcggcgctgaaccacatcaccaacggatcaagggttctatccaagagcactacatatgccaaggcagtgctgggatacgcggtgttaggaagccatgctctgctcttggtcgcgacacagttgagcgcgtcggtccccaatctgccgggaggcgggtgcatatacacattggcagagagccagtggataaagatccagctgcagaatcctcagccccaggggactggagaacagaagaacatacgtgagctggccaatctagacattgatggcaagttcttcttttgcgagacaagggatgttaccaggcccttcccgagtcctattacactacgggaaccagatgaggaatttgtttggaacgagtggctgtcaaagccctttaaggacattggtttgccaggacactgtgtcattcttctgcaggggttcgctgagtgccggaactttggaggtgctgggcagcaaggtgggttagtcgcccttattgcacgccgaagtcggttgcatcctggaactcgctatttggcccgtggactgaacgcatgttcaggcacaggcaatgaggtagagtgcgagcaactcgtttgggttccacggaagggcggacagcgcatcccttttagctcgtatatctggcgccgtggaactattccaatatggtggggcgcagaaataaaaaacgcggtgtcagtggaggctgaaatttacgttgccaacgatccttacaacggaagcttacagtactaccaacggttgggtaaaagatatgggaataaatcatctgaagcgaacgtgtccaggcaaaaaagttctggaagggttcccattatttgtgttaacttgctaagatacggcgaaggaaaaacagagtcagttcttgttgatcatttcaaagaatctatacggtacatgaactctactggaaagctgggaagcacgtggattcagttaataaattatgactggcatgccactgtgaagttaaaagggcagcagcagacagttgagggcctatggaggcatcttaaaccacctacaatggtcattggcttcagtgaagggaattactatgatgcaagacagcagcttaatgaatgtaaaggatcagttatctgcaatgacgatgtaaatggtgggttttgcatggaatctattcaaaatggggtgatacgattcaactgtgcagactctcttgatcgaaccaatgctgctagttactttggtgcacttcaagtttttgttgaacagtgtagtcgattgagcatctcgcttgacatagatgcaatgtttgggttgtcaagtagatattctgaatatgatggtagaaacactcgttctttgccccctggatgggaggagcgctttgactctgtaacagggaaatcattttatattgatcataatacacgtactaccacatgggaacatccatgccaggaggctccacagaagccctggaagagatttgatatgacatttgatcagttcaaaggctcaacaatgcttgctccagtgaaccagcttgctgaactttttcttttggcaggcgatatccatgctacgttgtacactggctcaaaagctatgcacagtgatattctgaacatattcaaggaggaaacaggaaagtttagtaaattctcagctgttgagaatgtgaaaattacggtgctaagaaggtaccaaaattttatgaatgatagttcccgtcaaaagcagttagagatgtttcttggtttgaggctatataggcatctcccgtccatccctatgttccctctcaaagtgctatcaaggccatctggatgcatgttaaaaccagttcctagtatcatcccaatggctgatggtggttccagtcttctgagcttcaaaaggaaggatcttatttgggtgtgtcagcaaggtgcagactatgttgaactttttatataccttggggaaccttgtcacgtttgtcaactgcttcttactgtctcccacggtgctgaagattcttcatatccagcaaccgtagatgttagagttggctcaagcatcgactccctcaaactcgtggttgagggtgcttgcattccacaatgctctaatgggacaaatttactgattccagtcactgggagaactgatccagaggacttggctgttacagggaaaagtgcgaggcccaatgttcaagagagctcctatcttcctttgttatatgactttgaagagctagaaggagaattaaactttttgaatcgggttgttgcattatcttttcatccatctgctgtatcaagaacacccattactcttggcgagattgaagtacttggagtttcccttccatgggcagacatgttaaccaatagtgaacgtgctcctgaatttatggagtttatcaataaaaaatcatcaagtgctcactgtaatctaggttccaagtcttttggaaattcttccatgcctgggaatgattctcatggtattgatgagtcttatactaaaagttcatcattagttcaaccgtgtggttcggaaaatttgttggattttctcacaggtgattttgacatgtcggagtcccatataactcaaaatacttttggtgctggagaacaaacaaacttcttagatgatggatttgatgttaatcctttcgcccctgcattggaagtgcctgttcctgttgctaaagtaaacaaggaggttgaagaatgtggcagcacccagctttatattaaattttttgaatccctttctggctataataagggaaagggtcttgactttgagcaaacgatgaagcttgaaataaaacgtctccgtcttggtctttcagccgctgaaagggaccaggcgttgttatcaattggtgtaattcctgccacattagatccaaaccgtttaattgattattcttacctattgaagttatccagcttagctgataatctagcactgctgggccatacagtccttgaggatcgcgctaatgcttcaatagggcttgaaaagggcagtgaacatgctatagacttttggaacatcagtgaaaatgatgaattctgctatggtggggcatgtgaagtccgtgctctgtcttcattacaagctttagcatctagagaaaatcaatcggtattcatggaatgtttccagtgtgaaaagacagtttgcaaagcttgctgtgctgggaaaggggccttccttttgcttaacacctacagggagttgaagatatatggtgggagtcaaagtggtggctactcagcactcacagatagttttgtgtgcaaatcgtgctgcagtgaaattatcaaacgtgcattgtatgtggattatgtccgggttcttcatagtttgcgcagaaaagatcgttcagagaaagcagcactgagtgctgtgaatcaggtctgccaactggagtacaagaaagcatctgatttatctcaaagtattcaatttggtcagagacaattgaagcagatccttgatggtgaagaatcccttgcagaatttccatatgcaaactttttacaaatggttgaaactgccaatgactctgaaccactgctttcattactggcgccttttggtactggagagtatacgtcttactggaaagctccacaaggtatcacttcagtggaattctcaattgttcttggtggtttatcagatattgcaggagtttccataattgtcagttcttgcggttactcagcatctgactgcccaattgtagagatatgggcgagtaataaaatacaccgagaagatcgtacatttataggaaagtgggatgtacaggatataatatcttcatctccacagcttcgtggacctgaaaaatctagtagattgagtgaagaaccaagacacattaaatttcacttcccaaatcctatccgttgtcgtataatttcaataaaaatgacactttcccatagaggttctcattcaaccaagtttagtgaggagtttgatcttctatcattgaatgatagctcatcttatgaatcgaagccaaccaatttacataattcatttatccatgcaaaaagaattgtagtttttggcagtttgttgagaaaggagatggagcctgacacatcaggggggataatgagaatgaaaagttatttagacagatcaccggccttggggagatttaggatcccagttgaagctgagaggctgagagataatgatcttgttcttgagcaatatctcttagctaattcacctggaatagctggattccggcttgattctttcagtgttataagacctcgtgtgacccattcaccttcttcatcagagttggacatgagggagttttcattgacacgaatggaagatagatttataaacccagcaattctgtatatacaggtcacagttgttaaggagtccggcaagttggttgtagaggaataccgtttaccagaagtaaaagcaaacacgccactatattttgatttcccagatctacaacaggatgcgcgctgtgttatctttagattgcttggtgacgtcactgcctttgtcgacgacatttctgagcttgagaacttaaacttgcggaatcttcctttggcgtcgggactgtctttgtcaaataagatcaagttgtactactatgctgatacatatgagatgggaaagatcggcagtctctcagctgtataatgtatgtgaggtcgtcgtacatgccaacctgggatggtaacccgtccctagaagattgttgtaacctactgtttctacgtgttgttgtggaagtaaccaagaccggaggagaaatttaatttcagttgttaacatcaaccgggactactacaacagggtttggtt

SEQ ID NO: 42236 - DNA, 3818 bp, Zea Mays
gcccccgctctcctcgcccccagatcttgcccgcgtctgtccccagatcttatcccttccagcatccccagcctgacgaaggaattcaagctccagcaacgtcaggatccaacaccaccatggtcacgggaaagaagaggacgttcgtgctctacccgtcgctgggcgtgggccacctgatcccgatggtggagctggccaagcacctcttgcgccacggccacggcgcgctcatcgctgtggtcaacccgccggacaccgacgccgtgtcggtcgccgcggtggagcgcctcgcggcggccaacccggccatcgcgttccgcctcctgccggtcccggccagcccggacgccggcgcggactgggtgaagcgcgacctggacacgctccggctcgccaaccccgtgctccgggacttcctgctccggtcccagcccgccaccgcgctcatcctcgacatgttctgcgtcgacgcgctcgacgtcgcggcggagctcggcgtcccggcctacttcttcttcgcctccgcggcgggggacctcgccatgttcctcaacctgccgtacctctaccccaccctgccgtcgttcagggacatgagcgaggcgctggtgcgctgccccggcatgccgccggttcgggcgatggacatgccgctgacggtgcaggacagggacagcgaccggatcaaggtccggatgtaccagttccgccgcatcccggaggggaggggcgtgctggtcaacagcttcgcctggctggagcccatggcactgagagcgctcggcgacggcgtctgcgtgcccggccgcccgacgccgagggtcttctgcgtcgggccactggtcaacgacggcagcagcacggcggggagcggcgggaggcacgagtgcctggcgtggctggacacgcagcccaagcggagcgtcgtgttcctctgcttcggcagcaaggacgcttgttcggtactgattgcattgttcttatatcaccagttctattgaacggatggaagcttttttgttcgggtattgtcacgatctatagacggatgaagtaaaatatttctagagtatgtgtgttcgtgtaattgtgtatttaagtcatgccattgttcttgggaaggcacatgtgaaaaaattgactttcacaacgaacaagcttatataaatctaatttcaaaatggttcgtacaacatttattcacgggaacggagataaggagctgtaagtattctcagactcattattctaattccacttctaattccacgtgaatgggagtggattagggtggactttgacttctatagatttaaatcgactcaataccatccagtatagaactaatttacaccataaatcatcttaatctatgtggattgaggtgaataagagccttaatctatgtggatcgagtgaacgtatagaattaatttacaccataaattatcttaatctatgtggattgagacgaataagagccttaatctatacgattccgttgcaacgtacgggcactcacctagtagaagaataagtagagatggaataacaggaaaaaatacttattatgaagatacggacacataagcatatgaaaagaagaaatagtgtacatgattatctaacagtgtgaaaaaagaggaaccctaagaaagctgttgctgttgcgaatggcttctttgctgagataacagagagcggagaaaacatcacccaaagaaatatagtcagaagtcagaactgacatatttattagttcaacaccgatatattgttacttcctagcttctccttgcagtgacaggcagttgctattcaatggaggttacctccacagtttgcttttgaagaaataatgatgaaaaggaagaattgaggacttcactgtcaacaacttcccaacattaacatcaaaacttcaatgatgttaaaagactgtctaagtaagtgtagtacaaaggtggacaggtggtctcaggtcagtatcattagatacacgtagccatcatgaaatatcaggattgagaaacaacaactgaacttctaagtcgtatatctgtgcctattccaaactgagttagttgaggggcaactacataaagtttgccaacattacagttgacatgaaacataagctacaatcactgaacttctgagccatgcatctgtgcctattcggctattctgaaggcataagaatggatattctaaaatgcaacagagtgacctagttgcagagaaaaacttgggtgaaatagaagaacaaatagagatggagtaacaggaaaacgacttattatgaaaatatgaacacataagcataggaaaaggagaaatagtgtacatgattatctaacagtgtgaagaaaaaaaaaagaaatagaaaccctacgaaagctgttgctgtttcaggaatggaattggggcaaactaaaaaaaggtgtacaaaaatgaaacacaatcattcaaggtaataaggtattaattaaaagatacactcttgtggtttctttgttcatttcattttttttccaatgcttatggcttctatgctgaaacaacagagaatagagaacacatcccacaaggaaatatagccagagctgacatatttctaagttcaacactgatatattattacttcctatcttctccttgctgtaacaagcagtttctattcaatggaggttccctcaatagtttgctttcgaaggaataatgatgaaaaggaataaaagaggacttcactgtcaacaactcaacattaacaccaacacttaaatgatgttaaaagactgtttaagtaagtgtactccaaaggtggacaggtggccacaggtcagtatcattagctacacgttgctatcatgaaatatcagggttgagaaacaaccactgaacttctaagtcgtgtatctgtgcccattcgaatctgagttagttgaggggcaactacataaattttgccaacatatattacagtccacgtgaagtgtaagctgcaaccactgaacttctgagccgtgcatctgtggctattcctagcagagttagttgaggggcagcaacataaattgtcaacaacacagtccatatgtactgcatgctataaccatcagcctatgtaacaaaaaacatccaagaaacttttttttgggggggggggggggggggatcaaacataagttccattacctcctggaatcaatccccgaataagtcagtgctacaaaatgacaagaagcagtagtttttcaagtctattactccattttacctttgtgacacaataataggcgccccccagtttccatatccggcgagcaattatgtactctctgtcactgcagaagaaggggaactgcaacagatcaaagcataagctgataaacgtgatcacagtcaaccagagagacctcagagcaaatccccagacccgcttaccttccggacccaatgcactttcatcgtcccggtggtctggcactcctccagcgtcttatggtaaacaagcatgtcgtcccacttgttggacacacggaactcgtcgtccccgaagaagtccctcacttcctccggagtggcgtcctcaaagatgctgctactctgatactgtggtggtccggtctgaagccatccgaacagaacccaatcattacgtgcacatgaaatcaagcaagctaagcactcggcagttgacatgtgcaaaacggaaaggtcgtgttcacgttcacctgcgcgtccctccgccacgcctggtaggtcatggtgggaagcgacctgtccatcatcttgatccaggccgggccgcc

SEQ ID NO: 42237 - DNA, 917 bp, Zea Mays
cgcggatgtgggccacgcggccggcagcccatcaaggcatcagctatcaatccagtattccagatttccagcgctgcttccttttctccgccgtgctctccccagtcccctccgcctccggtcaccattaacctagccgcaactctcctcggtgcggcggtgcccgcctgcccggagctcggacaccggagcgacctcaagtgttccacaggcgtcacgggacacgacgctcaccgctcgctatcgctggcggactacggacggctggagctggattgctgactgctgtggagaattcggactttgaagcctcaagtctgaaccatatgtgaagtctgaactgtatttttctcgtggatttgtgatgcaatgcaatggcacttggcggctgtcactggcaggcagcagcagcaccgcagcaggcttaatgccttacagccttgcacttttgtatcttttgtcgtcgtcgagtactcagtacattagtgtagtagtaggtagtacctgtcggctgtattggttcttgaattctcgctcctctgcataagcatgtttggagcaaagatgagggcagagttagcaaatatgcttgttatgtatgaagtagcataaatcaggctatagacactagagaagaggctggtattttattttatttccttatatcttgtatatcaaattcctattcttttgtgtttgtaaatcaacgatcaatggacatttccatgaacatgtattaaattgagttgtatattggttttttggcgattaattgtcttgttgaatgttgatccattttaaccacacaatttgcttggtagattgctgttgctgccagagtttatcatgaattggtatatccattgataaacatgtagataaacatgtagggattgttttcgtgactgctcattttg

SEQ ID NO: 42238 - DNA, 576 bp, Zea Mays
gctatcaatccagtattccagatttccagcgctgcttccttttctccgccgtgctctccccagtcccctccgcctccggtcaccattaacctagccgcaactctcctcggtgcggcggtgcccgcctgcccggagctcggacaccggagcgacctcaagtgttccacaggcgtcacgggacacgacgctcaccgctcgctatcgctgcatgtttggagcaaagatgagggcagagttagcaaatatgcttgttatgtatgaagtagcataaatcaggctatagacactagagaagaggctggtattttattttatttccttatatcttgtatatcaaattcctattcttttgtgtttgtaaatcaacgatcaatggacatttccatgaacatgtattaaattgagttgtatattggttttttggcgattaattgtcttgttgaatgttgatccattttaaccacacaatttgcttggtagattgctgttgctgccagagtttatcatgaattggtatatccattgataaacatgtagataaacatgtagggattgttttcgtgactgctcattttg

SEQ ID NO: 42239 - DNA, 1077 bp, Zea Mays
atcacataaacacaaaagcaccacaattatatattcacaaaagcatcacaattataatatcattcacaactagatcatttacagatagctcacaactaccagctcttcttttaaatcaacgttgaaacagcagataggaactaagtaagctatgctgaatatgcatttcaacagtggaagcatgaacatggctacatcagttcttctcgtcttctgttttgcttaacgtagtggcggcctggctgcttgacgtggggtgtgctttcaactgtggtgtgcttgacgtagtggcggcctgggtgctaagtgatctactagcaggacaaaggccagcaccattgagagaacgagcaggctgtgcccttgataaagaatgaatatactcaattgcagctttctccactgatacccatcaaagtttggtgcttgtgtcacaactgaactcactacgtgttttgcattcttcctaccattaccaagagaaagcaatcaagattttcataaataaaagcatgcttcttctaccgcttattattaatgatcaattaccttctcctgtttccacggcaaagcaattcgattatctgctggccaggcccaactcgcgcgcgggattccgaatctcccggctactgaatccaaccgaacaaaatgtcaaggatacggagaagagggggggaggaggggggtcggaccttgcgttcgaaagaggtctctgccgatctgaggagcgcccgtcgcagcgtcgtgcggaggtagtagccacagtccgcctcgtccggccatagatctgaacgaaacaaaaaacgttaagcagacagcaccttcgaggccggtgcccgggcttgcagtgccaccctctcctcctgctgctacagcggcgacggcctgctcagcgtgcgacggcgacggcctgctcggcgtgcggcggctccatggcgtcgcgggggcggggagggaacagggaagctcggcgatcggtcgggcgatcggagtgggaggaggagatcggggggcctggggcggtagagagagaagagagagaaagggggagggagaaggagtggcggcggcttg

SEQ ID NO: 42240 - DNA, 1356 bp, Zea Mays
cacataaacacaaaagcaccacaattatatattcacaaaagcatcacaattataatatcattcacaactagatcatttacagatagctcacaactaccagctcttcttttaaatcaacgttgaaacagcagataggaactaagtaagctatgctgaatatgcatttcaacagtggaagcatgaacatggctacatcagttcttctcgtcttctgttttgcttaacgtagtggcggcctggctgcttgacgtggggtgtgctttcaactgtggtgtgcttgacgtagtggcggcctgggtgctaagtgatctactagcaggacaaaggccagcaccattgagagaacgagcaggctgtgcccttgataaagaatgaatatactcaattgcagcctgaaagaaagttaaaagtgaggggcatgccaacgaatcatagtagtctgggaaataacatattgttaggaaaaagtgctttttacactattcaaaaaaaggaaaaagaagagacagtgactagataagaactagaacatcacaaccaatttttttacagttttctacaagatctggttgtagcagaaaaattactgaatgacacgaagataaggattgtacatgaatcaggagaaaacagtaaaattaatgatatggtttcaggatctcagatcagttcatatttccatacaagaaatgaatgtgcaagtcacaacatatctgaaaaaatccacttctgcccgtactttctccactgatacccatcaaagtttggtgcttgtgtcacaactgaactcactacgtgttttgcattcttcctaccattaccaagagaaagcaatcaagattttcataaataaaagcatgcttcttctaccgcttattattaatgatcaattaccttctcctgtttccacggcaaagcaattcgattatctgctggccaggcccaactcgcgcgcgggattccgaatctcccggcttgcgttcgaaagaggtctctgccgatctgaggagcgcccgtcgcagcgtcgtgcggaggtagtagccacagtccgcctcgtccggccatagatctgaacgaaacaaaaaacgttaagcagacagcaccttcgaggccggtgcccgggcttgcagtgccaccctctcctcctgctgctacagcggcgacggcctgctcagcgtgcgacggcgacggcctgctcggcgtgcggcggctccatggcgtcgcgggggcggggagggaacagggaagctcggcgatcggtcgggcgatcggagtgggaggaggagatcggggggcctggggcggtagagagagaagagagagaaagggggagggagaaggagtggcggcggcttg

SEQ ID NO: 42241 - DNA, 780 bp, Zea Mays
aagaaatgtgtgccgttattgaccgcgcgcgacatactgttcctatgggatgtcagatgtgtgcgtcgctgtccactactgttcctcctggccgcagtttttcttccgcatcctggtgacagcgttcgtggggactgccattgcgttcgcgtgcttctcttgcgcggccgtggtggccaagcgcagggagtacctctacctgggcggactgctatcttctggcctctccatcctgctctggctgcagttcgccgcctccatcttcggccaatccactagcagcttcatgtttgaggtctactttgggctgctcatcttcctgggctacatggtgtacgacacgcaggaggtcatcgagagggcgcaccacggcgacatggactacatcaagcacgccctcaccctcttcaccgacttcgtggctgtccttgtccgcatccttgtcatcatgctcaagaacgcggctgacaagtcggaggacaagaggaggaagaggaggaggtggtgaaaatctgtgtgcgaacacagcactcaagggaagggaaggccactggtgcgtctgaaatgaagctcccacataactaggtgtatacatacatatataggagcgaggagttactttggggtggaactgaactgtgcaagtgtcgttcctttgttttctcttgctctgtcatcagtgagcctgttgatagttttgtcctgtcctgtgaatgaatgtgacaaatctccaccagtttagcgtctggcattctgaccaaatgggaggcactgttccat

SEQ ID NO: 42242 - DNA, 992 bp, Zea Mays
ggcctggccgcacactctcctctcctgtctatccactttccactccttcactgccctccgtccccccctttgctcgccatggccatggcgacctccaccttctccccgcgtcccgccagcctcaggcccctgcgggcgggcggaaagcccgtcggactcctccccttcccgcgccgcctcgcctgcgccaccgcctccggggaggcgccgcccgtggagcagcgggacgaggcggagccggcccttgccgcggcctccaacggggccgccgtcaagtccgaggccccgccgccgccgcccgcgccagcgccggtcccggccttccgggacgccaggtgggtcaacggcacctgggacctcgccaagttcgacaagggcagcggcgtcgactgggacgccgtcatcgacgccgaggccaggagaaggagatggctcgaagactatccggaggcgactaacacagacgaggctgtcgtcttcgccacttccattattccatggtgggcttggatgaaacgcttccaccttcccgaagccgagaagctaaatgcttgacgggcgcgggcctcgtcgaccagatgggcaacttcttctgcaagacgctgctgttcgccgccgtcgccggcgtgctgctggtcaggaaaaacgaggacgtcgagtcgctgaagaagctcgtcgacgagaccacgttctatgacaggcagtggcaggcgacctggcaagatgactccgctgggggaccaaacaactagttcagcgttgtggtacaaaaaaaatgcaaaacgctttcttgttacgtagcttatctatttcctcggccttcttgttttccctgtgtagtgagaatttttttgtttttgtttttgacaaacgcaatgatctacgtcatgttgtaaaattgtatggaaaataattctgcagtttcagttttttttaaaaaaaaaccgataatattcagacatggaaattgattcacatatcgaccaaagaaa

SEQ ID NO: 42243 - DNA, 3505 bp, Zea Mays
atttagtgtgatcgaagttctaggataatccctttcgctattgtgtgaaaatatagagcacaatacaactataaaatatattattctatcaaaaagaccataaaaataataatatcataataataagtactaggtatatgtctgtgcgttgccacgaggcgggtagcgtgggggcggcgcctaggctgtaaatataattattgtttatttctaaacactaaaatacatgtagtctggtggttagccccaaattattagagcagaggggtgtgggttcgagtgcttgctttgcactattttttacgggtgctgggtgtggggagtgtgaagccatggtagtataggtgccaacattagcttcttaatagattagtatagaagtatagatatagattcccgtatcatcatctgccatcttgtgactcctagtcctaggaaataaaagaactaaggcctagagcctagcggtgtggagtccttttacctgtcatcccatcactgcctgatttaaggtcagggcctaggatttaaaaacacatcttaggtttgctgataacttcacatcactttactttggcgaaggatgaaacagaacatcacacttttgttaatgtagcggttgagagaacccattccttgttgtcatgatccctcttatgagggaaaagtttggtaggaaggcttccgtagtttaccaactaagggaaaataattatccgtatttgatatgtgattctttgactttttgatttgatgtcaatccaattataactgctgtgataactattgacatatttttctttttccaattgcagcactactaatattttatggcatgcaacattacctgtcaatagctggttcacttgtctttgttcctttgatactcgtacctgcaatgggtggttctgatgaggataccgcaacagtcatatccaccatgttattagtctctggtcttactacaatactacatacttttttgggttctcggcttccactgattcaaggaagctcctttgtatatttggctccagcgttggtaattgcgaactccgaggagttcagaaatcttagtgacaataaattcaagcacataatgagggaactacagggggctatacttgttggttcagtattccagataatattaggatacactggtcttatgtcactgtttctgaggttaataaatccagtagtggtggcaccaactattgctgcagtgggtttggcattttttagttatggtttccctcaggctggcagctgtgtagaaatcagcatgcccctcattctgttggttcttctgtgcactctgtacatgagaaaaatatccttgtttggcaaccatatcttccttgtctatgcggtgcccctcagtgttgcaattgtatgggcttatgcattctttctaactgctggtggagcatataacttcaaaggctgccgctcaaacatacccagttcaaacatattgttggattcatgcagaaggcatttagagaccatgaggcgctgccgtaccgatgtttctactgcgtggaaaactgctgcctgggtgagggttccctatccgttccaatggggccctccaacattccatttcaagacaggtatcatcatgataatagtttctctggttgctccagttgattcggtgtgtagtttctctcagcagaacagacactcatctgcaagtgtaaaaaaatgctttggatgcttgatggctagcgtgccttgacatggttgtgcatatgcagctttcatcgtaccatgccgcttcactgctggtaaatctaagcccaccaacacgtggagttgtcagcagagcgattgggcttgaaggggtttcaacgtttattgctggagaacgttaacagagaacatacacaccctcgaaacaaccaaaatgggcagcaggagggctttgcagcttggggcagccgtgttagtcatcttctccttctttggtaaaatcggagctctcctagcctctatacctcttgccttggccgcctctgttctgtgcttcacctgggcgctaattgtcgcgcttggtttgtccacattgcgatacacccaagcagcacgctccaggaacatgataatagttggatttaccctgttcatctccttgtcgatacccgcatactttcagcagtatgaacccagctgcaacctaatcttgcccagctatcttcttccatatgctgcagcgtcaagtgggccagttcgcacagccagcagcgggctgaactatgcagtgaacgtgctcctatccatcaacgttgtggtggctctccttgtcgcgttgatccttgacaacacagtgccaggcagcagacaagagcgcggtgtgtacatttggacagatcccaaatccctcgaggtggatcctgcgacattggaaccctaccgattgccggagaaggtttcgtgctggctcaggtgggcaaagtgtgacaaggttttgctctttctcacacaacattgaattatctcaaactcatagcagggtactttattcgccactttattcacctcataaccattagtgttcatccaaaaaataaaaaaataggggaacacacacctgaaagctgtcgatctggggtagccgaccgaaccgaggaggttggagatgcgatgtgtttgcttgcccgtggtttgagcttggatcgaggcacagacggtcaaaggcgtttacagatgctgatcttgggccgaagggaaggtggtgttggtcgtcggtgcccgcgacagtcgacggcgacgtctgctgctacctttgcggatggaaaccgacagatgcgagctggcgtccctggaccagcccgactgcccacgcctgctgcctagcttcgctgacgaagccgaccaagctcgcgcgagaccgtggttgtgggggagggtcgctagagaatcggagaaggtctagtgctcatcgaccccggatcgacatcttatccaacgagacctaggcggcacgggagggggaggcgggggataatgggccttgagcgccacgaaggactcagaggtggaagcggcggcgttggctaacggcttctcgagtgcgtcggagtgggaggagggcgagggcggggccggagggaacggggtttcgagggggggcagggcggggatgacacgacagagctctgggaggggtgcagagcggggttccatgggaagggcggggatctcgcggtggacgcgaaggcggctgccacagcggggaggcgggacgggcatcacgagcgggggcgcgcaggagcgggacgcgcgggcaggcgggcgtcgagaggcagaacatgacgcacatgtggacgcctacaatgaggacttatagagtagtagggatataaatacattctcaaaagcccccaaaaggaaaaatagaactatatgagctgatatattaatatcagcagagggagcctggataacttacggcaaggtattgaaacaggccatttagttcttgtggcttcaaataaac

SEQ ID NO: 42244 - DNA, 2723 bp, Zea Mays
ccaattgcagcactactaatattttatggcatgcaacattacctgtcaatagctggttcacttgtctttgttcctttgatactcgtacctgcaatgggtggttctgatgtatgaagctttccttcttttcttaattgcacttatttacactgaaaaccatgttattagtctctggtcttactacaatactacatacttttttgggttctcggcttccactgattcaaggaagctcctttgtatatttggctccagcgttggtaattgcgaactccgaggagttcagaaatcttagtgacaataaattcaagcacataatgagggaactacagggggctatacttgttggttcagtattccagataatattaggatacactggtcttatgtcactgtttctgaggttaataaatccagtagtggtggcaccaactattgctgcagtgggtttggcattttttagttatggtttccctcaggctggcagctgtgtagaaatcagcatgcccctcattctgttggttcttctgtgcactctgtacatgagaaaaatatccttgtttggcaaccatatcttccttgtctatgcggtgcccctcagtgttgcaattgtatgggcttatgcattctttctaactgctggtggagcatataacttcaaaggctgccgctcaaacatacccagttcaaacatattgttggattcatgcagaaggcatttagagaccatgaggcgctgccgtaccgatgtttctactgcgtggaaaactgctgcctgggtgagggttccctatccgttccaatggggccctccaacattccatttcaagacaggtatcatcatgataatagtttctctggttgctccagttgattcggtgtgtagtttctctcagcagaacagacactcatctgcaagtgtaaaaaaatgctttggatgcttgatggctagcgtgccttgacatggttgtgcatatgcagctttcatcgtaccatgccgcttcactgctggtaaatctaagcccaccaacacgtggagttgtcagcagagcgattgggcttgaaggggtttcaacgtttattgctggagaacgttaacagagaacatacacaccctcgaaacaaccaaaatgggcagcaggagggctttgcagcttggggcagccgtgttagtcatcttctccttctttggtaaaatcggagctctcctagcctctatacctcttgccttggccgcctctgttctgtgcttcacctgggcgctaattgtcgcgcttggtttgtccacattgcgatacacccaagcagcacgctccaggaacatgataatagttggatttaccctgttcatctccttgtcgatacccgcatactttcagcagtatgaacccagctgcaacctaatcttgcccagctatcttcttccatatgctgcagcgtcaagtgggccagttcgcacagccagcagcgggctgaactatgcagtgaacgtgctcctatccatcaacgttgtggtggctctccttgtcgcgttgatccttgacaacacagtgccaggcagcagacaagagcgcggtgtgtacatttggacagatcccaaatccctcgaggtggatcctgcgacattggaaccctaccgattgccggagaaggtttcgtgctggctcaggtgggcaaagtgtgacaaggttttgctctttctcacacaacattgaattatctcaaactcatagcagggtactttattcgccactttattcacctcataaccattagtgttcatccaaaaaataaaaaaataggggaacacacacctgaaagctgtcgatctggggtagccgaccgaaccgaggaggttggagatgcgatgtgtttgcttgcccgtggtttgagcttggatcgaggcacagacggtcaaaggcgtttacagatgctgatcttgggccgaagggaaggtggtgttggtcgtcggtgcccgcgacagtcgacggcgacgtctgctgctacctttgcggatggaaaccgacagatgcgagctggcgtccctggaccagcccgactgcccacgcctgctgcctagcttcgctgacgaagccgaccaagctcgcgcgagaccgtggttgtgggggagggtcgctagagaatcggagaaggtctagtgctcatcgaccccggatcgacatcttatccaacgagacctaggcggcacgggagggggaggcgggggataatgggccttgagcgccacgaaggactcagaggtggaagcggcggcgttggctaacggcttctcgagtgcgtcggagtgggaggagggcgagggcggggccggagggaacggggtttcgagggggggcagggcggggatgacacgacagagctctgggaggggtgcagagcggggttccatgggaagggcggggatctcgcggtggacgcgaaggcggctgccacagcggggaggcgggacgggcatcacgagcgggggcgcgcaggagcgggacgcgcgggcaggcgggcgtcgagaggcagaacatgacgcacatgtggacgcctacaatgaggacttatagagtagtagggatataaatacattctcaaaagcccccaaaaggaaaaatagaactatatgagctgatatattaatatcagcagagggagcctggataacttacggcaaggtattgaaacaggccatttagttcttgtggcttcaaataaac

SEQ ID NO: 42245 - DNA, 1892 bp, Zea Mays
ggagttctaccaccatcaccgcctcgtgtgcagcgtgctcgcccacctcctctgtcgacactcagggtactgacgcaccaccccgaagccctcccgccgcgctcgcagggtgttcgacccttcgcccgcgcgccctcacgacatggcctcctccgtctccgccgccgccaaggccgccgcggcgttcgcgcacaaggtgaagagcgcgatgacgatgacggagaagatactggcgcgggcgtcggagcgcgcggcgctggagcccggggagaacgtgtgggtcgacgtcgacgtgctcatgacgcacgacgtctgcgggcccggcgccttcgacatcttcaagaaggagttcggggaggacgccagggtctgggaccgcgagaagctcgtcgtcatcccggaccactacatcttcaccagcgacggccgtgccaaacgcaacgtcgacatcctcagggacttctgtgcggagcagaacatcaagtacttctatgacatcaaggacctcagcgatttcagggctaatccggactacaaaggcgtctgccacatcgcacttgctcaggaaggccactgccgaccaggcgaggttctcttgggcactgattctcatacatgcaatgctggagcttttggtcagtttgcaactggaatcggaaacactgatgcaggttttgtgttgggcactggaaaggctcttctcaaggtgccacctactatcaggtttatattagatggagagatgccgccttatttacttgcgaaggatctgattttgcaaattattggagagatttcagtatctggtgcgacctacaaatcaatggagtttgttggatcaactgtagaaagtctaaccatggaagagcgtatgacactatgcaacatggttattgaagctggtggaaagaacggtgttgtgcctgctgatgaaactacatttaaataccttgagggtaagacatcagtcgattatgaacctgtctacagtgatgctcaagccagattttttagcgactaccggtttgatgtatcaaaactggagccagtagttgccaagccacattcgcctgacaaccgtgctccagcaagagaatgcaaagatgtgaagatcgaccgagtctatattggttcttgcactggtggtaagaccgaggatttccttgctgctgcaaaggtgttcttagcctcgggaaagaaggttaaagttcccacatttcttgtccctgccacacaaaaggtgtggttggacatatatagcctccctgtaccaggatctggtggcaaaacttgctcccagatatttgaggaggctggttgtgacacaccagcaagtcctaattgtggtgcttgtttgggtggccctcgtgatacatatgcacggatgaatgaacctactgtctgcgtgtccaccacgaacaggaactttccgggcaggatgggccacaaggaagggcaaatctacctggcgtctccctacactgcggctgcctcagccctgacggggtatgttacggaccccagggacttcctcatgtaaccgtcttgaaacaacaacagatttcatgatgtaacagagtggttgtactgctgtttttcgtgctgaacttttgtctaggcatgtccttcgttgagaaataaactgcactagaataagcagcgacttctcgggagccatagcagatgtgacctcatatttatttgtgcaactttttttgtttttggctctgaagtcatgcaaggaaaccacataaaagagtgatttatgtatgtgtcagaatcaaacaataatttgatgtcaaaagctcaagatagacatagttctgtaataagaacacactacatgcagttggatgtagttggatgctcctcagggatataagtttaaccgt

SEQ ID NO: 42246 - DNA, 1237 bp, Zea Mays
cgtcgtctgtctccgtcatttctatcagacgcaagcagcagtgacgccgcgctacccgaccaaaatccgccgccggtgcccagaactcgacgggaaaaccggggctttggtcgccggacgccggctgcctcgagatgctcgtgtgggcggccaccgcgtcaccacccagcactccatccgccgtgccatttgctcctccccaccgcgccgccgctccccgccctccaccgcctctctgccgctcgctcccggggctgctgtgcgcgggcctgatccctccgccgcgcgccgccgcttctgacggcgacgtcttctgggaggagccagacgacggctccgggagcgactacgaggacgacggcccggagcaaaggagggccttgcgtttcccatcttcctcgccgtcctacaggctcgaggcgtcggcgcagcaagaacaggacctccggagagagatcgagcttctcctaacgcctgaagaaaaggctactttggaccagcatgagacccctgacgtcactagaatatcatcacccaagtggcacccacttcatagctacgcgttggcactgcagatacccctcatggacaagcttctgaacagcggtgttgacatcaacttagttgatagagatggcttcacctctcttcacaaggctgtcatagggaaaaaagaggctgtcattagccatctcctaagaaaaggggcaaatccccatgttagagatagggatggagccacaccattacattatgctgttcaagctggtgccctgcaaaccgtgaagttactgattaagtacaaggttgatgtcaatgttgccgataatgatggatggacaccactccatttagccatacagagtaggaatagagatatagctaaggtcttgcttgtcaatggtgcggataagacaagaagaaccaaggatgggaggactgcgctggatctaagtctatgctttggaagggatttcaagtcatatgatcttgcaaagcttgtcaagcttattccagcaaacagagatttcagtgtccatggtctgtagcctgttcgacgtgactcgaaaaatgatgatgtacatgcaacagtcctccagctgttgtgttcagttgttttgttcaatatgggccagggccaccaaaacaagatctgaattgtaactgttattaaccttcagcatatgtgtacacattatcgttttggccaaacagtatcacccagtccattgatctc

SEQ ID NO: 42247 - DNA, 1059 bp, Zea Mays
acacggcatctactagtagtactagaagatgcgccacgatgccctctccttcccccttccccgcttcgacaagtctcgtcccccgcccccttattccattacgagcaactccgccgccgccgtaaagccatctcccccatccgccgccgccgccaccgctgctggtgggacgggccgtgcgtccgttccagcgaagaggagcagcgggtcggaggagccgccggcgaggtcgggccgcgggggatcgagatggtgctgtgggagctcacggccatcaccgcctacttcctcgggctgaggcgcacctaccgcctcgcgctccgcatccagcgccgcctcatcccgcccaaccaccccaggatccgggacttcgtctacaggcgcacacgggatgtcttcaacgtcgcagtgtcggtccacaagaacattcagcagagagacatagaggtcggccggaacctcggaaacgcgatccttcgctggcttgatcgcatgaagccatcagcggagatccgcccccgtcttccaggcccaccaaacggcagcacggccgagcagttcagacatgtatcgagcgcgagcaggggcgcgggggcacagaagacctcctcctcctccaaagcttcgccccacgactccagcgggaagatgctgttctcgcgcctcaacattgggcccaagcacttcccggttctgcccacgctagcacagcccaacaggatcagcgcgagcagccagtgcaggcgcttctcctactcctacgccccgttcccgtcggtcactgccaggaggaagggtgtcttccgcgaggacattgcacagctgatggtatcagatgtctgatgtgtcttggtttaataataaagaagcgagcgagcgcaggggaaattgtcactgctgctgcggtttaggccattagatttgtaaccaaatgctcagatgaacagcatttcgtgtttggtaatgaacaccagaacatgtgcactcgtttatgtgctaccctttgtctgtttcttttgaaattcttgtatttccggtgcgttgcattgcattgcatct

SEQ ID NO: 42248 - DNA, 791 bp, Zea Mays
ttcaccttcgcttccccttgttccttcagtagcgcacacgggatgtcttcaacgtcgcagtgtcggtccacaagaacattcagcagagagacatagaggtcggccggaacctcggaaacgcgatccttcgctggcttgatcgcatgaagccatcagcggagatccgcccccgtcttccaggcccaccaaacggcagcacggccgagcagttcagacatgtatcgagcgcgagcaggggcgcgggggcacagaagacctcctcctcctccaaagcttcgccccacgactccagcgggaagatgctgttctcgcgcctcaacattgggcccaagcacttcccggttctgcccacgctagcacagcccaacaggatcagcgcgagcagccagtgcaggcgcttctcctactcctacgccccgttcccgtcggtcactgccaggaggaagggtgtcttccgcgaggacattgcacagctgatggtgtaaggatctaaaatacttgccagcgatctcgtgtactgttttttttgtttttggaacactggacttagtgatttgcccagatcagatgtctgatgtgtcttggtttaataataaagaagcgagcgagcgcaggggaaattgtcactgctgctgcggtttaggccattagatttgtaaccaaatgctcagatgaacagcatttcgtgtttggtaatgaacaccagaacatgtgcactcgtttatgtgctaccctttgtctgtttcttttgaaattcttgtatttccggtgcgttgcattgcattgcatct

SEQ ID NO: 42249 - DNA, 2216 bp, Zea Mays
gacaaaatatcgattttttccacccccacaggccacacccaacccaacccagagcccgaactcttcacgtcgcgtcggccggcaattggcattcccactgcgccgccgtcggatcgactgggtcctcgccgccgatgggcttcttccgccggatcgccggcttcctaggcatctcgcgggacgacgccgaccacccggactccccgacctccgtcggcggcgccgcggcggcggcggaactccctcatgacagggcggcggcgcacggggtgaggcaggggttcagcgtcaaggttcctgtccatgtcgagcggcaggtgttggtgtttcggttgcaatagagtgattggggaaactgatcagccagaattgttggtcaaccgatgggaagcaatgaccctaacacaccctcgaaggcttcaaaggcgtcagaacaactaccaccacatccagtggaacagcttcagtgtaccctgaatggcccagctttcaggcctactcagcaattccaccgcatgcgttcttcccccctaccgttgctgcaaatccacaggcccatccatacatgtggggggctcaggtgcttcctatatctgaaactttgcccccagggcccccctctgttctctgctacaactgttaacgttgatctgtattatgtgttatatattgcgagaacatgtgatttttcatatgtgatcgaaagcaatgtccttcgattgcagcccatagtgccaccttacgggacaccgccaccaccaccttatgtgatgtatccacctggaacagtatatgcccatccctctacacctcctgtatgcactttttatgcctaacaaatttgacctacatgctagctaatgtacacacacacacccttttatccttgtttggctgacatatttttttgcatggtgagtaaattactggcaggccatgcatccatttggccattatcctatgccaacaaatgggcatgctgaaactcatggagctgcgccaagcgctccggaaatgaatgggaaaagcgagcctggcagaacgtctgctccatccgccaacgggattacctcgcacagtgagagtggaagcgagagtgagagcgaaggaagtgacgacaattctcaaaacgattcacactcaaaggacaatgatgggaaggaagatggcaattctcagaacggcatgtcttattcaggatcgcaaggagtggtaaaccaaaccatggcgatgcttccaatgcaaccgggtgcaatggtcggaggagttcctagctccacggcagctaacctgaatatcggagtggactactgggcagctccgggttctgcggctgtccccgcagcgcacggcaaagcgccagctggttcagctcgaggagaccaatgggatgaaagggagctcaagaagcagaagcggaagcagtcaaacagagagtccgctcgcagatcccggctgcgcaaacaggctgagtgtgaggagcttgggcaacgtgctgaggctctgaggtcggagaactcgtcgctgagggccgagctcgagcggatcagaaaggagtacgaacagctactttcacagaacgcttccctaaaggaaaagctgggggctgccagtagtgattcgcttcctgatatgaacgaacagaacgacggcgacggagacggcggctacaggaagcagcctgattccgatggccaccagcctgggagcgagtcctgacccgtttttagctcaggattcttttggaatgcacattgcttatatattcattctcttgaacgttgtggaacgcagcataggaaggaaatccaactttaattagaatcgattcgctgtcatccctcatgcatggccggagaggggagagggttctcttcttccttggatgttggatacaccgacagtcacgtgcatggcaagagcagaagctagcagctgcggcgactcagggcagcgagcgtttgactggctggggtgcttgctgatatgctcaacacatgaagcagcagcagcctggagcgccagacattcctgactgagtgactgctcatcacgaccagagccaaatccaaatggaataaaaaaaacacacacacactacgtgcagcaatatcagctctccttttctttgtccatgaaaggaaaaacaacgtcacgggaacaattgcggtcagcttttctggaccgtccaccatgccttcatttcaaattcgaca

SEQ ID NO: 42250 - DNA, 1982 bp, Zea Mays
gacaaaatatcgattttttccacccccacaggccacacccaacccaacccagagcccgaactcttcacgtcgcgtcggccggcaattggcattcccactgcgccgccgtcggatcgactgggtcctcgccgccgatgggcttcttccgccggatcgccggcttcctaggcatctcgcgggacgacgccgaccacccggactccccgacctccgtcggcggcgccgcggcggcggcggaactccctcatgacagggcggcggcgcacggggtgaggcaggggttcagcgtcaaggttcctgtccatgtcgagcggcaggtgttggtgtttcggttgcaatagagtgattggggaaactgatcagccagaattgttggtcaaccgatgggaagcaatgaccctaacacaccctcgaaggcttcaaaggcgtcagaacaagatcaacctccagctaccaccacatccagtggaacagcttcagtgtaccctgaatggcccagctttcaggcctactcagcaattccaccgcatgcgttcttcccccctaccgttgctgcaaatccacaggcccatccatacatgtggggggctcagcccatagtgccaccttacgggacaccgccaccaccaccttatgtgatgtatccacctggaacagtatatgcccatccctctacacctcctgccatgcatccatttggccattatcctatgccaacaaatgggcatgctgaaactcatggagctgcgccaagcgctccggaaatgaatggtgcgtcttttccaagggaaaagcgagcctggcagaacgtctgctccatccgccaacgggattacctcgcacagtgagagtggaagcgagagtgagagcgaaggaagtgacgacaattctcaaaacgattcacactcaaaggacaatgatgggaaggaagatggcaattctcagaacggcatgtcttattcaggatcgcaaggagtggtaaaccaaaccatggcgatgcttccaatgcaaccgggtgcaatggtcggaggagttcctagctccacggcagctaacctgaatatcggagtggactactgggcagctccgggttctgcggctgtccccgcagcgcacggcaaagcgccagctggttcagctcgaggagaccaatgggatgaaagggagctcaagaagcagaagcggaagcagtcaaacagagagtccgctcgcagatcccggctgcgcaaacaggctgagtgtgaggagcttgggcaacgtgctgaggctctgaggtcggagaactcgtcgctgagggccgagctcgagcggatcagaaaggagtacgaacagctactttcacagaacgcttccctaaaggaaaagctgggggctgccagtagtgattcgcttcctgatatgaacgaacagaacgacggcgacggagacggcggctacaggaagcagcctgattccgatggccaccagcctgggagcgagtcctgacccgtttttagctcaggattcttttggaatgcacattgcttatatattcattctcttgaacgttgtggaacgcagcataggaaggaaatccaactttaattagaatcgattcgctgtcatccctcatgcatggccggagaggggagagggttctcttcttccttggatgttggatacaccgacagtcacgtgcatggcaagagcagaagctagcagctgcggcgactcagggcagcgagcgtttgactggctggggtgcttgctgatatgctcaacacatgaagcagcagcagcctggagcgccagacattcctgactgagtgactgctcatcacgaccagagccaaatccaaatggaataaaaaaaacacacacacactacgtgcagcaatatcagctctccttttctttgtccatgaaaggaaaaacaacgtcacgggaacaattgcggtcagcttttctggaccgtccaccatgccttcatttcaaattcgaca

SEQ ID NO: 42251 - DNA, 1275 bp, Zea Mays
atcttcctcctcctcccctactctgacctctcgtcgtcgacgaaggaaggattccgcccccgccccggccgccttcgccctcgccgctgcattttccggtggcctctccacgtgcggccgcgagacgcctcgcctgcctagttgtctcccggggggggggggggggggggggctgggacttgtgaggcgagaagccttacacctgttctgttcaagacggcaggtgttggtgtttcggttgcaatagagtgattggggaaactgatcagccagaattgttggtcaaccgatgggaagcaatgaccctaacacaccctcgaaggcttcaaaggcgtcagaacaagatcaacctccagctaccaccacatccagtggaacagcttcagtgtaccctgaatggcccagctttcaggcctactcagcaattccaccgcatgcgttcttcccccctaccgttgctgcaaatccacaggcccatccatacatgtggggggctcagcccatagtgccaccttacgggacaccgccaccaccaccttatgtgatgtatccacctggaacagtatatgcccatccctctacacctcctgccatgcatccatttggccattatcctatgccaacaaatgggcatgctgaaactcatggagctgcgccaagcgctccggaaatgaatgggaaaagcgagcctggcagaacgtctgctccatccgccaacgggattacctcgcacagtgagagtggaagcgagagtgagagcgaaggaagtgacgacaattctcaaaacgattcacactcaaaggacaatgatgggaaggaagatggcaattctcagaacggcatgtcttattcaggatcgcaaggagtggtaaaccaaaccatggcgatgcttccaatgcaaccgggtgcaatggtcggaggagttcctagctccacggcagctaacctgaatatcggagtggactactgggcagctccgggttctgcggctgtccccgcagcgcacggcaaagcgccagctggttcagctcgaggagaccaatgggatgaaagggagctcaagaagcagaagcggaagcagtcaaacagagagtccgctcgcagatcccggctgcgcaaacaggctgagtgtgaggagcttgggcaacgtgctgaggctctgaggtcggagaactcgtcgctgagggccgagctcgagcggatcagaaaggagtacgaacagctactttcacagaacgcttccctaaagatgttcattttttttcctctgcaaaa

SEQ ID NO: 42252 - DNA, 1888 bp, Zea Mays
atcttcctcctcctcccctactctgacctctcgtcgtcgacgaaggaaggattccgcccccgccccggccgccttcgccctcgccgctgcattttccggtggcctctccacgtgcggccgcgagacgcctcgcctgcctagttgtctcccggggggggggggggggggggggctgggacttgtgaggcgagaagccttacacctgttctgttcaagacggcaggtgttggtgtttcggttgcaatagagtgattggggaaactgatcagccagaattgttggtcaaccgatgggaagcaatgaccctaacacaccctcgaaggcttcaaaggcgtcagaacaagatcaacctccagctaccaccacatccagtggaacagcttcagtgtaccctgaatggcccagctttcaggcctactcagcaattccaccgcatgcgttcttcccccctaccgttgctgcaaatccacaggcccatccatacatgtggggggctcagcccatagtgccaccttacgggacaccgccaccaccaccttatgtgatgtatccacctggaacagtatatgcccatccctctacacctcctgccatgcatccatttggccattatcctatgccaacaaatgggcatgctgaaactcatggagctgcgccaagcgctccggaaatgaatggtgcgtcttttccaagggaaaagcgagcctggcagaacgtctgctccatccgccaacgggattacctcgcacagtgagagtggaagcgagagtgagagcgaaggaagtgacgacaattctcaaaacgattcacactcaaaggacaatgatgggaaggaagatggcaattctcagaacggcatgtcttattcaggatcgcaaggagtggtaaaccaaaccatggcgatgcttccaatgcaaccgggtgcaatggtcggaggagttcctagctccacggcagctaacctgaatatcggagtggactactgggcagctccgggttctgcggctgtccccgcagcgcacggcaaagcgccagctggttcagctcgaggagaccaatgggatgaaagggagctcaagaagcagaagcggaagcagtcaaacagagagtccgctcgcagatcccggctgcgcaaacaggctgagtgtgaggagcttgggcaacgtgctgaggctctgaggtcggagaactcgtcgctgagggccgagctcgagcggatcagaaaggagtacgaacagctactttcacagaacgcttccctaaaggaaaagctgggggctgccagtagtgattcgcttcctgatatgaacgaacagaacgacggcgacggagacggcggctacaggaagcagcctgattccgatggccaccagcctgggagcgagtcctgacccgtttttagctcaggattcttttggaatgcacattgcttatatattcattctcttgaacgttgtggaacgcagcataggaaggaaatccaactttaattagaatcgattcgctgtcatccctcatgcatggccggagaggggagagggttctcttcttccttggatgttggatacaccgacagtcacgtgcatggcaagagcagaagctagcagctgcggcgactcagggcagcgagcgtttgactggctggggtgcttgctgatatgctcaacacatgaagcagcagcagcctggagcgccagacattcctgactgagtgactgctcatcacgaccagagccaaatccaaatggaataaaaaaaacacacacacactacgtgcagcaatatcagctctccttttctttgtccatgaaaggaaaaacaacgtcacgggaacaattgcggtcagcttttctggaccgtccaccatgccttcatttcaaattcgaca

SEQ ID NO: 42253 - DNA, 1793 bp, Zea Mays
atcttcctcctcctcccctactctgacctctcgtcgtcgacgaaggaaggattccgcccccgccccggccgccttcgccctcgccgctgcattttccggtggcctctccacgaagccttacacctgttctgttcaagacggcaggtgttggtgtttcggttgcaatagagtgattggggaaactgatcagccagaattgttggtcaaccgatgggaagcaatgaccctaacacaccctcgaaggcttcaaaggcgtcagaacaagatcaacctccagctaccaccacatccagtggaacagcttcagtgtaccctgaatggcccagctttcaggcctactcagcaattccaccgcatgcgttcttcccccctaccgttgctgcaaatccacaggcccatccatacatgtggggggctcagcccatagtgccaccttacgggacaccgccaccaccaccttatgtgatgtatccacctggaacagtatatgcccatccctctacacctcctgccatgcatccatttggccattatcctatgccaacaaatgggcatgctgaaactcatggagctgcgccaagcgctccggaaatgaatgggaaaagcgagcctggcagaacgtctgctccatccgccaacgggattacctcgcacagtgagagtggaagcgagagtgagagcgaaggaagtgacgacaattctcaaaacgattcacactcaaaggacaatgatgggaaggaagatggcaattctcagaacggcatgtcttattcaggatcgcaaggagtggtaaaccaaaccatggcgatgcttccaatgcaaccgggtgcaatggtcggaggagttcctagctccacggcagctaacctgaatatcggagtggactactgggcagctccgggttctgcggctgtccccgcagcgcacggcaaagcgccagctggttcagctcgaggagaccaatgggatgaaagggagctcaagaagcagaagcggaagcagtcaaacagagagtccgctcgcagatcccggctgcgcaaacaggctgagtgtgaggagcttgggcaacgtgctgaggctctgaggtcggagaactcgtcgctgagggccgagctcgagcggatcagaaaggagtacgaacagctactttcacagaacgcttccctaaaggaaaagctgggggctgccagtagtgattcgcttcctgatatgaacgaacagaacgacggcgacggagacggcggctacaggaagcagcctgattccgatggccaccagcctgggagcgagtcctgacccgtttttagctcaggattcttttggaatgcacattgcttatatattcattctcttgaacgttgtggaacgcagcataggaaggaaatccaactttaattagaatcgattcgctgtcatccctcatgcatggccggagaggggagagggttctcttcttccttggatgttggatacaccgacagtcacgtgcatggcaagagcagaagctagcagctgcggcgactcagggcagcgagcgtttgactggctggggtgcttgctgatatgctcaacacatgaagcagcagcagcctggagcgccagacattcctgactgagtgactgctcatcacgaccagagccaaatccaaatggaataaaaaaaacacacacacactacgtgcagcaatatcagctctccttttctttgtccatgaaaggaaaaacaacgtcacgggaacaattgcggtcagcttttctggaccgtccaccatgccttcatttcaaattcgaca

SEQ ID NO: 42254 - DNA, 1616 bp, Zea Mays
atcttcctcctcctcccctactctgacctctcgtcgtcgacgaaggaaggattccgcccccgccccggccgccttcgccctcgccgctgcattttccggtggcctctccacgaagccttacacctgttctgttcaagacggcaggtgttggtgtttcggttgcaatagagtgattggggaaactgatcagccagaattgttggtcaaccgatgggaagcaatgaccctaacacaccctcgaaggcttcaaaggcgtcagaacaagatcaacctccagctaccaccacatccagtggaacagcttcagtgtaccctgaatggcccagctttcaggccatgcatccatttggccattatcctatgccaacaaatgggcatgctgaaactcatggagctgcgccaagcgctccggaaatgaatgggaaaagcgagcctggcagaacgtctgctccatccgccaacgggattacctcgcacagtgagagtggaagcgagagtgagagcgaaggaagtgacgacaattctcaaaacgattcacactcaaaggacaatgatgggaaggaagatggcaattctcagaacggcatgtcttattcaggatcgcaaggagtggtaaaccaaaccatggcgatgcttccaatgcaaccgggtgcaatggtcggaggagttcctagctccacggcagctaacctgaatatcggagtggactactgggcagctccgggttctgcggctgtccccgcagcgcacggcaaagcgccagctggttcagctcgaggagaccaatgggatgaaagggagctcaagaagcagaagcggaagcagtcaaacagagagtccgctcgcagatcccggctgcgcaaacaggctgagtgtgaggagcttgggcaacgtgctgaggctctgaggtcggagaactcgtcgctgagggccgagctcgagcggatcagaaaggagtacgaacagctactttcacagaacgcttccctaaaggaaaagctgggggctgccagtagtgattcgcttcctgatatgaacgaacagaacgacggcgacggagacggcggctacaggaagcagcctgattccgatggccaccagcctgggagcgagtcctgacccgtttttagctcaggattcttttggaatgcacattgcttatatattcattctcttgaacgttgtggaacgcagcataggaaggaaatccaactttaattagaatcgattcgctgtcatccctcatgcatggccggagaggggagagggttctcttcttccttggatgttggatacaccgacagtcacgtgcatggcaagagcagaagctagcagctgcggcgactcagggcagcgagcgtttgactggctggggtgcttgctgatatgctcaacacatgaagcagcagcagcctggagcgccagacattcctgactgagtgactgctcatcacgaccagagccaaatccaaatggaataaaaaaaacacacacacactacgtgcagcaatatcagctctccttttctttgtccatgaaaggaaaaacaacgtcacgggaacaattgcggtcagcttttctggaccgtccaccatgccttcatttcaaattcgaca

SEQ ID NO: 42255 - DNA, 1760 bp, Zea Mays
atcttcctcctcctcccctactctgacctctcgtcgtcgacgaaggaaggattccgcccccgccccggccgccttcgccctcgccgctgcattttccggtggcctctccacgtgttggtgtttcggttgcaatagagtgattggggaaactgatcagccagaattgttggtcaaccgatgggaagcaatgaccctaacacaccctcgaaggcttcaaaggcgtcagaacaagatcaacctccagctaccaccacatccagtggaacagcttcagtgtaccctgaatggcccagctttcaggcctactcagcaattccaccgcatgcgttcttcccccctaccgttgctgcaaatccacaggcccatccatacatgtggggggctcagcccatagtgccaccttacgggacaccgccaccaccaccttatgtgatgtatccacctggaacagtatatgcccatccctctacacctcctgccatgcatccatttggccattatcctatgccaacaaatgggcatgctgaaactcatggagctgcgccaagcgctccggaaatgaatgggaaaagcgagcctggcagaacgtctgctccatccgccaacgggattacctcgcacagtgagagtggaagcgagagtgagagcgaaggaagtgacgacaattctcaaaacgattcacactcaaaggacaatgatgggaaggaagatggcaattctcagaacggcatgtcttattcaggatcgcaaggagtggtaaaccaaaccatggcgatgcttccaatgcaaccgggtgcaatggtcggaggagttcctagctccacggcagctaacctgaatatcggagtggactactgggcagctccgggttctgcggctgtccccgcagcgcacggcaaagcgccagctggttcagctcgaggagaccaatgggatgaaagggagctcaagaagcagaagcggaagcagtcaaacagagagtccgctcgcagatcccggctgcgcaaacaggctgagtgtgaggagcttgggcaacgtgctgaggctctgaggtcggagaactcgtcgctgagggccgagctcgagcggatcagaaaggagtacgaacagctactttcacagaacgcttccctaaaggaaaagctgggggctgccagtagtgattcgcttcctgatatgaacgaacagaacgacggcgacggagacggcggctacaggaagcagcctgattccgatggccaccagcctgggagcgagtcctgacccgtttttagctcaggattcttttggaatgcacattgcttatatattcattctcttgaacgttgtggaacgcagcataggaaggaaatccaactttaattagaatcgattcgctgtcatccctcatgcatggccggagaggggagagggttctcttcttccttggatgttggatacaccgacagtcacgtgcatggcaagagcagaagctagcagctgcggcgactcagggcagcgagcgtttgactggctggggtgcttgctgatatgctcaacacatgaagcagcagcagcctggagcgccagacattcctgactgagtgactgctcatcacgaccagagccaaatccaaatggaataaaaaaaacacacacacactacgtgcagcaatatcagctctccttttctttgtccatgaaaggaaaaacaacgtcacgggaacaattgcggtcagcttttctggaccgtccaccatgccttcatttcaaattcgaca

SEQ ID NO: 42256 - DNA, 2589 bp, Zea Mays
cagcagcttgcggttgcgggcaagcggcgcctgtagctcgcgggctcagatcggcgccggcgccggcgggtggaagcgacccagggccatgaagcacccgctgcaccgcgacggggagtcgtacccgtcacctccgccgcagcggcggccgcgcgggttcgcctccgctcccgctcccgcggcgggggcttcgccgcggaggcgaggtgtgcaggagcgggagcgggagcgggagaaggagcggacgaagctgcgggagcggcaccggcgcgccatcactggccgcatgctggccgggctccggcagcacggcaacttcccgctccccgcgcgcgccgacatgaacgacgtcctcgccgccctcgcccgcgccgccggctggaccgtgcaacccgatggcaccaccttccgctcctccaaccaaccactcctgcctcctcctccccagctgcacggagcattccaggttgcttctgtggaaaccccagctttgatcaacactctgagcagttatgccatcgggacaccattagattctcaggcatcagccctacaaacagatgacagtctgtcaccatcatcactggactcagttgtggcagaccgacgcataaagactgagaaccacgggaattccagttcagtcagctctctcaactgtatggacaatgatcagcagttaacgagatcagtattattccccgatgattacacgaaaactccatatataccagtttatgcttctttgcctatgggtattattaatagtcactgtcaattagtggacccagagagtgtacgcgctgagctaaggcaactgaagtctctgaacgtggacggggttgttgttgactgttggtgggggattgtagaagcctggactcctcggaaatatgaatggtctggttacagggacctttttggtataattaaagagttcaagctgaaagttcaggttgtattgtcatttcatgggtctggagagactggatctggtgatgtgttaatctctctcccaaagtggatcatggaaattgcaaaagagaaccaggatatattttttacagaccgcgaaggtagaagaaacacagaatgcctttcctgggggattgacaaagaacgagtccttcgtgggagaactggcattgaggtctgttttgatttcatgaggagtttccatatggaattcagaaacttatctgaagagggccttgtttcttctatcgaaattggattgggtgcttcaggggagctaagatatccttcatgtccagaaacaatgggctggaaatatcctggtattggtgagtttcaggtacatgcaaaagaatctacggcaatcagcattgtcccggggtcatttgttttgggcacgagggcctgataacgctggctattataattcaagaccacatgaaactggctttttttgtgatggaggcgactatgacagctactatggacgttttttccttaactggtactctggagtcctcatggatcatgtcgatcaggtgctgtcgcttgctactcttgcatttgatggtgcagaaatagttgtgaaggttccatctatctactggtggtacaggactgcgagccacgccgcagagctcacagcggggttctacaacactacgaacagagacggatactctccagttttcagaatgctcaagaagcactctgtgatccttaagctcgtctgctacggacccgagtacacagttcacgagaaggacgacgacgaagcgtttgcggatccggaaggtctaacctggcaggtcatcaacgcggcgtgggatcagggactaccgctctgtatcgagagcgctcttccgtgccgtaatggtgaggcgtattcccgcatcctcgacacggcgaagcctagggacgatcctgatcgtcaccatgccgcgtcctttgcgtaccgtcagcagcagcagcccccgctccgagaagcttgcctttcggagctctgcaccttcgtaaagtgcatgcacggggaggctccccagaatggggaaggttgaatctggttagcaactgatgcgctggctcgacaatacggaagaaaccaagtaggtgggtttcggatttgagccgcttttgaaggcgtccggcgagcgaacattctgatactgctaggtcctattcagttggttccatctcgtcgtcagccgtctgccctgttactcgtcggctggactgagcagacatggaggatatagtggagctctgcaggataatagagtggcaatgcccactcaggtgacctaaaaaatggccggccggagccaaaaaaaaaaaaaaaaagcttgctcgttgaagctggttaatccagttggtatttaaacgagagacgtttacgagagcagcccatgtgatgcgggatgaatgctggtcacagtcctcctcttctttcctgcccagtccagttccagtctgtgtgccccatgggatggccgtggaaagcaacagtaatggcttgcgcttgccagcccagtggggagggcatcttaaacttaactactgaatttgtataatataatggtattaaacaagtatggtatcatctttatgttatat

SEQ ID NO: 42257 - DNA, 2248 bp, Zea Mays
gggcaagcggcgcctgtagctcgcgggctcagatcggcgccggcgccggcgggtggaagcgacccagggccatgaagcacccgctgcaccgcgacggggagtcgtacccgtcacctccgccgcagcggcggccgcgcgggttcgcctccgctcccgctcccgcggcgggggcttcgccgcggaggcgaggtgtgcaggagcgggagcgggagcgggagaaggagcggacgaagctgcgggagcggcaccggcgcgccatcactggccgcatgctggccgggctccggcagcacggcaacttcccgctccccgcgcgcgccgacatgaacgacgtcctcgccgccctcgcccgcgccgccggctggaccgtgcaacccgatggcaccaccttccgctcctccaaccaaccactcctgcctcctcctccccagctgcacggagcattccaggttgcttctgtggaaaccccagctttgatcaacactctgagcagttatgccatcgggacaccattagattctcaggcatcagccctacaaacagatgacagtctgtcaccatcatcactggactcagttgtggcagaccgacgcataaagactgagaaccacgggaattccagttcagtcagctctctcaactgtatggacaatgatcagcagttaacgagatcagtattattccccgatgattacacgaaaactccatatataccagtttatgcttctttgcctatgggtattattaatagtcactgtcaattagtggacccagagagtgtacgcgctgagctaaggcaactgaagtctctgaacgtggacggggttgttgttgactgttggtgggggattgtagaagcctggactcctcggaaatatgaatggtctggttacagggacctttttggtataattaaagagttcaagctgaaagttcaggttgtattgtcatttcatgggtctggagagactggatctggtgatgtgttaatctctctcccaaagtggatcatggaaattgcaaaagagaaccaggatatattttttacagaccgcgaaggtagaagaaacacagaatgcctttcctgggggattgacaaagaacgagtccttcgtgggagaactggcattgaggtattgggtcacacttggtctgttttgatttcatgaggagtttccatatggaattcagaaacttatctgaagagggccttgtttcttctatcgaaattggattgggtgcttcaggggagctaagatatccttcatgtccagaaacaatgggctggaaatatcctggtattggtgagtttcaggtacatgcaaaagaatctacggcaatcagcattgtcccggggtcatttgttttgggcacgagggcctgataacgctggctattataattcaagaccacatgaaactggctttttttgtgatggaggcgactatgacagctactatggacgttttttccttaactggtactctggagtcctcatggatcatgtcgatcaggtgctgtcgcttgctactcttgcatttgatggtgcagaaatagttgtgaaggttccatctatctactggtggtacaggactgcgagccacgccgcagagctcacagcggggttctacaacactacgaacagagacggatactctccagttttcagaatgctcaagaagcactctgtgatccttaagctcgtctgctacggacccgagtacacagttcacgagaaggacgacgacgaagcgtttgcggatccggaaggtctaacctggcaggtcatcaacgcggcgtgggatcagggactaccgctctgtatcgagagcgctcttccgtgccgtaatggtgaggcgtattcccgcatcctcgacacggcgaagcctagggacgatcctgatcgtcaccatgccgcgtcctttgcgtaccgtcagcagcagcagcccccgctccgagaagcttgcctttcggagctctgcaccttcgtaaagtgcatgcacggggaggctccccagaatggggaaggttgaatctggttagcaactgatgcgctggctcgacaatacggaagaaaccaagtaggtgggtttcggatttgagccgcttttgaaggcgtccggcgagcgaacattctgatactgctaggtcctattcagttggttccatctcgtcgtcagccgtctgccctgttactcgtcggctggactgagcagtcataagaatttggtaggcacggagtagacag

SEQ ID NO: 42258 - DNA, 2573 bp, Zea Mays
atgaagcacccgctgcaccgcgacggggagtcgtacccgtcacctccgccgcagcggcggccgcgcgggttcgcctccgctcccgctcccgcggcgggggcttcgccgcggaggcgaggtgtgcaggagcgggagcgggagcgggagaaggagcggacgaagctgcgggagcggcaccggcgcgccatcactggccgcatgctggccgggctccggcagcacggcaacttcccgctccccgcgcgcgccgacatgaacgacgtcctcgccgccctcgcccgcgccgccggctggaccgtgcaacccgatggcaccaccttccgctcctccaaccaaccactcctgcctcctcctccccagctgcacggagcattccaggttgcttctgtggaaaccccagctttgatcaacactctgagcagttatgccatcgggacaccattagattctcaggcatcagccctacaaacagatgacagtctgtcaccatcatcactggactcagttgtggcagaccgacgcataaagactgagaaccacgggaattccagttcagtcagctctctcaactgtatggacaatgatcagcagttaacgagatcagtattattccccgatgattacacgaaaactccatatataccagtttatgcttctttgcctatgggtattattaatagtcactgtcaattagtggacccagagagtgtacgcgctgagctaaggcaactgaagtctctgaacgtggacggggttgttgttgactgttggtgggggattgtagaagcctggactcctcggaaatatgaatggtctggttacagggacctttttggtataattaaagagttcaagctgaaagttcaggttgtattgtcatttcatgggtctggagagactggatctggtgatgtgttaatctctctcccaaagtggatcatggaaattgcaaaagagaaccaggatatattttttacagaccgcgaaggtagaagaaacacagaatgcctttcctgggggattgacaaagaacgagtccttcgtgggagaactggcattgaggtctgttttgatttcatgaggagtttccatatggaattcagaaacttatctgaagagggccttgtttcttctatcgaaattggattgggtgcttcaggggagctaagatatccttcatgtccagaaacaatgggctggaaatatcctggtattggtgagtttcagtgttatgacaggtacatgcaaaagaatctacggcaatcagcattgtcccggggtcatttgttttgggcacgagggcctgataacgctggctattataattcaagaccacatgaaactggctttttttgtgatggaggcgactatgacagctactatggacgttttttccttaactggtactctggagtcctcatggatcatgtcgatcaggtgctgtcgcttgctactcttgcatttgatggtgcagaaatagttgtgaaggttccatctatctactggtggtacaggactgcgagccacgccgcagagctcacagcggggttctacaacactacgaacagagacggatactctccagttttcagaatgctcaagaagcactctgtgatccttaagctcgtctgctacggacccgagtacacagttcacgagaaggacgacgacgaagcgtttgcggatccggaaggtctaacctggcaggtcatcaacgcggcgtgggatcagggactaccgctctgtatcgagagcgctcttccgtgccgtaatggtgaggcgtattcccgcatcctcgacacggcgaagcctagggacgatcctgatcgtcaccatgccgcgtcctttgcgtaccgtcagcagcagcagcccccgctccgagaagcttgcctttcggagctctgcaccttcgtaaagtgcatgcacgaatggggaaggttgaatctggttagcaactgatgcgctggctcgacaatacggaagaaaccaagtaggtgggtttcggatttgagccgcttttgaaggcgtccggcgagcgaacattctgatactgctaggtcctattcagttggttccatctcgtcgtcagccgtctgccctgttactcgtcggctggactgagcaggtgcgtttgcagttgcagccttaccatatagcttataactttgtggtaagttagcatacctgcatgctgtaacagacatggaggatatagtggagctctgcaggataatagagtggcaatgcccactcaggtgacctaaaaaatggccggccggagccaaaaaaaaaaaaaaaaagcttgctcgttgaagctggttaatccagttggtatttaaacgagagacgtttacgagagcagcccatgtgatgcgggatgaatgctggtcacagtcctcctcttctttcctgcccagtccagttccagtctgtgtgccccatgggatggccgtggaaagcaacagtaatggcttgcgcttgccagcccagtggggagggcatcttaaacttaactactgaatttgtataatataatggtattaaacaagtatggtatcatctttatgttatat

SEQ ID NO: 42259 - DNA, 2604 bp, Zea Mays
atgaagcacccgctgcaccgcgacggggagtcgtacccgtcacctccgccgcagcggcggccgcgcgggttcgcctccgctcccgctcccgcggcgggggcttcgccgcggaggcgaggtgtgcaggagcgggagcgggagcgggagaaggagcggacgaagctgcgggagcggcaccggcgcgccatcactggccgcatgctggccgggctccggcagcacggcaacttcccgctccccgcgcgcgccgacatgaacgacgtcctcgccgccctcgcccgcgccgccggctggaccgtgcaacccgatggcaccaccttccgctcctccaaccaaccactcctgcctcctcctccccagctgcacggagcattccaggttgcttctgtggaaaccccagctttgatcaacactctgagcagttatgccatcgggacaccattagattctcaggcatcagccctacaaacagatgacagtctgtcaccatcatcactggactcagttgtggcagaccgacgcataaagactgagaaccacgggaattccagttcagtcagctctctcaactgtatggacaatgatcagcagttaacgagatcagtattattccccgatgattacacgaaaactccatatataccagtttatgcttctttgcctatgggtattattaatagtcactgtcaattagtggacccagagagtgtacgcgctgagctaaggcaactgaagtctctgaacgtggacggggttgttgttgactgttggtgggggattgtagaagcctggactcctcggaaatatgaatggtctggttacagggacctttttggtataattaaagagttcaagctgaaagttcaggttgtattgtcatttcatgggtctggagagactggatctggtgatgtgttaatctctctcccaaagtggatcatggaaattgcaaaagagaaccaggatatattttttacagaccgcgaaggtagaagaaacacagaatgcctttcctgggggattgacaaagaacgagtccttcgtgggagaactggcattgaggtattgggtcacacttggtctgttttgatttcatgaggagtttccatatggaattcagaaacttatctgaagagggccttgtttcttctatcgaaattggattgggtgcttcaggggagctaagatatccttcatgtccagaaacaatgggctggaaatatcctggtattggtgagtttcagtgttatgacaggtacatgcaaaagaatctacggcaatcagcattgtcccggggtcatttgttttgggcacgagggcctgataacgctggctattataattcaagaccacatgaaactggctttttttgtgatggaggcgactatgacagctactatggacgttttttccttaactggtactctggagtcctcatggatcatgtcgatcaggtgctgtcgcttgctactcttgcatttgatggtgcagaaatagttgtgaaggttccatctatctactggtggtacaggactgcgagccacgccgcagagctcacagcggggttctacaacactacgaacagagacggatactctccagttttcagaatgctcaagaagcactctgtgatccttaagctcgtctgctacggacccgagtacacagttcacgagaaggacgacgacgaagcgtttgcggatccggaaggtctaacctggcaggtcatcaacgcggcgtgggatcagggactaccgctctgtatcgagagcgctcttccgtgccgtaatggtgaggcgtattcccgcatcctcgacacggcgaagcctagggacgatcctgatcgtcaccatgccgcgtcctttgcgtaccgtcagcagcagcagcccccgctccgagaagcttgcctttcggagctctgcaccttcgtaaagtgcatgcacggggaggctccccagaatggggaaggttgaatctggttagcaactgatgcgctggctcgacaatacggaagaaaccaagtaggtgggtttcggatttgagccgcttttgaaggcgtccggcgagcgaacattctgatactgctaggtcctattcagttggttccatctcgtcgtcagccgtctgccctgttactcgtcggctggactgagcaggtgcgtttgcagttgcagccttaccatatagcttataactttgtggtaagttagcatacctgcatgctgtaacagacatggaggatatagtggagctctgcaggataatagagtggcaatgcccactcaggtgacctaaaaaatggccggccggagccaaaaaaaaaaaaaaaaagcttgctcgttgaagctggttaatccagttggtatttaaacgagagacgtttacgagagcagcccatgtgatgcgggatgaatgctggtcacagtcctcctcttctttcctgcccagtccagttccagtctgtgtgccccatgggatggccgtggaaagcaacagtaatggcttgcgcttgccagcccagtggggagggcatcttaaacttaactactgaatttgtataatataatggtattaaacaagtatggtatcatctttatgttatat

SEQ ID NO: 42260 - DNA, 2550 bp, Zea Mays
atgaagcacccgctgcaccgcgacggggagtcgtacccgtcacctccgccgcagcggcggccgcgcgggttcgcctccgctcccgctcccgcggcgggggcttcgccgcggaggcgaggtgtgcaggagcgggagcgggagcgggagaaggagcggacgaagctgcgggagcggcaccggcgcgccatcactggccgcatgctggccgggctccggcagcacggcaacttcccgctccccgcgcgcgccgacatgaacgacgtcctcgccgccctcgcccgcgccgccggctggaccgtgcaacccgatggcaccaccttccgctcctccaaccaaccactcctgcctcctcctccccagctgcacggagcattccaggttgcttctgtggaaaccccagctttgatcaacactctgagcagttatgccatcgggacaccattagattctcaggcatcagccctacaaacagatgacagtctgtcaccatcatcactggactcagttgtggcagaccgacgcataaagactgagaaccacgggaattccagttcagtcagctctctcaactgtatggacaatgatcagttaacgagatcagtattattccccgatgattacacgaaaactccatatataccagtttatgcttctttgcctatgggtattattaatagtcactgtcaattagtggacccagagagtgtacgcgctgagctaaggcaactgaagtctctgaacgtggacggggttgttgttgactgttggtgggggattgtagaagcctggactcctcggaaatatgaatggtctggttacagggacctttttggtataattaaagagttcaagctgaaagttcaggttgtattgtcatttcatgggtctggagagactggatctggtgatgtgttaatctctctcccaaagtggatcatggaaattgcaaaagagaaccaggatatattttttacagaccgcgaaggtagaagaaacacagaatgcctttcctgggggattgacaaagaacgagtccttcgtgggagaactggcattgaggtattgggtcacacttggtctgttttgatttcatgaggagtttccatatggaattcagaaacttatctgaagagggccttgtttcttctatcgaaattggattgggtgcttcaggggagctaagatatccttcatgtccagaaacaatgggctggaaatatcctggtattggtgagtttcagtgttatgacaggtacatgcaaaagaatctacggcaatcagcattgtcccggggtcatttgttttgggcacgagggcctgataacgctggctattataattcaagaccacatgaaactggctttttttgtgatggaggcgactatgacagctactatggacgttttttccttaactggtactctggagtcctcatggatcatgtcgatcaggttccatctatctactggtggtacaggactgcgagccacgccgcagagctcacagcggggttctacaacactacgaacagagacggatactctccagttttcagaatgctcaagaagcactctgtgatccttaagctcgtctgctacggacccgagtacacagttcacgagaaggacgacgacgaagcgtttgcggatccggaaggtctaacctggcaggtcatcaacgcggcgtgggatcagggactaccgctctgtatcgagagcgctcttccgtgccgtaatggtgaggcgtattcccgcatcctcgacacggcgaagcctagggacgatcctgatcgtcaccatgccgcgtcctttgcgtaccgtcagcagcagcagcccccgctccgagaagcttgcctttcggagctctgcaccttcgtaaagtgcatgcacggggaggctccccagaatggggaaggttgaatctggttagcaactgatgcgctggctcgacaatacggaagaaaccaagtaggtgggtttcggatttgagccgcttttgaaggcgtccggcgagcgaacattctgatactgctaggtcctattcagttggttccatctcgtcgtcagccgtctgccctgttactcgtcggctggactgagcaggtgcgtttgcagttgcagccttaccatatagcttataactttgtggtaagttagcatacctgcatgctgtaacagacatggaggatatagtggagctctgcaggataatagagtggcaatgcccactcaggtgacctaaaaaatggccggccggagccaaaaaaaaaaaaaaaaagcttgctcgttgaagctggttaatccagttggtatttaaacgagagacgtttacgagagcagcccatgtgatgcgggatgaatgctggtcacagtcctcctcttctttcctgcccagtccagttccagtctgtgtgccccatgggatggccgtggaaagcaacagtaatggcttgcgcttgccagcccagtggggagggcatcttaaacttaactactgaatttgtataatataatggtattaaacaagtatggtatcatctttatgttatat

SEQ ID NO: 42261 - DNA, 2464 bp, Zea Mays
atgaagcacccgctgcaccgcgacggggagtcgtacccgtcacctccgccgcagcggcggccgcgcgggttcgcctccgctcccgctcccgcggcgggggcttcgccgcggaggcgaggtgtgcaggagcgggagcgggagcgggagaaggagcggacgaagctgcgggagcggcaccggcgcgccatcactggccgcatgctggccgggctccggcagcacggcaacttcccgctccccgcgcgcgccgacatgaacgacgtcctcgccgccctcgcccgcgccgccggctggaccgtgcaacccgatggcaccaccttccgctcctccaaccaaccactcctgcctcctcctccccagctgcacggagcattccaggttgcttctgtggaaaccccagctttgatcaacactctgagcagttatgccatcgggacaccattagattctcaggcatcagccctacaaacagatgacagtctgtcaccatcatcactggactcagttgtggcagaccgacgcataaagactgagaaccacgggaattccagttcagtcagctctctcaactgtatggacaatgatcagcagttaacgagatcagtattattccccgatgattacacgaaaactccatatataccagtttatgcttctttgcctatgggtattattaatagtcactgtcaattagtggacccagagagtgtacgcgctgagctaaggcaactgaagtctctgaacgtggacggggttgttgttgactgttggtgggggattgtagaagcctggactcctcggaaatatgaatggtctggttacagggacctttttggtataattaaagagttcaagctgaaagttcaggttgtattgtcatttcatgggtctggagagactggatctggtgatgtgttaatctctctcccaaagtggatcatggaaattgcaaaagagaaccaggatatattttttacagaccgcgaaggtagaagaaacacagaatgcctttcctgggggattgacaaagaacgagtccttcgtgggagaactggcattgaggtattgggtcacacttggtctgttttgatttcatgaggagtttccatatggaattcagaaacttatctgaagagggccttgtttcttctatcgaaattggattgggtgcttcaggggagctaagatatccttcatgtccagaaacaatgggctggaaatatcctggtattggtgagtttcagtgttatgacaggtacatgcaaaagaatctacggcaatcagcattgtcccggggtcatttgttttgggcacgagggcctgataacgctggctattataattcaagaccacatgaaactggctttttttgtgatggaggcgactatgacagctactatggacgttttttccttaactggtactctggagtcctcatggatcatgtcgatcaggttccatctatctactggtggtacaggactgcgagccacgccgcagagctcacagcggggttctacaacactacgaacagagacggatactctccagttttcagaatgctcaagaagcactctgtgatccttaagctcgtctgctacggacccgagtacacagttcacgagaaggacgacgacgaagcgtttgcggatccggaaggtctaacctggcaggtcatcaacgcggcgtgggatcagggactaccgctctgtatcgagagcgctcttccgtgccgtaatggtgaggcgtattcccgcatcctcgacacggcgaagcctagggacgatcctgatcgtcaccatgccgcgtcctttgcgtaccgtcagcagcagcagcccccgctccgagaagcttgcctttcggagctctgcaccttcgtaaagtgcatgcacgaatggggaaggttgaatctggttagcaactgatgcgctggctcgacaatacggaagaaaccaagtaggtgggtttcggatttgagccgcttttgaaggcgtccggcgagcgaacattctgatactgctaggtcctattcagttggttccatctcgtcgtcagccgtctgccctgttactcgtcggctggactgagcagacatggaggatatagtggagctctgcaggataatagagtggcaatgcccactcaggtgacctaaaaaatggccggccggagccaaaaaaaaaaaaaaaaagcttgctcgttgaagctggttaatccagttggtatttaaacgagagacgtttacgagagcagcccatgtgatgcgggatgaatgctggtcacagtcctcctcttctttcctgcccagtccagttccagtctgtgtgccccatgggatggccgtggaaagcaacagtaatggcttgcgcttgccagcccagtggggagggcatcttaaacttaactactgaatttgtataatataatggtattaaacaagtatggtatcatctttatgttatat

SEQ ID NO: 42262 - DNA, 2512 bp, Zea Mays
atgaagcacccgctgcaccgcgacggggagtcgtacccgtcacctccgccgcagcggcggccgcgcgggttcgcctccgctcccgctcccgcggcgggggcttcgccgcggaggcgaggtgtgcaggagcgggagcgggagcgggagaaggagcggacgaagctgcgggagcggcaccggcgcgccatcactggccgcatgctggccgggctccggcagcacggcaacttcccgctccccgcgcgcgccgacatgaacgacgtcctcgccgccctcgcccgcgccgccggctggaccgtgcaacccgatggcaccaccttccgctcctccaaccaaccactcctgcctcctcctccccagctgcacggagcattccaggttgcttctgtggaaaccccagctttgatcaacactctgagcagttatgccatcgggacaccattagattctcaggcatcagccctacaaacagatgacagtctgtcaccatcatcactggactcagttgtggcagaccgacgcataaagactgagaaccacgggaattccagttcagtcagctctctcaactgtatggacaatgatcagcagttaacgagatcagtattattccccgatgattacacgaaaactccatatataccagtttatgcttctttgcctatgggtattattaatagtcactgtcaattagtggacccagagagtgtacgcgctgagctaaggcaactgaagtctctgaacgtggacggggttgttgttgactgttggtgggggattgtagaagcctggactcctcggaaatatgaatggtctggttacagggacctttttggtataattaaagagttcaagctgaaagttcaggttgtattgtcatttcatgggtctggagagactggatctggtgatgtgttaatctctctcccaaagtggatcatggaaattgcaaaagagaaccaggatatattttttacagaccgcgaaggtagaagaaacacagaatgcctttcctgggggattgacaaagaacgagtccttcgtgggagaactggcattgaggtctgttttgatttcatgaggagtttccatatggaattcagaaacttatctgaagagggccttgtttcttctatcgaaattggattgggtgcttcaggggagctaagatatccttcatgtccagaaacaatgggctggaaatatcctggtattggtgagtttcagtgttatgacaggtacatgcaaaagaatctacggcaatcagcattgtcccggggtcatttgttttgggcacgagggcctgataacgctggctattataattcaagaccacatgaaactggctttttttgtgatggaggcgactatgacagctactatggacgttttttccttaactggtactctggagtcctcatggatcatgtcgatcaggtgctgtcgcttgctactcttgcatttgatggtgcagaaatagttgtgaaggttccatctatctactggtggtacaggactgcgagccacgccgcagagctcacagcggggttctacaacactacgaacagagacggatactctccagttttcagaatgctcaagaagcactctgtgatccttaagctcgtctgctacggacccgagtacacagttcacgagaaggacgacgacgaagcgtttgcggatccggaaggtctaacctggcaggtcatcaacgcggcgtgggatcagggactaccgctctgtatcgagagcgctcttccgtgccgtaatggtgaggcgtattcccgcatcctcgacacggcgaagcctagggacgatcctgatcgtcaccatgccgcgtcctttgcgtaccgtcagcagcagcagcccccgctccgagaagcttgcctttcggagctctgcaccttcgtaaagtgcatgcacggggaggctccccagaatggggaaggttgaatctggttagcaactgatgcgctggctcgacaatacggaagaaaccaagtaggtgggtttcggatttgagccgcttttgaaggcgtccggcgagcgaacattctgatactgctaggtcctattcagttggttccatctcgtcgtcagccgtctgccctgttactcgtcggctggactgagcagacatggaggatatagtggagctctgcaggataatagagtggcaatgcccactcaggtgacctaaaaaatggccggccggagccaaaaaaaaaaaaaaaaagcttgctcgttgaagctggttaatccagttggtatttaaacgagagacgtttacgagagcagcccatgtgatgcgggatgaatgctggtcacagtcctcctcttctttcctgcccagtccagttccagtctgtgtgccccatgggatggccgtggaaagcaacagtaatggcttgcgcttgccagcccagtggggagggcatcttaaacttaactactgaatttgtataatataatggtattaaacaagtatggtatcatctttatgttatat

SEQ ID NO: 42263 - DNA, 2525 bp, Zea Mays
atgaagcacccgctgcaccgcgacggggagtcgtacccgtcacctccgccgcagcggcggccgcgcgggttcgcctccgctcccgctcccgcggcgggggcttcgccgcggaggcgaggtgtgcaggagcgggagcgggagcgggagaaggagcggacgaagctgcgggagcggcaccggcgcgccatcactggccgcatgctggccgggctccggcagcacggcaacttcccgctccccgcgcgcgccgacatgaacgacgtcctcgccgccctcgcccgcgccgccggctggaccgtgcaacccgatggcaccaccttccgctcctccaaccaaccactcctgcctcctcctccccagctgcacggagcattccaggttgcttctgtggaaaccccagctttgatcaacactctgagcagttatgccatcgggacaccattagattctcaggcatcagccctacaaacagatgacagtctgtcaccatcatcactggactcagttgtggcagaccgacgcataaagactgagaaccacgggaattccagttcagtcagctctctcaactgtatggacaatgatcagcagttaacgagatcagtattattccccgatgattacacgaaaactccatatataccagtttatgcttctttgcctatgggtattattaatagtcactgtcaattagtggacccagagagtgtacgcgctgagctaaggcaactgaagtctctgaacgtggacggggttgttgttgactgttggtgggggattgtagaagcctggactcctcggaaatatgaatggtctggttacagggacctttttggtataattaaagagttcaagctgaaagttcaggttgtattgtcatttcatgggtctggagagactggatctggtgatgtgttaatctctctcccaaagtggatcatggaaattgcaaaagagaaccaggatatattttttacagaccgcgaaggtagaagaaacacagaatgcctttcctgggggattgacaaagaacgagtccttcgtgggagaactggcattgaggtctgttttgatttcatgaggagtttccatatggaattcagaaacttatctgaagagggccttgtttcttctatcgaaattggattgggtgcttcaggggagctaagatatccttcatgtccagaaacaatgggctggaaatatcctggtattgtgttatgacaggtacatgcaaaagaatctacggcaatcagcattgtcccggggtcatttgttttgggcacgagggcctgataacgctggctattataattcaagaccacatgaaactggctttttttgtgatggaggcgactatgacagctactatggacgttttttccttaactggtactctggagtcctcatggatcatgtcgatcaggttccatctatctactggtggtacaggactgcgagccacgccgcagagctcacagcggggttctacaacactacgaacagagacggatactctccagttttcagaatgctcaagaagcactctgtgatccttaagctcgtctgctacggacccgagtacacagttcacgagaaggacgacgacgaagcgtttgcggatccggaaggtctaacctggcaggtcatcaacgcggcgtgggatcagggactaccgctctgtatcgagagcgctcttccgtgccgtaatggtgaggcgtattcccgcatcctcgacacggcgaagcctagggacgatcctgatcgtcaccatgccgcgtcctttgcgtaccgtcagcagcagcagcccccgctccgagaagcttgcctttcggagctctgcaccttcgtaaagtgcatgcacggggaggctccccagaatggggaaggttgaatctggttagcaactgatgcgctggctcgacaatacggaagaaaccaagtaggtgggtttcggatttgagccgcttttgaaggcgtccggcgagcgaacattctgatactgctaggtcctattcagttggttccatctcgtcgtcagccgtctgccctgttactcgtcggctggactgagcaggtgcgtttgcagttgcagccttaccatatagcttataactttgtggtaagttagcatacctgcatgctgtaacagacatggaggatatagtggagctctgcaggataatagagtggcaatgcccactcaggtgacctaaaaaatggccggccggagccaaaaaaaaaaaaaaaaagcttgctcgttgaagctggttaatccagttggtatttaaacgagagacgtttacgagagcagcccatgtgatgcgggatgaatgctggtcacagtcctcctcttctttcctgcccagtccagttccagtctgtgtgccccatgggatggccgtggaaagcaacagtaatggcttgcgcttgccagcccagtggggagggcatcttaaacttaactactgaatttgtataatataatggtattaaacaagtatggtatcatctttatgttatat

SEQ ID NO: 42264 - DNA, 2553 bp, Zea Mays
atgaagcacccgctgcaccgcgacggggagtcgtacccgtcacctccgccgcagcggcggccgcgcgggttcgcctccgctcccgctcccgcggcgggggcttcgccgcggaggcgaggtgtgcaggagcgggagcgggagcgggagaaggagcggacgaagctgcgggagcggcaccggcgcgccatcactggccgcatgctggccgggctccggcagcacggcaacttcccgctccccgcgcgcgccgacatgaacgacgtcctcgccgccctcgcccgcgccgccggctggaccgtgcaacccgatggcaccaccttccgctcctccaaccaaccactcctgcctcctcctccccagctgcacggagcattccaggttgcttctgtggaaaccccagctttgatcaacactctgagcagttatgccatcgggacaccattagattctcaggcatcagccctacaaacagatgacagtctgtcaccatcatcactggactcagttgtggcagaccgacgcataaagactgagaaccacgggaattccagttcagtcagctctctcaactgtatggacaatgatcagcagttaacgagatcagtattattccccgatgattacacgaaaactccatatataccagtttatgcttctttgcctatgggtattattaatagtcactgtcaattagtggacccagagagtgtacgcgctgagctaaggcaactgaagtctctgaacgtggacggggttgttgttgactgttggtgggggattgtagaagcctggactcctcggaaatatgaatggtctggttacagggacctttttggtataattaaagagttcaagctgaaagttcaggttgtattgtcatttcatgggtctggagagactggatctggtgatgtgttaatctctctcccaaagtggatcatggaaattgcaaaagagaaccaggatatattttttacagaccgcgaaggtagaagaaacacagaatgcctttcctgggggattgacaaagaacgagtccttcgtgggagaactggcattgaggtattgggtcacacttggtctgttttgatttcatgaggagtttccatatggaattcagaaacttatctgaagagggccttgtttcttctatcgaaattggattgggtgcttcaggggagctaagatatccttcatgtccagaaacaatgggctggaaatatcctggtattggtgagtttcagtgttatgacaggtacatgcaaaagaatctacggcaatcagcattgtcccggggtcatttgttttgggcacgagggcctgataacgctggctattataattcaagaccacatgaaactggctttttttgtgatggaggcgactatgacagctactatggacgttttttccttaactggtactctggagtcctcatggatcatgtcgatcaggttccatctatctactggtggtacaggactgcgagccacgccgcagagctcacagcggggttctacaacactacgaacagagacggatactctccagttttcagaatgctcaagaagcactctgtgatccttaagctcgtctgctacggacccgagtacacagttcacgagaaggacgacgacgaagcgtttgcggatccggaaggtctaacctggcaggtcatcaacgcggcgtgggatcagggactaccgctctgtatcgagagcgctcttccgtgccgtaatggtgaggcgtattcccgcatcctcgacacggcgaagcctagggacgatcctgatcgtcaccatgccgcgtcctttgcgtaccgtcagcagcagcagcccccgctccgagaagcttgcctttcggagctctgcaccttcgtaaagtgcatgcacggggaggctccccagaatggggaaggttgaatctggttagcaactgatgcgctggctcgacaatacggaagaaaccaagtaggtgggtttcggatttgagccgcttttgaaggcgtccggcgagcgaacattctgatactgctaggtcctattcagttggttccatctcgtcgtcagccgtctgccctgttactcgtcggctggactgagcaggtgcgtttgcagttgcagccttaccatatagcttataactttgtggtaagttagcatacctgcatgctgtaacagacatggaggatatagtggagctctgcaggataatagagtggcaatgcccactcaggtgacctaaaaaatggccggccggagccaaaaaaaaaaaaaaaaagcttgctcgttgaagctggttaatccagttggtatttaaacgagagacgtttacgagagcagcccatgtgatgcgggatgaatgctggtcacagtcctcctcttctttcctgcccagtccagttccagtctgtgtgccccatgggatggccgtggaaagcaacagtaatggcttgcgcttgccagcccagtggggagggcatcttaaacttaactactgaatttgtataatataatggtattaaacaagtatggtatcatctttatgttatat

SEQ ID NO: 42265 - DNA, 2536 bp, Zea Mays
atgaagcacccgctgcaccgcgacggggagtcgtacccgtcacctccgccgcagcggcggccgcgcgggttcgcctccgctcccgctcccgcggcgggggcttcgccgcggaggcgaggtgtgcaggagcgggagcgggagcgggagaaggagcggacgaagctgcgggagcggcaccggcgcgccatcactggccgcatgctggccgggctccggcagcacggcaacttcccgctccccgcgcgcgccgacatgaacgacgtcctcgccgccctcgcccgcgccgccggctggaccgtgcaacccgatggcaccaccttccgctcctccaaccaaccactcctgcctcctcctccccagctgcacggagcattccaggttgcttctgtggaaaccccagctttgatcaacactctgagcagttatgccatcgggacaccattagattctcaggcatcagccctacaaacagatgacagtctgtcaccatcatcactggactcagttgtggcagaccgacgcataaagactgagaaccacgggaattccagttcagtcagctctctcaactgtatggacaatgatcagcagttaacgagatcagtattattccccgatgattacacgaaaactccatatataccagtttatgcttctttgcctatgggtattattaatagtcactgtcaattagtggacccagagagtgtacgcgctgagctaaggcaactgaagtctctgaacgtggacggggttgttgttgactgttggtgggggattgtagaagcctggactcctcggaaatatgaatggtctggttacagggacctttttggtataattaaagagttcaagctgaaagttcaggttgtattgtcatttcatgggtctggagagactggatctggtgatgtgttaatctctctcccaaagtggatcatggaaattgcaaaagagaaccaggatatattttttacagaccgcgaaggtagaagaaacacagaatgcctttcctgggggattgacaaagaacgagtccttcgtgggagaactggcattgaggtctgttttgatttcatgaggagtttccatatggaattcagaaacttatctgaagagggccttgtttcttctatcgaaattggattgggtgcttcaggggagctaagatatccttcatgtccagaaacaatgggctggaaatatcctggtattggtgagtttcagtgttatgacaggtacatgcaaaagaatctacggcaatcagcattgtcccggggtcatttgttttgggcacgagggcctgataacgctggctattataattcaagaccacatgaaactggctttttttgtgatggaggcgactatgacagctactatggacgttttttccttaactggtactctggagtcctcatggatcatgtcgatcaggttccatctatctactggtggtacaggactgcgagccacgccgcagagctcacagcggggttctacaacactacgaacagagacggatactctccagttttcagaatgctcaagaagcactctgtgatccttaagctcgtctgctacggacccgagtacacagttcacgagaaggacgacgacgaagcgtttgcggatccggaaggtctaacctggcaggtcatcaacgcggcgtgggatcagggactaccgctctgtatcgagagcgctcttccgtgccgtaatggtgaggcgtattcccgcatcctcgacacggcgaagcctagggacgatcctgatcgtcaccatgccgcgtcctttgcgtaccgtcagcagcagcagcccccgctccgagaagcttgcctttcggagctctgcaccttcgtaaagtgcatgcacggggaggctccccagaatggggaaggttgaatctggttagcaactgatgcgctggctcgacaatacggaagaaaccaagtaggtgggtttcggatttgagccgcttttgaaggcgtccggcgagcgaacattctgatactgctaggtcctattcagttggttccatctcgtcgtcagccgtctgccctgttactcgtcggctggactgagcaggtgcgtttgcagttgcagccttaccatatagcttataactttgtggtaagttagcatacctgcatgctgtaacagacatggaggatatagtggagctctgcaggataatagagtggcaatgcccactcaggtgacctaaaaaatggccggccggagccaaaaaaaaaaaaaaaaagcttgctcgttgaagctggttaatccagttggtatttaaacgagagacgtttacgagagcagcccatgtgatgcgggatgaatgctggtcacagtcctcctcttctttcctgcccagtccagttccagtctgtgtgccccatgggatggccgtggaaagcaacagtaatggcttgcgcttgccagcccagtggggagggcatcttaaacttaactactgaatttgtataatataatggtattaaacaagtatggtatcatctttatgttatat

SEQ ID NO: 42266 - DNA, 2371 bp, Zea Mays
atgaagcacccgctgcaccgcgacggggagtcgtacccgtcacctccgccgcagcggcggccgcgcgggttcgcctccgctcccgctcccgcggcgggggcttcgccgcggaggcgaggtgtgcaggagcgggagcgggagcgggagaaggagcggacgaagctgcgggagcggcaccggcgcgccatcactggccgcatgctggccgggctccggcagcacggcaacttcccgctccccgcgcgcgccgacatgaacgacgtcctcgccgccctcgcccgcgccgccggctggaccgtgcaacccgatggcaccaccttccgctcctccaaccaaccactcctgcctcctcctccccagctgcacggagcattccaggttgcttctgtggaaaccccagctttgatcaacactctgagcagttatgccatcgggacaccattagattctcaggcatcagccctacaaacagatgacagtctgtcaccatcatcactggactcagttgtggcagaccgacgcataaagactgagaaccacgggaattccagttcagtcagctctctcaactgtatggacaatgatcagcagttaacgagatcagtattattccccgatgattacacgaaaactccatatataccagtttatgcttctttgcctatgggtattattaatagtcactgtcaattagtggacccagagagtgtacgcgctgagctaaggcaactgaagtctctgaacgtggacggggttgttgttgactgttggtgggggattgtagaagcctggactcctcggaaatatgaatggtctggttacagggacctttttggtataattaaagagttcaagctgaaagttcaggttgtattgtcatttcatgggtctggagagactggatctggtgatgtgttaatctctctcccaaagtggatcatggaaattgcaaaagagaaccaggatatattttttacagaccgcgaaggtagaagaaacacagaatgcctttcctgggggattgacaaagaacgagtccttcgtgggagaactggcattgagtgttatgacaggtacatgcaaaagaatctacggcaatcagcattgtcccggggtcatttgttttgggcacgagggcctgataacgctggctattataattcaagaccacatgaaactggctttttttgtgatggaggcgactatgacagctactatggacgttttttccttaactggtactctggagtcctcatggatcatgtcgatcaggttccatctatctactggtggtacaggactgcgagccacgccgcagagctcacagcggggttctacaacactacgaacagagacggatactctccagttttcagaatgctcaagaagcactctgtgatccttaagctcgtctgctacggacccgagtacacagttcacgagaaggacgacgacgaagcgtttgcggatccggaaggtctaacctggcaggtcatcaacgcggcgtgggatcagggactaccgctctgtatcgagagcgctcttccgtgccgtaatggtgaggcgtattcccgcatcctcgacacggcgaagcctagggacgatcctgatcgtcaccatgccgcgtcctttgcgtaccgtcagcagcagcagcccccgctccgagaagcttgcctttcggagctctgcaccttcgtaaagtgcatgcacggggaggctccccagaatggggaaggttgaatctggttagcaactgatgcgctggctcgacaatacggaagaaaccaagtaggtgggtttcggatttgagccgcttttgaaggcgtccggcgagcgaacattctgatactgctaggtcctattcagttggttccatctcgtcgtcagccgtctgccctgttactcgtcggctggactgagcaggtgcgtttgcagttgcagccttaccatatagcttataactttgtggtaagttagcatacctgcatgctgtaacagacatggaggatatagtggagctctgcaggataatagagtggcaatgcccactcaggtgacctaaaaaatggccggccggagccaaaaaaaaaaaaaaaaagcttgctcgttgaagctggttaatccagttggtatttaaacgagagacgtttacgagagcagcccatgtgatgcgggatgaatgctggtcacagtcctcctcttctttcctgcccagtccagttccagtctgtgtgccccatgggatggccgtggaaagcaacagtaatggcttgcgcttgccagcccagtggggagggcatcttaaacttaactactgaatttgtataatataatggtattaaacaagtatggtatcatctttatgttatat

SEQ ID NO: 42267 - DNA, 263 bp, Zea Mays
acagctaccgccatactcctgtacgtctgcaacctacagtttgctctcgtgtacgccatcggattgagctatgcgttgatgatgttgcacgcctcgcttcggaagttgactccctcgagtctaccagatcccagcagcaagcagaacaggagggcgcagccgagacggatctaggttaacatgccggacagtacagatgttcatcaggacataaactggaattcatacaccttcaagcattcagatctaatggtcttcctacc

SEQ ID NO: 42268 - DNA, 518 bp, Zea Mays
atgcgggcggctagtgggctagcgggctcctggctagcccaggaagcgagagatcgtgaggaatacgtcggcatgttgggctgggccgtatctagtcattggacaaggctcaagggaagtgggacaggctcaccggggctcgggaacaacacgggcgactacgcgcggctcgccgcggcgctgcgggacgaccacggcctccccgcggccgtcgtggcgcgggtcacccgccccgactggctccgcaacgccgcgggcctcgccgacgccagctactggcggggcaccctccgcccgcgccccgtgctcgactggagggaagatatcactgatagggcattcagctgggggctggctcgcgcgcgtgtacatggcagagtttgatgcttccgacataagtctactcctcacccttggcactcctcacctgtatggttcctcaatcatgactcaaaagtggactaatgtatgattaatcgcttagtgtttatgctggagattcttttaattaaattgtg

SEQ ID NO: 42269 - DNA, 508 bp, Zea Mays
cgcgaccccgcgccagcgccaccgtctccgccaccgccaaggccgggccgtcatcctcccatgccgcaggggctcgggaacaacacgggcgactacgcgcggctcgccgcggcgctgcgggacgaccacggcctccccgcggccgtcgtggcgcgggtcacccgccccgactggctccgcaacgccgcgggcctcgccgacgccagctactggcggggcaccctccgcccgcgccccgtgctcgactggtacctgaagagggtggacgacgcggtgtccgaggcgagggagctatgcgcgccaggagggaagatatcactgatagggcattcagctgggggctggctcgcgcgcgtgtacatggcagagtttgatgcttccgacataagtctactcctcacccttggcactcctcacctgtatggttcctcaatcatgactcaaaagtggactaatgtatgattaatcgcttagtgtttatgctggagattcttttaattaaattgtg

SEQ ID NO: 42270 - DNA, 3091 bp, Zea Mays
ctctcggtaagcccggctcggcccggtccagcccgcttcggttcttcctcccagtcccgtccgtcgcttggctgctgtagaggtcgcccgtcgccgtctcccccctgtccggtccggctatctctctctccctccctgctcggctttgacctcagctcgcaatgaactctctactgcggccgccgctgccggggccgacgcctagactgagcgcgaggcgtcgggtctcgtcgccagcgccggtgcgggtcggctcggcggtgctggccggcggcgagcgcagatgccaacgggggctagcagtggcgacgtcggtggctccgtcgtggatggaggaggccggggtggcggtgctggaggagggcgggcggaggaacccgtcagtgtcggactcgtaccgcgcggcggggctgccgcagcccaacgccacggtgctggatgcgcaggcgcgggtgtgcacagggcccgcacagacgcgcccgctcggggaggagcaggccatgcgcgtcctcgacactatcctccgctccgcaattggagaactcaaagaggagccagtctctagtgcacagttaggtgcattcttcgcaggcatgacaataagagctaactcgtttccagaggccacccaatggagtgagggcgagcgacgcgccatgagcatattttggccacgccttgtgcaggtccttcctcctgaggtgaagtttatagcagaccctgaaggcacgatcttgggtgcgaatggtttagcagagcctcggtatgttggccaaggaactggagagatgagactcgtcggtgctctgagggaagtgcttgctggtggccatttaggttatgaggaggttcaatgcgtactaaaggatatcctaccaattggatcgagttcagattcgacagtggttagtcaagcactgctagcggcatttttgattggacagcggatgaatagagaaactgatcgtgagctcaaagcgtattgcctagcctttgatgatgaactaggtcctcctccggttgctgacgtcaagtcgttgacacactatggtgaaccatatgatggcaatacacgtttttttaagagtactctatttgttgcagcggttcgagcctgctatggtgaatcctgcctcctccacggtgttgaatggatgccacccaagggtggaataacagaaggacaaatgcttaaattcatgggtgcaaacatacacttatccccaacacaagccaagatattgttggaggatgaaactgctggttttgcatacttgaatcttcaggaagcttgtccaccattatattcgattattggactcagggagcatattaagaaacggccaccgttggctacctctgagaaagttcaacaatttgtgagggcacgggggagagaatcaatggttgcaggattttatcatgaaggctatgaagatccgttgcttatgctgatgagaaggagaactgttcatgctggactagttgtaaagggtgaggaaggtgcgctctcaatgacaaccaaggaaagatcagctcatgcatcaaaaggacttcctgttaaccactgttcagggttccggacacccaacagcataaattcctctaaaactgatggtattcctagagaaagcttcagggtcattgtgaatgcccaggaacttggttttgaatccaccgaaactcccagaactgatagatcaattctaaagaacttggagttcggcctggcagcactaggtggcgagaaaggagcagcctacgaccggatagtcctcaacgcagctatggctgaccacttgctaggctgcagcggagccgaggacatcgacgctgcgctcgaccgtgcgagggaggccattgatagcggcgaagctctgagaaggctcatgagctacataaagatctcgcacagagtctcctaggctagcgctgaccccgtggcttactgattgatcctacaatttcggcttcgagccacgactcgggtatcttcttcgcggagcccgagtgcctttgccactcggtgtcggtgtttacaagccagcgtgaaatgttccctcgcctcaacgacctgtcaaaaaaaaaaaaaacagttgcaatggaacagtgccttgttgtttttgttttgccctgagatagagaagttcatgttgagtaacacgtgcagattctcctcggatcagatttatagcggcattttgaatgaaatactgtgcatggtctcgtcatggttgaaaccatgatcagatttatagagaacctggaagtttacaattagcagcagcaattgatccattacagatgttagagatgattacggcctagctcaaagtccaaaagaaaccgaggatgaccaggcatgccgatcagctgtagactcctttgggtacaaaaatgtgatcagttcacgcagaattttaatcctaccgtatactcaagtcagcgcctaagagaagagagcagcaagccttcaagggaagaacaagaaactggaaagttgtccattgccgagcccaggcattcagtgagttcgtctatttgccgcctcatcatgtacagctcttcagcccggtatttggatgcccactcttctactgtcctgataagagtcggaaacagcagaagataagtaacgatggcattaaaagaagagcacacagacaagaatacaccgtatgagctttatgggctatggctttgtgtatgacagccttgaagatggggtaacacacattgttgtcaatacagttgaagaaaacaatactggggtatatacaagtaataaaagaaggaagaactggactttacatgaaacaaaaatgttgcagatatgcgagccatttgcggaggtcctaaaacttgtcatcaacaaaaaatggtaccccaaccacttggccagggtggggctggaagccataacccatagccaataaatagttatggtactcagacaagaatagtcttttcacatcttatttcagttaattattgcagaattatgaacattaacgacaagtaatttgacaaaagaaaggaacagctcagatatcagtttgaaattcgaatgactaaatattgtcagtattct

SEQ ID NO: 42271 - DNA, 1929 bp, Zea Mays
cccgcttcggttcttcctcccagtcccgtccgtcgcttggctgctgtagaggtcgcccgtcgccgtctcccccctgtccggtccggctatctctctctccctccctgctcggctttgacctcagctcgcaatgaactctctactgcggccgccgctgccggggccgacgcctagactgagcgcgaggcgtcgggtctcgtcgccagcgccggtgcgggtcggctcggcggtgctggccggcggcgagcgcagatgccaacgggggctagcagtggcgacgtcggtggctccgtcgtggatggaggaggccggggtggcggtgctggaggagggcgggcggaggaacccgtcagtgtcggactcgtaccgcgcggcggggctgccgcagcccaacgccacggtgctggatgcgcaggcgcgggtgtgcacagggcccgcacagacgcgcccgctcggggaggagcaggccatgcgcgtcctcgacactatcctccgctccgcaattggagaactcaaagaggagccagtctctagtgcacagttaggtgcattcttcgcaggcatgacaataagagctaactcgtttccagaggccacccaatggagtgagggcgagcgacgcgccatgagcatattttggccacgccttgtgcaggtccttcctcctgaggtgaagtttatagcagaccctgaaggcacgatcttgggtgcgaatggtttagcagagcctcggtatgttggccaaggaactggagagatgagactcgtcggtgctctgagggaagtgcttgctggtggccatttaggttatgaggaggttcaatgcgtactaaaggatatcctaccaattggatcgagttcagattcgacagtggttagtcaagcactgctagcggcatttttgattggacagcggatgaatagagaaactgatcgtgagctcaaagcgtattgcctagcctttgatgatgaactaggtcctcctccggttgctgacgtcaagtcgttgacacactatggtgaaccatatgatggcaatacacgtttttttaagagtactctatttgttgcagcggttcgagcctgctatggtgaatcctgcctcctccacggtgttgaatggatgccacccaagggtggaataacagaaggacaaatgcttaaattcatgggtgcaaacatacacttatccccaacacaagccaagatattgttggaggatgaaactgctggttttgcatacttgaatcttcaggaagcttgtccaccattatattcgattattggactcagggagcatattaagaaacggccaccgttggctacctctgagaaagttcaacaatttgtgaggttatgcctatggatacctttaaagattgaaaactttaccttgaaagaattttcagagcctcctgatctttgaacaactaataaggtaaagatttagtaaatcactgtcacactttcttaataaattgccaggtggtttactagctttagctttcacctttcaaagtatctcttcactaggatattttacgcaaaaaaaatctcgtgggacttttttaaggtttaaggactgtcaagataattcaagtatttcttatgatgatacaatttggtgtcattgaagttgaagatctttattttttttttctcgaaagcgcaggagaactgcgcgatattatattaaagaagaaggacaattacagaagaaaacaaaagaggcgcctatggcggccagtaacaggcatacagaaacccatccatgtctaaagaagaacctaacacaaataaccacaatgctagctaactagcagggatgcctggaatgggggcggtgagcaaagacaacttttttgcaccagccatctcccataagtgaacctccaactcaactcttctaatagcatcagcaatactggg

SEQ ID NO: 42272 - DNA, 3078 bp, Zea Mays
cttcctcccagtcccgtccgtcgcttggctgctgtagaggtcgcccgtcgccgtctcccccctgtccggtccggctatctctctctccctccctgctcggctttgacctcagctcgcaatgaactctctactgcggccgccgctgccggggccgacgcctagactgagcgcgaggcgtcgggtctcgtcgccagcgccggtgcgggtcggctcggcggtgctggccggcggcgagcgcagatgccaacgggggctagcagtggcgacgtcggtggctccgtcgtggatggaggaggccggggtggcggtgctggaggagggcgggcggaggaacccgtcagtgtcggactcgtaccgcgcggcggggctgccgcagcccaacgccacggtgctggatgcgcaggcgcgggtgtgcacagggcccgcacagacgcgcccgctcggggaggagcaggccatgcgcgtcctcgacactatcctccgctccgcaattggagaactcaaagaggagccagtctctagtgcacagttaggtgcattcttcgcaggcatgacaataagagctaactcgtttccagaggccacccaatggagtgagggcgagcgacgcgccatgagcatattttggccacgccttgtgcaggtccttcctcctgaggtgaagtttatagcagaccctgaaggcacgatcttgggtgcgaatggtttagcagagcctcggtatgttggccaaggaactggagagatgagactcgtcggtgctctgagggaagtgcttgctggtggccatttaggttatgaggaggttcaatgcgtactaaaggatatcctaccaattggatcgagttcagattcgacagtggttagtcaagcactgctagcggcatttttgattggacagcggatgaatagagaaactgatcgtgagctcaaagcgtattgcctagcctttgatgatgaactaggtcctcctccggttgctgacgtcaagtcgttgacacactatggtgaaccatatgatggcaatacacgtttttttaagagtactctatttgttgcagcggttcgagcctgctatggtgaatcctgcctcctccacggtgttgaatggatgccacccaagaaggacaaatgcttaaattcatgggtgcaaacatacacttatccccaacacaagccaagatattgttggaggatgaaactgctggttttgcatacttgaatcttcaggaagcttgtccaccattggatggagtcatgaacttttcttattaaaactgcaagaaacatatattcgattattggactcagggagcatattaagaaacggccaccgttggctacctctgagaaagttcaacaatttgtgagggcacgggggagagaatcaatggttgcaggattttatcatgaaggctatgaagatccgttgcttatgctgatgagaaggagaactgttcatgctggactagttgtaaagggtgaggaaggtgcgctctcaatgacaaccaaggaaagatcagctcatgcatcaaaaggacttcctgttaaccactgttcagggttccggacacccaacagcataaattcctctaaaactgatggtattcctagagaaagcttcagggtcattgtgaatgcccaggaacttggttttgaatccaccgaaactcccagaactgatagatcaattctaaagaacttggagttcggcctggcagcactaggtggcgagaaaggagcagcctacgaccggatagtcctcaacgcagctatggctgaccacttgctaggctgcagcggagccgaggacatcgacgctgcgctcgaccgtgcgagggaggccattgatagcggcgaagctctgagaaggctcatgagctacataaagatctcgcacagagtctcctaggctagcgctgaccccgtggcttactgattgatcctacaatttcggcttcgagccacgactcgggtatcttcttcgcggagcccgagtgcctttgccactcggtgtcggtgtttacaagccagcgtgaaatgttccctcgcctcaacgacctgtcaaaaaaaaaaaaaacagttgcaatggaacagtgccttgttgtttttgttttgccctgagatagagaagttcatgttgagtaacacgtgcagattctcctcggatcagatttatagcggcattttgaatgaaatactgtgcatggtctcgtcatggttgaaaccatgatcagatttatagagaacctggaagtttacaattagcagcagcaattgatccattacagatgttagagatgattacggcctagctcaaagtccaaaagaaaccgaggatgaccaggcatgccgatcagctgtagactcctttgggtacaaaaatgtgatcagttcacgcagaattttaatcctaccgtatactcaagtcagcgcctaagagaagagagcagcaagccttcaagggaagaacaagaaactggaaagttgtccattgccgagcccaggcattcagtgagttcgtctatttgccgcctcatcatgtacagctcttcagcccggtatttggatgcccactcttctactgtcctgataagagtcggaaacagcagaagataagtaacgatggcattaaaagaagagcacacagacaagaatacaccgtatgagctttatgggctatggctttgtgtatgacagccttgaagatggggtaacacacattgttgtcaatacagttgaagaaaacaatactggggtatatacaagtaataaaagaaggaagaactggactttacatgaaacaaaaatgttgcagatatgcgagccatttgcggaggtcctaaaacttgtcatcaacaaaaaatggtaccccaaccacttggccagggtggggctggaagccataacccatagccaataaatagttatggtactcagacaagaatagtcttttcacatcttatttcagttaattattgcagaattatgaacattaacgacaagtaatttgacaaaagaaaggaacagctcagatatcagtttgaaattcgaatgactaaatattgtcagtattct

SEQ ID NO: 42273 - DNA, 2995 bp, Zea Mays
cttcctcccagtcccgtccgtcgcttggctgctgtagaggtcgcccgtcgccgtctcccccctgtccggtccggctatctctctctccctccctgctcggctttgacctcagctcgcaatgaactctctactgcggccgccgctgccggggccgacgcctagactgagcgcgaggcgtcgggtctcgtcgccagcgccggtgcgggtcggctcggcggtgctggccggcggcgagcgcagatgccaacgggggctagcagtggcgacgtcggtggctccgtcgtggatggaggaggccggggtggcggtgctggaggagggcgggcggaggaacccgtcagtgtcggactcgtaccgcgcggcggggctgccgcagcccaacgccacggtgctggatgcgcaggcgcgggtgtgcacagggcccgcacagacgcgcccgctcggggaggagcaggccatgcgcgtcctcgacactatcctccgctccgcaattggagaactcaaagaggagccagtctctagtgcacagttaggtgcattcttcgcaggcatgacaataagagctaactcgtttccagaggccacccaatggagtgagggcgagcgacgcgccatgagcatattttggccacgccttgtgcaggtccttcctcctgaggtgaagtttatagcagaccctgaaggcacgatcttgggtgcgaatggtttagcagagcctcggtatgttggccaaggaactggagagatgagactcgtcggtgctctgagggaagtgcttgctggtggccatttaggttatgaggaggttcaatgcgtactaaaggatatcctaccaattggatcgagttcagattcgacagtggttagtcaagcactgctagcggcatttttgattggacagcggatgaatagagaaactgatcgtgagctcaaagcgtattgcctagcctttgatgatgaactagcggttcgagcctgctatggtgaatcctgcctcctccacggtgttgaatggatgccacccaagggtggaataacagaaggacaaatgcttaaattcatgggtgcaaacatacacttatccccaacacaagccaagatattgttggaggatgaaactgctggttttgcatacttgaatcttcaggaagcttgtccaccattggatggagtcatgaacttttcttattaaaactgcaagaaacatatattcgattattggactcagggagcatattaagaaacggccaccgttggctacctctgagaaagttcaacaatttgtgagggcacgggggagagaatcaatggttgcaggattttatcatgaaggctatgaagatccgttgcttatgctgatgagaaggagaactgttcatgctggactagttgtaaagggtgaggaaggtgcgctctcaatgacaaccaaggaaagatcagctcatgcatcaaaaggacttcctgttaaccactgttcagggttccggacacccaacagcataaattcctctaaaactgatggtattcctagagaaagcttcagggtcattgtgaatgcccaggaacttggttttgaatccaccgaaactcccagaactgatagatcaattctaaagaacttggagttcggcctggcagcactaggtggcgagaaaggagcagcctacgaccggatagtcctcaacgcagctatggctgaccacttgctaggctgcagcggagccgaggacatcgacgctgcgctcgaccgtgcgagggaggccattgatagcggcgaagctctgagaaggctcatgagctacataaagatctcgcacagagtctcctaggctagcgctgaccccgtggcttactgattgatcctacaatttcggcttcgagccacgactcgggtatcttcttcgcggagcccgagtgcctttgccactcggtgtcggtgtttacaagccagcgtgaaatgttccctcgcctcaacgacctgtcaaaaaaaaaaaaaacagttgcaatggaacagtgccttgttgtttttgttttgccctgagatagagaagttcatgttgagtaacacgtgcagattctcctcggatcagatttatagcggcattttgaatgaaatactgtgcatggtctcgtcatggttgaaaccatgatcagatttatagagaacctggaagtttacaattagcagcagcaattgatccattacagatgttagagatgattacggcctagctcaaagtccaaaagaaaccgaggatgaccaggcatgccgatcagctgtagactcctttgggtacaaaaatgtgatcagttcacgcagaattttaatcctaccgtatactcaagtcagcgcctaagagaagagagcagcaagccttcaagggaagaacaagaaactggaaagttgtccattgccgagcccaggcattcagtgagttcgtctatttgccgcctcatcatgtacagctcttcagcccggtatttggatgcccactcttctactgtcctgataagagtcggaaacagcagaagataagtaacgatggcattaaaagaagagcacacagacaagaatacaccgtatgagctttatgggctatggctttgtgtatgacagccttgaagatggggtaacacacattgttgtcaatacagttgaagaaaacaatactggggtatatacaagtaataaaagaaggaagaactggactttacatgaaacaaaaatgttgcagatatgcgagccatttgcggaggtcctaaaacttgtcatcaacaaaaaatggtaccccaaccacttggccagggtggggctggaagccataacccatagccaataaatagttatggtactcagacaagaatagtcttttcacatcttatttcagttaattattgcagaattatgaacattaacgacaagtaatttgacaaaagaaaggaacagctcagatatcagtttgaaattcgaatgactaaatattgtcagtattct

SEQ ID NO: 42274 - DNA, 3070 bp, Zea Mays
cgcttggctgctgtagaggtcgcccgtcgccgtctcccccctgtccggtccggctatctctctctccctccctgctcggctttgacctcagctcgcaatgaactctctactgcggccgccgctgccggggccgacgcctagactgagcgcgaggcgtcgggtctcgtcgccagcgccggtgcgggtcggctcggcggtgctggccggcggcgagcgcagatgccaacgggggctagcagtggcgacgtcggtggctccgtcgtggatggaggaggccggggtggcggtgctggaggagggcgggcggaggaacccgtcagtgtcggactcgtaccgcgcggcggggctgccgcagcccaacgccacggtgctggatgcgcaggcgcgggtgtgcacagggcccgcacagacgcgcccgctcggggaggagcaggccatgcgcgtcctcgacactatcctccgctccgcaattggagaactcaaagaggagccagtctctagtgcacagttaggtgcattcttcgcaggcatgacaataagagctaactcgtttccagaggccacccaatggagtgagggcgagcgacgcgccatgagcatattttggccacgccttgtgcaggtccttcctcctgaggtgaagtttatagcagaccctgaaggcacgatcttgggtgcgaatggtttagcagagcctcggtatgttggccaaggaactggagagatgagactcgtcggtgctctgagggaagtgcttgctggtggccatttaggttatgaggaggttcaatgcgtactaaaggatatcctaccaattggatcgagttcagattcgacagtggttagtcaagcactgctagcggcatttttgattggacagcggatgaatagagaaactgatcgtgagctcaaagcgtattgcctagcctttgatgatgaactaggtcctcctccggttgctgacgtcaagtcgttgacacactatggtgaaccatatgatggcaatacacgtttttttaagagtactctatttgttgcagcggttcgagcctgctatggtgaatcctgcctcctccacggtgttgaatggatgccacccaagggtggaataacagaaggacaaatgcttaaattcatgggtgcaaacatacacttatccccaacacaagccaagatattgttggaggatgaaactgctggttttgcatacttgaatcttcaggaagcttgtccaccattggatggagtcatgaacttttcttattaaaactgcaagaaacatatattcgattattggactcagggagcatattaagaaacggccaccgttggctacctctgagaaagttcaacaatttgtgagggcacgggggagagaatcaatggttgcaggattttatcatgaaggctatgaagatccgttgcttatgctgatgagaaggagaactgttcatgctggactagttgtaaagggtgaggaaggtgcgctctcaatgacaaccaaggaaagatcagctcatgcatcaaaaggacttcctgttaaccactgttcagggttccggacacccaacagcataaattcctctaaaactgatggtattcctagagaaagcttcagggtcattgtgaatgcccaggaacttggttttgaatccaccgaaactcccagaactgatagatcaattctaaagaacttggagttcggcctggcagcactaggtggcgagaaaggagcagcctacgaccggatagtcctcaacgcagctatggctgaccacttgctaggctgcagcggagccgaggacatcgacgctgcgctcgaccgtgcgagggaggccattgatagcggcgaagctctgagaaggctcatgagctacataaagatctcgcacagagtctcctaggctagcgctgaccccgtggcttactgattgatcctacaatttcggcttcgagccacgactcgggtatcttcttcgcggagcccgagtgcctttgccactcggtgtcggtgtttacaagccagcgtgaaatgttccctcgcctcaacgacctgtcaaaaaaaaaaaaaacagttgcaatggaacagtgccttgttgtttttgttttgccctgagatagagaagttcatgttgagtaacacgtgcagattctcctcggatcagatttatagcggcattttgaatgaaatactgtgcatggtctcgtcatggttgaaaccatgatcagatttatagagaacctggaagtttacaattagcagcagcaattgatccattacagatgttagagatgattacggcctagctcaaagtccaaaagaaaccgaggatgaccaggcatgccgatcagctgtagactcctttgggtacaaaaatgtgatcagttcacgcagaattttaatcctaccgtatactcaagtcagcgcctaagagaagagagcagcaagccttcaagggaagaacaagaaactggaaagttgtccattgccgagcccaggcattcagtgagttcgtctatttgccgcctcatcatgtacagctcttcagcccggtatttggatgcccactcttctactgtcctgataagagtcggaaacagcagaagataagtaacgatggcattaaaagaagagcacacagacaagaatacaccgtatgagctttatgggctatggctttgtgtatgacagccttgaagatggggtaacacacattgttgtcaatacagttgaagaaaacaatactggggtatatacaagtaataaaagaaggaagaactggactttacatgaaacaaaaatgttgcagatatgcgagccatttgcggaggtcctaaaacttgtcatcaacaaaaaatggtaccccaaccacttggccagggtggggctggaagccataacccatagccaataaatagttatggtactcagacaagaatagtcttttcacatcttatttcagttaattattgcagaattatgaacattaacgacaagtaatttgacaaaagaaaggaacagctcagatatcagtttgaaattcgaatgactaaatattgtcagtattct

SEQ ID NO: 42275 - DNA, 1911 bp, Zea Mays
gccgtctcccccctgtccggtccggctatctctctctccctccctgctcggctttgacctcagctcgcaatgaactctctactgcggccgccgctgccggggccgacgcctagactgagcgcgaggcgtcgggtctcgtcgccagcgccggtgcgggtcggctcggcggtgctggccggcggcgagcgcagatgccaacgggggctagcagtggcgacgtcggtggctccgtcgtggatggaggaggccggggtggcggtgctggaggagggcgggcggaggaacccgtcagtgtcggactcgtaccgcgcggcggggctgccgcagcccaacgccacggtgctggatgcgcaggcgcgggtgtgcacagggcccgcacagacgcgcccgctcggggaggagcaggccatgcgcgtcctcgacactatcctccgctccgcaattggagaactcaaagaggagccagtctctagtgcacagttaggtgcattcttcgcaggcatgacaataagagctaactcgtttccagaggccacccaatggagtgagggcgagcgacgcgccatgagcatattttggccacgccttgtgcaggtccttcctcctgaggtgaagtttatagcagaccctgaaggcacgatcttgggtgcgaatggtttagcagagcctcggtatgttggccaaggaactggagagatgagactcgtcggtgctctgagggaagtgcttgctggtggccatttaggttatgaggaggttcaatgcgtactaaaggatatcctaccaattggatcgagttcagattcgacagtggttagtcaagcactgctagcggcatttttgattggacagcggatgaatagagaaactgatcgtgagctcaaagcgtattgcctagcctttgatgatgaactaggtcctcctccggttgctgacgtcaagtcgttgacacactatggtgaaccatatgatggcaatacacgtttttttaagagtactctatttgttgcagcggttcgagcctgctatggtgaatcctgcctcctccacggtgttgaatggatgccacccaagggtggaataacagaaggacaaatgcttaaattcatgggtgcaaacatacacttatccccaacacaagccaagatattgttggaggatgaaactgctggttttgcatacttgaatcttcaggaagcttgtccaccattggatggagtcatgaacttttcttattaaaactgcaagaaacatatattcgattattggactcagggagcatattaagaaacggccaccgttggctacctctgagaaagttcaacaatttgtgaggttatgcctatggatacctttaaagattgaaaactttaccttgaaagaattttcagagcctcctgatctttgaacaactaataaggtaaagatttagtaaatcactgtcacactttcttaataaattgccaggtggtttactagctttagctttcacctttcaaagtatctcttcactaggatattttacgcaaaaaaaatctcgtgggacttttttaaggtttaaggactgtcaagataattcaagtatttcttatgatgatacaatttggtgtcattgaagttgaagatctttattttttttttctcgaaagcgcaggagaactgcgcgatattatattaaagaagaaggacaattacagaagaaaacaaaagaggcgcctatggcggccagtaacaggcatacagaaacccatccatgtctaaagaagaacctaacacaaataaccacaatgctagctaactagcagggatgcctggaatgggggcggtgagcaaagacaacttttttgcaccagccatctcccataagtgaacctccaactcaactcttctaatagcatcagcaatactggg

SEQ ID NO: 42276 - DNA, 1898 bp, Zea Mays
gccgtctcccccctgtccggtccggctatctctctctccctccctgctcggctttgacctcagctcgcaatgaactctctactgcggccgccgctgccggggccgacgcctagactgagcgcgaggcgtcgggtctcgtcgccagcgccggtgcgggtcggctcggcggtgctggccggcggcgagcgcagatgccaacgggggctagcagtggcgacgtcggtggctccgtcgtggatggaggaggccggggtggcggtgctggaggagggcgggcggaggaacccgtcagtgtcggactcgtaccgcgcggcggggctgccgcagcccaacgccacggtgctggatgcgcaggcgcgggtgtgcacagggcccgcacagacgcgcccgctcggggaggagcaggccatgcgcgtcctcgacactatcctccgctccgcaattggagaactcaaagaggagccagtctctagtgcacagttaggtgcattcttcgcaggcatgacaataagagctaactcgtttccagaggccacccaatggagtgagggcgagcgacgcgccatgagcatattttggccacgccttgtgcaggtccttcctcctgaggtgaagtttatagcagaccctgaaggcacgatcttgggtgcgaatggtttagcagagcctcggtatgttggccaaggaactggagagatgagactcgtcggtgctctgagggaagtgcttgctggtggccatttaggttatgaggaggttcaatgcgtactaaaggatatcctaccaattggatcgagttcagattcgacagtggttagtcaagcactgctagcggcatttttgattggacagcggatgaatagagaaactgatcgtgagctcaaagcgtattgcctagcctttgatgatgaactaggtcctcctccggttgctgacgtcaagtcgttgacacactatggtgaaccatatgatggcaatacacgtttttttaagagtactctatttgttgcagcggttcgagcctgctatggtgaatcctgcctcctccacggtgttgaatggatgccacccaagaaggacaaatgcttaaattcatgggtgcaaacatacacttatccccaacacaagccaagatattgttggaggatgaaactgctggttttgcatacttgaatcttcaggaagcttgtccaccattggatggagtcatgaacttttcttattaaaactgcaagaaacatatattcgattattggactcagggagcatattaagaaacggccaccgttggctacctctgagaaagttcaacaatttgtgaggttatgcctatggatacctttaaagattgaaaactttaccttgaaagaattttcagagcctcctgatctttgaacaactaataaggtaaagatttagtaaatcactgtcacactttcttaataaattgccaggtggtttactagctttagctttcacctttcaaagtatctcttcactaggatattttacgcaaaaaaaatctcgtgggacttttttaaggtttaaggactgtcaagataattcaagtatttcttatgatgatacaatttggtgtcattgaagttgaagatctttattttttttttctcgaaagcgcaggagaactgcgcgatattatattaaagaagaaggacaattacagaagaaaacaaaagaggcgcctatggcggccagtaacaggcatacagaaacccatccatgtctaaagaagaacctaacacaaataaccacaatgctagctaactagcagggatgcctggaatgggggcggtgagcaaagacaacttttttgcaccagccatctcccataagtgaacctccaactcaactcttctaatagcatcagcaatactggg

SEQ ID NO: 42277 - DNA, 2967 bp, Zea Mays
gtccggctatctctctctccctccctgctcggctttgacctcagctcgcaatgaactctctactgcggccgccgctgccggggccgacgcctagactgagcgcgaggcgtcgggtctcgtcgccagcgccggtgcgggtcggctcggcggtgctggccggcggcgagcgcagatgccaacgggggctagcagtggcgacgtcggtggctccgtcgtggatggaggaggccggggtggcggtgctggaggagggcgggcggaggaacccgtcagtgtcggactcgtaccgcgcggcggggctgccgcagcccaacgccacggtgctggatgcgcaggcgcgggtgtgcacagggcccgcacagacgcgcccgctcggggaggagcaggccatgcgcgtcctcgacactatcctccgctccgcaattggagaactcaaagaggagccagtctctagtgcacagttaggtgcattcttcgcaggcatgacaataagagctaactcgtttccagaggccacccaatggagtgagggcgagcgacgcgccatgagcatattttggccacgccttgtgcaggtccttcctcctgaggtgaagtttatagcagaccctgaaggcacgatcttgggtgcgaatggtttagcagagcctcggtatgttggccaaggaactggagagatgagactcgtcggtgctctgagggaagtgcttgctggtggccatttaggttatgaggaggttcaatgcgtactaaaggatatcctaccaattggatcgagttcagattcgacagtggttagtcaagcactgctagcggcatttttgattggacagcggatgaatagagaaactgatcgtgagctcaaagcgtattgcctagcctttgatgatgaactaggtcctcctccggttgctgacgtcaagtcgttgacacactatggtgaaccatatgatggcaatacacgtttttttaagagtactctatttgttgcagcggttcgagcctgctatggtgaatcctgcctcctccacggtgttgaatggatgccacccaagaaggacaaatgcttaaattcatgggtgcaaacatacacttatccccaacacaagccaagatattgttggaggatgaaactgctggttttgcatacttgaatcttcaggaagcttgtccaccattatattcgattattggactcagggagcatattaagaaacggccaccgttggctacctctgagaaagttcaacaatttgtgagggcacgggggagagaatcaatggttgcaggattttatcatgaaggctatgaagatccgttgcttatgctgatgagaaggagaactgttcatgctggactagttgtaaagggtgaggaaggtgcgctctcaatgacaaccaaggaaagatcagctcatgcatcaaaaggacttcctgttaaccactgttcagggttccggacacccaacagcataaattcctctaaaactgatggtattcctagagaaagcttcagggtcattgtgaatgcccaggaacttggttttgaatccaccgaaactcccagaactgatagatcaattctaaagaacttggagttcggcctggcagcactaggtggcgagaaaggagcagcctacgaccggatagtcctcaacgcagctatggctgaccacttgctaggctgcagcggagccgaggacatcgacgctgcgctcgaccgtgcgagggaggccattgatagcggcgaagctctgagaaggctcatgagctacataaagatctcgcacagagtctcctaggctagcgctgaccccgtggcttactgattgatcctacaatttcggcttcgagccacgactcgggtatcttcttcgcggagcccgagtgcctttgccactcggtgtcggtgtttacaagccagcgtgaaatgttccctcgcctcaacgacctgtcaaaaaaaaaaaaaacagttgcaatggaacagtgccttgttgtttttgttttgccctgagatagagaagttcatgttgagtaacacgtgcagattctcctcggatcagatttatagcggcattttgaatgaaatactgtgcatggtctcgtcatggttgaaaccatgatcagatttatagagaacctggaagtttacaattagcagcagcaattgatccattacagatgttagagatgattacggcctagctcaaagtccaaaagaaaccgaggatgaccaggcatgccgatcagctgtagactcctttgggtacaaaaatgtgatcagttcacgcagaattttaatcctaccgtatactcaagtcagcgcctaagagaagagagcagcaagccttcaagggaagaacaagaaactggaaagttgtccattgccgagcccaggcattcagtgagttcgtctatttgccgcctcatcatgtacagctcttcagcccggtatttggatgcccactcttctactgtcctgataagagtcggaaacagcagaagataagtaacgatggcattaaaagaagagcacacagacaagaatacaccgtatgagctttatgggctatggctttgtgtatgacagccttgaagatggggtaacacacattgttgtcaatacagttgaagaaaacaatactggggtatatacaagtaataaaagaaggaagaactggactttacatgaaacaaaaatgttgcagatatgcgagccatttgcggaggtcctaaaacttgtcatcaacaaaaaatggtaccccaaccacttggccagggtggggctggaagccataacccatagccaataaatagttatggtactcagacaagaatagtcttttcacatcttatttcagttaattattgcagaattatgaacattaacgacaagtaatttgacaaaagaaaggaacagctcagatatcagtttgaaattcgaatgactaaatattgtcagtattct

SEQ ID NO: 42278 - DNA, 1746 bp, Zea Mays
atgaactctctactgcggccgccgctgccggggccgacgcctagactgagcgcgaggcgtcgggtctcgtcgccagcgccggtgcgggtcggctcggcggtgctggccggcggcgagcgcagatgccaacgggggctagcagtggcgacgtcggtggctccgtcgtggatggaggaggccggggtggcggtgctggaggagggcgggcggaggaacccgtcagtgtcggactcgtaccgcgcggcggggctgccgcagcccaacgccacggtgctggatgcgcaggcgcgggtgtgcacagggcccgcacagacgcgcccgctcggggaggagcaggccatgcgcgtcctcgacactatcctccgctccgcaattggagaactcaaagaggagccagtctctagtgcacagttaggtgcattcttcgcaggcatgacaataagagctaactcgtttccagaggccacccaatggagtgagggcgagcgacgcgccatgagcatattttggccacgccttgtgcaggtccttcctcctgaggtgaagtttatagcagaccctgaaggcacgatcttgggtgcgaatggtttagcagagcctcggtatgttggccaaggaactggagagatgagactcgtcggtgctctgagggaagtgcttgctggtggccatttaggttatgaggaggttcaatgcgtactaaaggatatcctaccaattggatcgagttcagattcgacagtggttagtcaagcactgctagcggcatttttgattggacagcggatgaatagagaaactgatcgtgagctcaaagcgtattgcctagcctttgatgatgaactagcggttcgagcctgctatggtgaatcctgcctcctccacggtgttgaatggatgccacccaagggtggaataacagaaggacaaatgcttaaattcatgggtgcaaacatacacttatccccaacacaagccaagatattgttggaggatgaaactgctggttttgcatacttgaatcttcaggaagcttgtccaccattggatggagtcatgaacttttcttattaaaactgcaagaaacatatattcgattattggactcagggagcatattaagaaacggccaccgttggctacctctgagaaagttcaacaatttgtgaggttatgcctatggatacctttaaagattgaaaactttaccttgaaagaattttcagagcctcctgatctttgaacaactaataaggtaaagatttagtaaatcactgtcacactttcttaataaattgccaggtggtttactagctttagctttcacctttcaaagtatctcttcactaggatattttacgcaaaaaaaatctcgtgggacttttttaaggtttaaggactgtcaagataattcaagtatttcttatgatgatacaatttggtgtcattgaagttgaagatctttattttttttttctcgaaagcgcaggagaactgcgcgatattatattaaagaagaaggacaattacagaagaaaacaaaagaggcgcctatggcggccagtaacaggcatacagaaacccatccatgtctaaagaagaacctaacacaaataaccacaatgctagctaactagcagggatgcctggaatgggggcggtgagcaaagacaacttttttgcaccagccatctcccataagtgaacctccaactcaactcttctaatagcatcagcaatactggg

SEQ ID NO: 42279 - DNA, 1765 bp, Zea Mays
atgaactctctactgcggccgccgctgccggggccgacgcctagactgagcgcgaggcgtcgggtctcgtcgccagcgccggtgcgggtcggctcggcggtgctggccggcggcgagcgcagatgccaacgggggctagcagtggcgacgtcggtggctccgtcgtggatggaggaggccggggtggcggtgctggaggagggcgggcggaggaacccgtcagtgtcggactcgtaccgcgcggcggggctgccgcagcccaacgccacggtgctggatgcgcaggcgcgggtgtgcacagggcccgcacagacgcgcccgctcggggaggagcaggccatgcgcgtcctcgacactatcctccgctccgcaattggagaactcaaagaggagccagtctctagtgcacagttaggtgcattcttcgcaggcatgacaataagagctaactcgtttccagaggccacccaatggagtgagggcgagcgacgcgccatgagcatattttggccacgccttgtgcaggtccttcctcctgaggtgaagtttatagcagaccctgaaggcacgatcttgggtgcgaatggtttagcagagcctcggtatgttggccaaggaactggagagatgagactcgtcggtgctctgagggaagtgcttgctggtggccatttaggttatgaggaggttcaatgcgtactaaaggatatcctaccaattggatcgagttcagattcgacagtggttagtcaagcactgctagcggcatttttgattggacagcggatgaatagagaaactgatcgtgagctcaaagcgtattgcctagcctttgatgatgaactaggtaactccagaaaagctagcggttcgagcctgctatggtgaatcctgcctcctccacggtgttgaatggatgccacccaagggtggaataacagaaggacaaatgcttaaattcatgggtgcaaacatacacttatccccaacacaagccaagatattgttggaggatgaaactgctggttttgcatacttgaatcttcaggaagcttgtccaccattggatggagtcatgaacttttcttattaaaactgcaagaaacatatattcgattattggactcagggagcatattaagaaacggccaccgttggctacctctgagaaagttcaacaatttgtgaggttatgcctatggatacctttaaagattgaaaactttaccttgaaagaattttcagagcctcctgatctttgaacaactaataaggtaaagatttagtaaatcactgtcacactttcttaataaattgccaggtggtttactagctttagctttcacctttcaaagtatctcttcactaggatattttacgcaaaaaaaatctcgtgggacttttttaaggtttaaggactgtcaagataattcaagtatttcttatgatgatacaatttggtgtcattgaagttgaagatctttattttttttttctcgaaagcgcaggagaactgcgcgatattatattaaagaagaaggacaattacagaagaaaacaaaagaggcgcctatggcggccagtaacaggcatacagaaacccatccatgtctaaagaagaacctaacacaaataaccacaatgctagctaactagcagggatgcctggaatgggggcggtgagcaaagacaacttttttgcaccagccatctcccataagtgaacctccaactcaactcttctaatagcatcagcaatactggg

SEQ ID NO: 42280 - DNA, 2834 bp, Zea Mays
atgaactctctactgcggccgccgctgccggggccgacgcctagactgagcgcgaggcgtcgggtctcgtcgccagcgccggtgcgggtcggctcggcggtgctggccggcggcgagcgcagatgccaacgggggctagcagtggcgacgtcggtggctccgtcgtggatggaggaggccggggtggcggtgctggaggagggcgggcggaggaacccgtcagtgtcggactcgtaccgcgcggcggggctgccgcagcccaacgccacggtgctggatgcgcaggcgcgggtgtgcacagggcccgcacagacgcgcccgctcggggaggagcaggccatgcgcgtcctcgacactatcctccgctccgcaattggagaactcaaagaggagccagtctctagtgcacagttaggtgcattcttcgcaggcatgacaataagagctaactcgtttccagaggccacccaatggagtgagggcgagcgacgcgccatgagcatattttggccacgccttgtgcaggtccttcctcctgaggtgaagtttatagcagaccctgaaggcacgatcttgggtgcgaatggtttagcagagcctcggtatgttggccaaggaactggagagatgagactcgtcggtgctctgagggaagtgcttgctggtggccatttaggttatgaggaggttcaatgcgtactaaaggatatcctaccaattggatcgagttcagattcgacagtggttagtcaagcactgctagcggcatttttgattggacagcggatgaatagagaaactgatcgtgagctcaaagcgtattgcctagcctttgatgatgaactagcggttcgagcctgctatggtgaatcctgcctcctccacggtgttgaatggatgccacccaagggtggaataacagaaggacaaatgcttaaattcatgggtgcaaacatacacttatccccaacacaagccaagatattgttggaggatgaaactgctggttttgcatacttgaatcttcaggaagcttgtccaccattatattcgattattggactcagggagcatattaagaaacggccaccgttggctacctctgagaaagttcaacaatttgtgagggcacgggggagagaatcaatggttgcaggattttatcatgaaggctatgaagatccgttgcttatgctgatgagaaggagaactgttcatgctggactagttgtaaagggtgaggaaggtgcgctctcaatgacaaccaaggaaagatcagctcatgcatcaaaaggacttcctgttaaccactgttcagggttccggacacccaacagcataaattcctctaaaactgatggtattcctagagaaagcttcagggtcattgtgaatgcccaggaacttggttttgaatccaccgaaactcccagaactgatagatcaattctaaagaacttggagttcggcctggcagcactaggtggcgagaaaggagcagcctacgaccggatagtcctcaacgcagctatggctgaccacttgctaggctgcagcggagccgaggacatcgacgctgcgctcgaccgtgcgagggaggccattgatagcggcgaagctctgagaaggctcatgagctacataaagatctcgcacagagtctcctaggctagcgctgaccccgtggcttactgattgatcctacaatttcggcttcgagccacgactcgggtatcttcttcgcggagcccgagtgcctttgccactcggtgtcggtgtttacaagccagcgtgaaatgttccctcgcctcaacgacctgtcaaaaaaaaaaaaaacagttgcaatggaacagtgccttgttgtttttgttttgccctgagatagagaagttcatgttgagtaacacgtgcagattctcctcggatcagatttatagcggcattttgaatgaaatactgtgcatggtctcgtcatggttgaaaccatgatcagatttatagagaacctggaagtttacaattagcagcagcaattgatccattacagatgttagagatgattacggcctagctcaaagtccaaaagaaaccgaggatgaccaggcatgccgatcagctgtagactcctttgggtacaaaaatgtgatcagttcacgcagaattttaatcctaccgtatactcaagtcagcgcctaagagaagagagcagcaagccttcaagggaagaacaagaaactggaaagttgtccattgccgagcccaggcattcagtgagttcgtctatttgccgcctcatcatgtacagctcttcagcccggtatttggatgcccactcttctactgtcctgataagagtcggaaacagcagaagataagtaacgatggcattaaaagaagagcacacagacaagaatacaccgtatgagctttatgggctatggctttgtgtatgacagccttgaagatggggtaacacacattgttgtcaatacagttgaagaaaacaatactggggtatatacaagtaataaaagaaggaagaactggactttacatgaaacaaaaatgttgcagatatgcgagccatttgcggaggtcctaaaacttgtcatcaacaaaaaatggtaccccaaccacttggccagggtggggctggaagccataacccatagccaataaatagttatggtactcagacaagaatagtcttttcacatcttatttcagttaattattgcagaattatgaacattaacgacaagtaatttgacaaaagaaaggaacagctcagatatcagtttgaaattcgaatgactaaatattgtcagtattct

SEQ ID NO: 42281 - DNA, 2821 bp, Zea Mays
atgaactctctactgcggccgccgctgccggggccgacgcctagactgagcgcgaggcgtcgggtctcgtcgccagcgccggtgcgggtcggctcggcggtgctggccggcggcgagcgcagatgccaacgggggctagcagtggcgacgtcggtggctccgtcgtggatggaggaggccggggtggcggtgctggaggagggcgggcggaggaacccgtcagtgtcggactcgtaccgcgcggcggggctgccgcagcccaacgccacggtgctggatgcgcaggcgcgggtgtgcacagggcccgcacagacgcgcccgctcggggaggagcaggccatgcgcgtcctcgacactatcctccgctccgcaattggagaactcaaagaggagccagtctctagtgcacagttaggtgcattcttcgcaggcatgacaataagagctaactcgtttccagaggccacccaatggagtgagggcgagcgacgcgccatgagcatattttggccacgccttgtgcaggtccttcctcctgaggtgaagtttatagcagaccctgaaggcacgatcttgggtgcgaatggtttagcagagcctcggtatgttggccaaggaactggagagatgagactcgtcggtgctctgagggaagtgcttgctggtggccatttaggttatgaggaggttcaatgcgtactaaaggatatcctaccaattggatcgagttcagattcgacagtggttagtcaagcactgctagcggcatttttgattggacagcggatgaatagagaaactgatcgtgagctcaaagcgtattgcctagcctttgatgatgaactagcggttcgagcctgctatggtgaatcctgcctcctccacggtgttgaatggatgccacccaagaaggacaaatgcttaaattcatgggtgcaaacatacacttatccccaacacaagccaagatattgttggaggatgaaactgctggttttgcatacttgaatcttcaggaagcttgtccaccattatattcgattattggactcagggagcatattaagaaacggccaccgttggctacctctgagaaagttcaacaatttgtgagggcacgggggagagaatcaatggttgcaggattttatcatgaaggctatgaagatccgttgcttatgctgatgagaaggagaactgttcatgctggactagttgtaaagggtgaggaaggtgcgctctcaatgacaaccaaggaaagatcagctcatgcatcaaaaggacttcctgttaaccactgttcagggttccggacacccaacagcataaattcctctaaaactgatggtattcctagagaaagcttcagggtcattgtgaatgcccaggaacttggttttgaatccaccgaaactcccagaactgatagatcaattctaaagaacttggagttcggcctggcagcactaggtggcgagaaaggagcagcctacgaccggatagtcctcaacgcagctatggctgaccacttgctaggctgcagcggagccgaggacatcgacgctgcgctcgaccgtgcgagggaggccattgatagcggcgaagctctgagaaggctcatgagctacataaagatctcgcacagagtctcctaggctagcgctgaccccgtggcttactgattgatcctacaatttcggcttcgagccacgactcgggtatcttcttcgcggagcccgagtgcctttgccactcggtgtcggtgtttacaagccagcgtgaaatgttccctcgcctcaacgacctgtcaaaaaaaaaaaaaacagttgcaatggaacagtgccttgttgtttttgttttgccctgagatagagaagttcatgttgagtaacacgtgcagattctcctcggatcagatttatagcggcattttgaatgaaatactgtgcatggtctcgtcatggttgaaaccatgatcagatttatagagaacctggaagtttacaattagcagcagcaattgatccattacagatgttagagatgattacggcctagctcaaagtccaaaagaaaccgaggatgaccaggcatgccgatcagctgtagactcctttgggtacaaaaatgtgatcagttcacgcagaattttaatcctaccgtatactcaagtcagcgcctaagagaagagagcagcaagccttcaagggaagaacaagaaactggaaagttgtccattgccgagcccaggcattcagtgagttcgtctatttgccgcctcatcatgtacagctcttcagcccggtatttggatgcccactcttctactgtcctgataagagtcggaaacagcagaagataagtaacgatggcattaaaagaagagcacacagacaagaatacaccgtatgagctttatgggctatggctttgtgtatgacagccttgaagatggggtaacacacattgttgtcaatacagttgaagaaaacaatactggggtatatacaagtaataaaagaaggaagaactggactttacatgaaacaaaaatgttgcagatatgcgagccatttgcggaggtcctaaaacttgtcatcaacaaaaaatggtaccccaaccacttggccagggtggggctggaagccataacccatagccaataaatagttatggtactcagacaagaatagtcttttcacatcttatttcagttaattattgcagaattatgaacattaacgacaagtaatttgacaaaagaaaggaacagctcagatatcagtttgaaattcgaatgactaaatattgtcagtattct

SEQ ID NO: 42282 - DNA, 2853 bp, Zea Mays
atgaactctctactgcggccgccgctgccggggccgacgcctagactgagcgcgaggcgtcgggtctcgtcgccagcgccggtgcgggtcggctcggcggtgctggccggcggcgagcgcagatgccaacgggggctagcagtggcgacgtcggtggctccgtcgtggatggaggaggccggggtggcggtgctggaggagggcgggcggaggaacccgtcagtgtcggactcgtaccgcgcggcggggctgccgcagcccaacgccacggtgctggatgcgcaggcgcgggtgtgcacagggcccgcacagacgcgcccgctcggggaggagcaggccatgcgcgtcctcgacactatcctccgctccgcaattggagaactcaaagaggagccagtctctagtgcacagttaggtgcattcttcgcaggcatgacaataagagctaactcgtttccagaggccacccaatggagtgagggcgagcgacgcgccatgagcatattttggccacgccttgtgcaggtccttcctcctgaggtgaagtttatagcagaccctgaaggcacgatcttgggtgcgaatggtttagcagagcctcggtatgttggccaaggaactggagagatgagactcgtcggtgctctgagggaagtgcttgctggtggccatttaggttatgaggaggttcaatgcgtactaaaggatatcctaccaattggatcgagttcagattcgacagtggttagtcaagcactgctagcggcatttttgattggacagcggatgaatagagaaactgatcgtgagctcaaagcgtattgcctagcctttgatgatgaactaggtaactccagaaaagctagcggttcgagcctgctatggtgaatcctgcctcctccacggtgttgaatggatgccacccaagggtggaataacagaaggacaaatgcttaaattcatgggtgcaaacatacacttatccccaacacaagccaagatattgttggaggatgaaactgctggttttgcatacttgaatcttcaggaagcttgtccaccattatattcgattattggactcagggagcatattaagaaacggccaccgttggctacctctgagaaagttcaacaatttgtgagggcacgggggagagaatcaatggttgcaggattttatcatgaaggctatgaagatccgttgcttatgctgatgagaaggagaactgttcatgctggactagttgtaaagggtgaggaaggtgcgctctcaatgacaaccaaggaaagatcagctcatgcatcaaaaggacttcctgttaaccactgttcagggttccggacacccaacagcataaattcctctaaaactgatggtattcctagagaaagcttcagggtcattgtgaatgcccaggaacttggttttgaatccaccgaaactcccagaactgatagatcaattctaaagaacttggagttcggcctggcagcactaggtggcgagaaaggagcagcctacgaccggatagtcctcaacgcagctatggctgaccacttgctaggctgcagcggagccgaggacatcgacgctgcgctcgaccgtgcgagggaggccattgatagcggcgaagctctgagaaggctcatgagctacataaagatctcgcacagagtctcctaggctagcgctgaccccgtggcttactgattgatcctacaatttcggcttcgagccacgactcgggtatcttcttcgcggagcccgagtgcctttgccactcggtgtcggtgtttacaagccagcgtgaaatgttccctcgcctcaacgacctgtcaaaaaaaaaaaaaacagttgcaatggaacagtgccttgttgtttttgttttgccctgagatagagaagttcatgttgagtaacacgtgcagattctcctcggatcagatttatagcggcattttgaatgaaatactgtgcatggtctcgtcatggttgaaaccatgatcagatttatagagaacctggaagtttacaattagcagcagcaattgatccattacagatgttagagatgattacggcctagctcaaagtccaaaagaaaccgaggatgaccaggcatgccgatcagctgtagactcctttgggtacaaaaatgtgatcagttcacgcagaattttaatcctaccgtatactcaagtcagcgcctaagagaagagagcagcaagccttcaagggaagaacaagaaactggaaagttgtccattgccgagcccaggcattcagtgagttcgtctatttgccgcctcatcatgtacagctcttcagcccggtatttggatgcccactcttctactgtcctgataagagtcggaaacagcagaagataagtaacgatggcattaaaagaagagcacacagacaagaatacaccgtatgagctttatgggctatggctttgtgtatgacagccttgaagatggggtaacacacattgttgtcaatacagttgaagaaaacaatactggggtatatacaagtaataaaagaaggaagaactggactttacatgaaacaaaaatgttgcagatatgcgagccatttgcggaggtcctaaaacttgtcatcaacaaaaaatggtaccccaaccacttggccagggtggggctggaagccataacccatagccaataaatagttatggtactcagacaagaatagtcttttcacatcttatttcagttaattattgcagaattatgaacattaacgacaagtaatttgacaaaagaaaggaacagctcagatatcagtttgaaattcgaatgactaaatattgtcagtattct

SEQ ID NO: 42283 - DNA, 2883 bp, Zea Mays
atgaactctctactgcggccgccgctgccggggccgacgcctagactgagcgcgaggcgtcgggtctcgtcgccagcgccggtgcgggtcggctcggcggtgctggccggcggcgagcgcagatgccaacgggggctagcagtggcgacgtcggtggctccgtcgtggatggaggaggccggggtggcggtgctggaggagggcgggcggaggaacccgtcagtgtcggactcgtaccgcgcggcggggctgccgcagcccaacgccacggtgctggatgcgcaggcgcgggtgtgcacagggcccgcacagacgcgcccgctcggggaggagcaggccatgcgcgtcctcgacactatcctccgctccgcaattggagaactcaaagaggagccagtctctagtgcacagttaggtgcattcttcgcaggcatgacaataagagctaactcgtttccagaggccacccaatggagtgagggcgagcgacgcgccatgagcatattttggccacgccttgtgcaggtccttcctcctgaggtgaagtttatagcagaccctgaaggcacgatcttgggtgcgaatggtttagcagagcctcggtatgttggccaaggaactggagagatgagactcgtcggtgctctgagggaagtgcttgctggtggccatttaggttatgaggaggttcaatgcgtactaaaggatatcctaccaattggatcgagttcagattcgacagtggttagtcaagcactgctagcggcatttttgattggacagcggatgaatagagaaactgatcgtgagctcaaagcgtattgcctagcctttgatgatgaactaggtaactccagaaaagctagcggttcgagcctgctatggtgaatcctgcctcctccacggtgttgaatggatgccacccaagaaggacaaatgcttaaattcatgggtgcaaacatacacttatccccaacacaagccaagatattgttggaggatgaaactgctggttttgcatacttgaatcttcaggaagcttgtccaccattggatggagtcatgaacttttcttattaaaactgcaagaaacatatattcgattattggactcagggagcatattaagaaacggccaccgttggctacctctgagaaagttcaacaatttgtgagggcacgggggagagaatcaatggttgcaggattttatcatgaaggctatgaagatccgttgcttatgctgatgagaaggagaactgttcatgctggactagttgtaaagggtgaggaaggtgcgctctcaatgacaaccaaggaaagatcagctcatgcatcaaaaggacttcctgttaaccactgttcagggttccggacacccaacagcataaattcctctaaaactgatggtattcctagagaaagcttcagggtcattgtgaatgcccaggaacttggttttgaatccaccgaaactcccagaactgatagatcaattctaaagaacttggagttcggcctggcagcactaggtggcgagaaaggagcagcctacgaccggatagtcctcaacgcagctatggctgaccacttgctaggctgcagcggagccgaggacatcgacgctgcgctcgaccgtgcgagggaggccattgatagcggcgaagctctgagaaggctcatgagctacataaagatctcgcacagagtctcctaggctagcgctgaccccgtggcttactgattgatcctacaatttcggcttcgagccacgactcgggtatcttcttcgcggagcccgagtgcctttgccactcggtgtcggtgtttacaagccagcgtgaaatgttccctcgcctcaacgacctgtcaaaaaaaaaaaaaacagttgcaatggaacagtgccttgttgtttttgttttgccctgagatagagaagttcatgttgagtaacacgtgcagattctcctcggatcagatttatagcggcattttgaatgaaatactgtgcatggtctcgtcatggttgaaaccatgatcagatttatagagaacctggaagtttacaattagcagcagcaattgatccattacagatgttagagatgattacggcctagctcaaagtccaaaagaaaccgaggatgaccaggcatgccgatcagctgtagactcctttgggtacaaaaatgtgatcagttcacgcagaattttaatcctaccgtatactcaagtcagcgcctaagagaagagagcagcaagccttcaagggaagaacaagaaactggaaagttgtccattgccgagcccaggcattcagtgagttcgtctatttgccgcctcatcatgtacagctcttcagcccggtatttggatgcccactcttctactgtcctgataagagtcggaaacagcagaagataagtaacgatggcattaaaagaagagcacacagacaagaatacaccgtatgagctttatgggctatggctttgtgtatgacagccttgaagatggggtaacacacattgttgtcaatacagttgaagaaaacaatactggggtatatacaagtaataaaagaaggaagaactggactttacatgaaacaaaaatgttgcagatatgcgagccatttgcggaggtcctaaaacttgtcatcaacaaaaaatggtaccccaaccacttggccagggtggggctggaagccataacccatagccaataaatagttatggtactcagacaagaatagtcttttcacatcttatttcagttaattattgcagaattatgaacattaacgacaagtaatttgacaaaagaaaggaacagctcagatatcagtttgaaattcgaatgactaaatattgtcagtattct

SEQ ID NO: 42284 - DNA, 2840 bp, Zea Mays
atgaactctctactgcggccgccgctgccggggccgacgcctagactgagcgcgaggcgtcgggtctcgtcgccagcgccggtgcgggtcggctcggcggtgctggccggcggcgagcgcagatgccaacgggggctagcagtggcgacgtcggtggctccgtcgtggatggaggaggccggggtggcggtgctggaggagggcgggcggaggaacccgtcagtgtcggactcgtaccgcgcggcggggctgccgcagcccaacgccacggtgctggatgcgcaggcgcgggtgtgcacagggcccgcacagacgcgcccgctcggggaggagcaggccatgcgcgtcctcgacactatcctccgctccgcaattggagaactcaaagaggagccagtctctagtgcacagttaggtgcattcttcgcaggcatgacaataagagctaactcgtttccagaggccacccaatggagtgagggcgagcgacgcgccatgagcatattttggccacgccttgtgcaggtccttcctcctgaggtgaagtttatagcagaccctgaaggcacgatcttgggtgcgaatggtttagcagagcctcggtatgttggccaaggaactggagagatgagactcgtcggtgctctgagggaagtgcttgctggtggccatttaggttatgaggaggttcaatgcgtactaaaggatatcctaccaattggatcgagttcagattcgacagtggttagtcaagcactgctagcggcatttttgattggacagcggatgaatagagaaactgatcgtgagctcaaagcgtattgcctagcctttgatgatgaactaggtaactccagaaaagctagcggttcgagcctgctatggtgaatcctgcctcctccacggtgttgaatggatgccacccaagaaggacaaatgcttaaattcatgggtgcaaacatacacttatccccaacacaagccaagatattgttggaggatgaaactgctggttttgcatacttgaatcttcaggaagcttgtccaccattatattcgattattggactcagggagcatattaagaaacggccaccgttggctacctctgagaaagttcaacaatttgtgagggcacgggggagagaatcaatggttgcaggattttatcatgaaggctatgaagatccgttgcttatgctgatgagaaggagaactgttcatgctggactagttgtaaagggtgaggaaggtgcgctctcaatgacaaccaaggaaagatcagctcatgcatcaaaaggacttcctgttaaccactgttcagggttccggacacccaacagcataaattcctctaaaactgatggtattcctagagaaagcttcagggtcattgtgaatgcccaggaacttggttttgaatccaccgaaactcccagaactgatagatcaattctaaagaacttggagttcggcctggcagcactaggtggcgagaaaggagcagcctacgaccggatagtcctcaacgcagctatggctgaccacttgctaggctgcagcggagccgaggacatcgacgctgcgctcgaccgtgcgagggaggccattgatagcggcgaagctctgagaaggctcatgagctacataaagatctcgcacagagtctcctaggctagcgctgaccccgtggcttactgattgatcctacaatttcggcttcgagccacgactcgggtatcttcttcgcggagcccgagtgcctttgccactcggtgtcggtgtttacaagccagcgtgaaatgttccctcgcctcaacgacctgtcaaaaaaaaaaaaaacagttgcaatggaacagtgccttgttgtttttgttttgccctgagatagagaagttcatgttgagtaacacgtgcagattctcctcggatcagatttatagcggcattttgaatgaaatactgtgcatggtctcgtcatggttgaaaccatgatcagatttatagagaacctggaagtttacaattagcagcagcaattgatccattacagatgttagagatgattacggcctagctcaaagtccaaaagaaaccgaggatgaccaggcatgccgatcagctgtagactcctttgggtacaaaaatgtgatcagttcacgcagaattttaatcctaccgtatactcaagtcagcgcctaagagaagagagcagcaagccttcaagggaagaacaagaaactggaaagttgtccattgccgagcccaggcattcagtgagttcgtctatttgccgcctcatcatgtacagctcttcagcccggtatttggatgcccactcttctactgtcctgataagagtcggaaacagcagaagataagtaacgatggcattaaaagaagagcacacagacaagaatacaccgtatgagctttatgggctatggctttgtgtatgacagccttgaagatggggtaacacacattgttgtcaatacagttgaagaaaacaatactggggtatatacaagtaataaaagaaggaagaactggactttacatgaaacaaaaatgttgcagatatgcgagccatttgcggaggtcctaaaacttgtcatcaacaaaaaatggtaccccaaccacttggccagggtggggctggaagccataacccatagccaataaatagttatggtactcagacaagaatagtcttttcacatcttatttcagttaattattgcagaattatgaacattaacgacaagtaatttgacaaaagaaaggaacagctcagatatcagtttgaaattcgaatgactaaatattgtcagtattct

SEQ ID NO: 42285 - DNA, 2771 bp, Zea Mays
ggctgcttcaaaacgagctgattttgctaataaagcgcgctgcttgattttggcgccagtccagcaaatcattgatgcccattattagaatttggaagctcaatgaaagcttgtttgtcttagaaactccgcatcgtcataaacagcaattctgttactgcaattggagaactcaaagaggagccagtctctagtgcacagttaggtgcattcttcgcaggcatgacaataagagctaactcgtttccagaggccacccaatggagtgagggcgagcgacgcgccatgagcatattttggccacgccttgtgcaggtccttcctcctgaggtgaagtttatagcagaccctgaaggcacgatcttgggtgcgaatggtttagcagagcctcggtatgttggccaaggaactggagagatgagactcgtcggtgctctgagggaagtgcttgctggtggccatttaggttatgaggaggttcaatgcgtactaaaggatatcctaccaattggatcgagttcagattcgacagtggttagtcaagcactgctagcggcatttttgattggacagcggatgaatagagaaactgatcgtgagctcaaagcgtattgcctagcctttgatgatgaactaggtcctcctccggttgctgacgtcaagtcgttgacacactatggtgaaccatatgatggcaatacacgtttttttaagagtactctatttgttgcagcggttcgagcctgctatggtgaatcctgcctcctccacggtgttgaatggatgccacccaaggttttcagggtggaataacagaaggacaaatgcttaaattcatgggtgcaaacatacacttatccccaacacaagccaagatattgttggaggatgaaactgctggttttgcatacttgaatcttcaggaagcttgtccaccattggatggagtcatgaacttttcttattaaaactgcaagaaacatatattcgattattggactcagggagcatattaagaaacggccaccgttggctacctctgagaaagttcaacaatttgtgagggcacgggggagagaatcaatggttgcaggattttatcatgaaggctatgaagatccgttgcttatgctgatgagaaggagaactgttcatgctggactagttgtaaagggtgaggaaggtgcgctctcaatgacaaccaaggaaagatcagctcatgcatcaaaaggacttcctgttaaccactgttcagggttccggacacccaacagcataaattcctctaaaactgatggtattcctagagaaagcttcagggtcattgtgaatgcccaggaacttggttttgaatccaccgaaactcccagaactgatagatcaattctaaagaacttggagttcggcctggcagcactaggtggcgagaaaggagcagcctacgaccggatagtcctcaacgcagctatggctgaccacttgctaggctgcagcggagccgaggacatcgacgctgcgctcgaccgtgcgagggaggccattgatagcggcgaagctctgagaaggctcatgagctacataaagatctcgcacagagtctcctaggctagcgctgaccccgtggcttactgattgatcctacaatttcggcttcgagccacgactcgggtatcttcttcgcggagcccgagtgcctttgccactcggtgtcggtgtttacaagccagcgtgaaatgttccctcgcctcaacgacctgtcaaaaaaaaaaaaaacagttgcaatggaacagtgccttgttgtttttgttttgccctgagatagagaagttcatgttgagtaacacgtgcagattctcctcggatcagatttatagcggcattttgaatgaaatactgtgcatggtctcgtcatggttgaaaccatgatcagatttatagagaacctggaagtttacaattagcagcagcaattgatccattacagatgttagagatgattacggcctagctcaaagtccaaaagaaaccgaggatgaccaggcatgccgatcagctgtagactcctttgggtacaaaaatgtgatcagttcacgcagaattttaatcctaccgtatactcaagtcagcgcctaagagaagagagcagcaagccttcaagggaagaacaagaaactggaaagttgtccattgccgagcccaggcattcagtgagttcgtctatttgccgcctcatcatgtacagctcttcagcccggtatttggatgcccactcttctactgtcctgataagagtcggaaacagcagaagataagtaacgatggcattaaaagaagagcacacagacaagaatacaccgtatgagctttatgggctatggctttgtgtatgacagccttgaagatggggtaacacacattgttgtcaatacagttgaagaaaacaatactggggtatatacaagtaataaaagaaggaagaactggactttacatgaaacaaaaatgttgcagatatgcgagccatttgcggaggtcctaaaacttgtcatcaacaaaaaatggtaccccaaccacttggccagggtggggctggaagccataacccatagccaataaatagttatggtactcagacaagaatagtcttttcacatcttatttcagttaattattgcagaattatgaacattaacgacaagtaatttgacaaaagaaaggaacagctcagatatcagtttgaaattcgaatgactaaatattgtcagtattct

SEQ ID NO: 42286 - DNA, 898 bp, Zea Mays
cagaaaagctagcggttcgagcctgctatggtgaatcctgcctcctccacggtgttgaatggatgccacccaagaaggacaaatgcttaaattcatgggtgcaaacatacacttatccccaacacaagccaagatattgttggaggatgaaactgctggttttgcatacttgaatcttcaggaagcttgtccaccattggatggagtcatgaacttttcttattaaaactgcaagaaacatatattcgattattggactcagggagcatattaagaaacggccaccgttggctacctctgagaaagttcaacaatttgtgaggttatgcctatggatacctttaaagattgaaaactttaccttgaaagaattttcagagcctcctgatctttgaacaactaataaggtaaagatttagtaaatcactgtcacactttcttaataaattgccaggtggtttactagctttagctttcacctttcaaagtatctcttcactaggatattttacgcaaaaaaaatctcgtgggacttttttaaggtttaaggactgtcaagataattcaagtatttcttatgatgatacaatttggtgtcattgaagttgaagatctttattttttttttctcgaaagcgcaggagaactgcgcgatattatattaaagaagaaggacaattacagaagaaaacaaaagaggcgcctatggcggccagtaacaggcatacagaaacccatccatgtctaaagaagaacctaacacaaataaccacaatgctagctaactagcagggatgcctggaatgggggcggtgagcaaagacaacttttttgcaccagccatctcccataagtgaacctccaactcaactcttctaatagcatcagcaatactggg

SEQ ID NO: 42287 - DNA, 1016 bp, Zea Mays
ctttattgctgagaataccatgaacagtcttccaagaagatgcctgcaaagcgcagtggagcactggctgtgactgtgagggtcgcttctactactactactcgtccttccagaaaaaaggttgttgatccaagaacaaggataaataaagccggccgaccatgcacgcatataaaatttctctgccgccgccgccgccgccgatggttacctggaacatggaatccagtgcaggggaagcagatcgacaagtgtaatcggattctgccaattgtctatacagtttcttaggtagaaccgaatggtccggtcctcaagcgaatttttaatcctgttgatttatgcttttttgcgggggggaaagtctggaattcgtcagagctgagttaacgaatccttctcaggccatatctgcgcgtgatagattgtgcgcgcgcgaatcgccatggcagcccaccagtccaccaccattctctgataggatcttctgagctcctgatacactgttaacgaatccttatcattgccaatgaacagacttttaatagcgcacttctacgggcctttattccaagccttattatatattcggttacttgattttactaccattttgtaaaagttttttttttattctgcataacctttgcatctctagagaagatatttcttgctatatacatgatatattcgtgatccattgtagagacgggaaaaaaacaagagagagagagagagagagatagagagagagagagagagagagagagagagcaaatggaactccctggcctcctggccactgactgtagcttctggagcaatgtcttgcgaggtttcaatgtccggcggcagtgcggtccttttcttatccaccggctttccggtgaccggcggcgcatctgctgccgacccggcgacagtgggcagacccgagggcggagaatattccgggcggctctcttgacatatcctcctctgcctctgtgtggatggatcgatggagacgaagaaag

SEQ ID NO: 42288 - DNA, 4036 bp, Zea Mays
gtctgcctcccctcctcgatacttgcgttgcgtgaattaccagtaccaggtatagtcctcttcttcttgcgcggtggctgcgccgccgtagtcgtagtcggcgcgccttggccggacgccgcagacacacagcctgcctcaccgggtagcgctgctgccaactgtagctaatctggtcttgctggtccccatccctaacaccaaagaatgccaccacttcctcccgatttatcctggcaccaccagctcgaacacgccaacactgcttctccttcattcctgatggtcaatttggcccgttgctagaaatagggccggcagtgttcttcgtccttccccttcttcgttggaacaagcaatacttaacaagtgagatcggcatggcaaccaacaagaccatgacgccctcaatttcgggctgggccgagcgttcgttcgatcgagatgatatggcccaacaatgaactgctctttactttttatttcccttttgtcggaggaagccatgaacgacggcgtcgctaggtcgccgagtcgccgacgctgtcaactccctgcggcatcacaatccatgtcgctctaggcgtgggctaagcatcaagcgacccgacgctcgccgaatcaacagcagcgccagcgaaaatcggaccctagcgacgctctccgaccaaaccaagcagcggcgcggccacttcagcgctcaggcagtggctcggccacatccaggagagggccagtggggaaggcgcggcgccaaatcgaggaggggtcgccgccagggcggctggacggcgccggctcgccggctccccgtggccaggcggccagccgcctccgtagccgctcctgacatctctgcgttgctgcaacagcatacggctgcatggcgcacagcggcacaagtacagccgcacaggcacacgaaacctcatttgccacaccaaagctcaaccaggatgttcccgtgggagatggacattgatggagagtcgagcaaaactctgggacagatggaagacctgactcagagctctgccacttatacgtcacagatgttgctttccaaccttgcttcttctgggatcaaagaaaaaattccattggagaatgagagttgtggcatttgtagagacatcgtcatcgacagaggagttttggattgttgctcacactggttttgctatacatgtattgacaactgggccgccatcacaaatcggtgccccctttgcaaaagtgaattccaacacataacatgcactccagtatatggtacgattggagctactgacgaagatgaatactctttaaccagctgtgatgatgattggtatgggcaagaggaaagcagcacactttccttcccgtcatactatattgatgcagaagccgtagtttgtttggatgatggtgattgcaagattcggaatggacttgtggcagctgaggatgattcaactttagatacatctattgcttgtgattcctgtgataaatggtaccatgctatttgtgtggcgttcaatgcaacaatggcatctgacagttcatggctctgcccaagatgcaagtttaacgaagtggaatatgaggcaaatgtaatcttgaagcaaaaccttggtgaggactgtgtgattggttctgataggacatgtaccaacgcatcattttctgggagggtgtcagtatctgttgctgatgagggagaaactgcccttgttgtatcaatggtgggtgcacattctgaaactaggggtggtctatcagaagcttcactaggacttgagacagcacatgaaacatttaactgcagtccatacccaagccattcaaaagatgtccttgttgcagatgctagttccttgaggaacacagatattgtcagtagatcccagaataaaccttctgaaataaatgttgtccacactctttgttctgagcctacagaaacatcactacaattttcaccaatacgtgagccagcaacaaccatatttagctcagagcaggataacatgtcaactgaacggttggaagtgccaaagcttgtgtcatcttgtccagtagtagataacagcaaggaggctaaaagtactggagaggagaatgcagcgcagcaaagcaataatgaattatcttctgtaatcaaatctccacaacctgcctcatcagatgcagttcatcagatgaaaactgcacaaaacctacagttgccacttaggcatgatgagcatagtagcgatgacaggaaagaagaacacattgaatctggaaatgaaatgatccatcctgcgaagaaagcaaaactggaagtgcaagaggacattaatgtaatcggaaactttgatttttcttcaatacatagtcatactactagtcctgcaaaagctattaccgacgacattatgtcagagtctgttgcacaacagaaatccattcctgatataatgagcattgttgacggtgaggtttacagaagggatcctggtagagagctggctaaacctgtaggaagaagagcaggagataagcctggtcctagagtgaaaaagatcttccgaaaggaagaaggaaaagaatcatctgccttggttcaaaagctacagaaagagattaaggaagtagttagagatacaggcacaaatatacttgagaaggatgaatcttttgatgaaaaactgttgactgcgttccgggcagctatagggaaatcagtggatggaccagccaaaagtactaacaccaatcaattaataagaacaaggaggtcattgcttcagaagggcaagaaacgtgagaatttgaccaaaaagttgtatggaacatctacaggaagaagaagaagcgattggcatcgtgattgggaagttgaattctggaaataccgttgctccccaggaataaatcctgaaaagattgagacattgcaatcagtacttcagctactaaagaaatcctctgaaatggacaaggaaagtgctaaggggaaaagggaagagaacaacaacagttccattttgtctaggttgtatttagctgatgcatcagttgttcccaggaaggatgatattaggcctctctctgcccttgcaggatgtgcgccattagaaaaaagtagccaaattaaagctagttgtaacaaatcgtctagcatacctgcaggaggcaacgagacaatgaaaatcagttcacccagcagcactgggaaagcatcaagctattcaattctgaataaagaggcacctagcagaagagaaaatagaaatagccagccctcccaggacaagagaaaccaatcctctggtgatatcaagcaggacaaaagaaaatgggctcttgagatcctggcaagaaaaaatgccagttctattacaaataaagatcaaactggaggcaatgatgctcttaagggaaacttccctctactggcacaacttccggttgatatgaggccgcagctggcagctggcagcaacaaaaaggttccggtatcagttagacaggcacaatttcaccgaattgctgagcattatttgcagaaagcaaatttggatgtcattcgcagatgtgcagatactgaattggccattgctgatgctgtcaatgtagaaaagggtatttatgaaaggtcaaatagcaaatcaatttatgtgaatctttgctctcaggctactcgccagcatgccaaggcaaaatctgataatgacacttcaactctaaccaaaaggactgaatcaggcagtgatcagatatcacaggaagctacatctgagggtaccaatgttagtggcagtgatatggaagaggatctaaacagagcagctatctccaatcaaaagaatgaactagaggatgatactgccccagaacatattgtgcacaaggatactgttagcttcaacagtgcagaagacgcactaaggaaagcgggcctttttgattcccctcctaacagtcctgagagagggaacacggcggttgaaggtaactctgaatccacggcagtttctaattgtcctaagttttcacaaaagaa

SEQ ID NO: 42289 - DNA, 3093 bp, Zea Mays
gtctgcctcccctcctcgatacttgcgttgcgtgaattaccagtaccagcctcatttgccacaccaaagctcaaccaggatgttcccgtgggagatggacattgatggagagtcgagcaaaactctgggacagatggaagacctggaaaaaattccattggagaatgagagttgtggcatttgtagagacatcgtcatcgacagaggagttttggattgttgctcacactggttttgctatacatgtattgacaactgggccgccatcacaaatcggtgccccctttgcaaaagtgaattccaacacataacatgcactccagtatatggtacgattggagctactgacgaagatgaatactctttaaccagctgtgatgatgattggtatgggcaagaggaaagcagcacactttccttcccgtcatactatattgatgcagaagccgtagtttgtttggatgatggtgattgcaagattcggaatggacttgtggcagctgaggatgattcaactttagatacatctattgcttgtgattcctgtgataaatggtaccatgctatttgtgtggcgttcaatgcaacaatggcatctgacagttcatggctctgcccaagatgcaagtttaacgaagtggaatatgaggcaaatgtaatcttgaagcaaaaccttggtgaggactgtgtgattggttctgataggacatgtaccaacgcatcattttctgggagggtgtcagtatctgttgctgatgagggagaaactgcccttgttgtatcaatggtgggtgcacattctgaaactaggggtggtctatcagaagcttcactaggacttgagacagcacatgaaacatttaactgcagtccatacccaagccattcaaaagatgtccttgttgcagatgctagttccttgaggaacacagatattgtcagtagatcccagaataaaccttctgaaataaatgttgtccacactctttgttctgagcctacagaaacatcactacaattttcaccaatacgtgagccagcaacaaccatatttagctcagagcaggataacatgtcaactgaacggttggaagtgccaaagcttgtgtcatcttgtccagtagtagataacagcaaggaggctaaaagtactggagaggagaatgcagcgcagcaaagcaataatgaattatcttctgtaatcaaatctccacaacctgcctcatcagatgcagttcatcagatgaaaactgcacaaaacctacagttgccacttaggcatgatgagcatagtagcgatgacaggaaagaagaacacattgaatctggaaatgaaatgatccatcctgcgaagaaagcaaaactggaagtgcaagaggacattaatgtaatcggaaactttgatttttcttcaatacatagtcatactactagtcctgcaaaagctattaccgacgacattatgtcagagtctgttgcacaacagaaatccattcctgatataatgagcattgttgacggtgaggtttacagaagggatcctggtagagagctggctaaacctgtaggaagaagagcaggagataagcctggtcctagagtgaaaaagatcttccgaaaggaagaaggaaaagaatcatctgccttggttcaaaagctacagaaagagattaaggaagtagttagagatacaggcacaaatatacttgagaaggatgaatcttttgatgaaaaactgttgactgcgttccgggcagctatagggaaatcagtggatggaccagccaaaagtactaacaccaatcaattaataagaacaaggaggtcattgcttcagaagggcaagaaacgtgagaatttgaccaaaaagttgtatggaacatctacaggaagaagaagaagcgattggcatcgtgattgggaagttgaattctggaaataccgttgctccccaggaataaatcctgaaaagattgagacattgcaatcagtacttcagctactaaagaaatcctctgaaatggacaaggaaagtgctaaggggaaaagggaagagaacaacaacagttccattttgtctaggttgtatttagctgatgcatcagttgttcccaggaaggatgatattaggcctctctctgcccttgcaggatgtgcgccattagaaaaaagtagccaaattaaagctagttgtaacaaatcgtctagcatacctgcaggaggcaacgagacaatgaaaatcagttcacccagcagcactgggaaagcatcaagctattcaattctgaataaagaggcacctagcagaagagaaaatagaaatagccagccctcccaggacaagagaaaccaatcctctggtgatatcaagcaggacaaaagaaaatgggctcttgagatcctggcaagaaaaaatgccagttctattacaaataaagatcaaactggaggcaatgatgctcttaagggaaacttccctctactggcacaacttccggttgatatgaggccgcagctggcagctggcagcaacaaaaaggttccggtatcagttagacaggcacaatttcaccgaattgctgagcattatttgcagaaagcaaatttggatgtcattcgcagatgtgcagatactgaattggccattgctgatgctgtcaatgtagaaaagggtatttatgaaaggtcaaatagcaaatcaatttatgtgaatctttgctctcaggctactcgccagcatgccaaggcaaaatctgataatgacacttcaactctaaccaaaaggactgaatcaggcagtgatcagatatcacaggaagctacatctgagggtaccaatgttagtggcagtgatatggaagaggatctaaacagagcagctatctccaatcaaaagaatgaactagaggatgatactgccccagaacatattgtgcacaaggatactgttagcttcaacagtgcagaagacgcactaaggaaagcgggcctttttgattcccctcctaacagtcctgagagagggaacacggcggttgaaggtaactctgaatccacggcagtttctaattgtcctaagttttcacaaaagaa

SEQ ID NO: 42290 - DNA, 3962 bp, Zea Mays
ctgcctcccctcctcgatacttgcgttgcgtgaattaccagtaccaggtatagtcctcttcttcttgcgcggtggctgcgccgccgtagtcgtagtcggcgcgccttggccggacgccgcagacacacagcctgcctcaccgggtagcgctgctgccaactgtagctaatctggtcttgctggtccccatccctaacaccaaagaatgccaccacttcctcccgatttatcctggcaccaccagctcgaacacgccaacactgcttctccttcattcctgatggtcaatttggcccgttgctagaaatagggccggcagtgttcttcgtccttccccttcttcgttggaacaagcaatacttaacaagtgagatcggcatggcaaccaacaagaccatgacgccctcaatttcgggctgggccgagcgttcgttcgatcgagatgatatggcccaacaatgaactgctctttactttttatttcccttttgtcggaggaagccatgaacgacggcgtcgctaggtcgccgagtcgccgacgctgtcaactccctgcggcatcacaatccatgtcgctctaggcgtgggctaagcatcaagcgacccgacgctcgccgaatcaacagcagcgccagcgaaaatcggaccctagcgacgctctccgaccaaaccaagcagcggcgcggccacttcagcgctcaggcagtggctcggccacatccaggagagggccagtggggaaggcgcggcgccaaatcgaggaggggtcgccgccagggcggctggacggcgccggctcgccggctccccgtggccaggcggccagccgcctccgtagccgctcctgacatctctgcgttgctgcaacagcatacggctgcatggcgcacagcggcacaagtacagccgcacaggcacacgaaacctcatttgccacaccaaagctcaaccaggatgttcccgtgggagatggacattgatggagagtcgagcaaaactctgggacagatggaagacctggaaaaaattccattggagaatgagagttgtggcatttgtagagacatcgtcatcgacagaggagttttggattgttgctcacactggttttgctatacatgtattgacaactgggccgccatcacaaatcggtgccccctttgcaaaagtgaattccaacacataacatgcactccagtatatggtacgattggagctactgacgaagatgaatactctttaaccagctgtgatgatgattggtatgggcaagaggaaagcagcacactttccttcccgtcatactatattgatgcagaagccgtagtttgtttggatgatggtgattgcaagattcggaatggacttgtggcagctgaggatgattcaactttagatacatctattgcttgtgattcctgtgataaatggtaccatgctatttgtgtggcgttcaatgcaacaatggcatctgacagttcatggctctgcccaagatgcaagtttaacgaagtggaatatgaggcaaatgtaatcttgaagcaaaaccttggtgaggactgtgtgattggttctgataggacatgtaccaacgcatcattttctgggagggtgtcagtatctgttgctgatgagggagaaactgcccttgttgtatcaatggtgggtgcacattctgaaactaggggtggtctatcagaagcttcactaggacttgagacagcacatgaaacatttaactgcagtccatacccaagccattcaaaagatgtccttgttgcagatgctagttccttgaggaacacagatattgtcagtagatcccagaataaaccttctgaaataaatgttgtccacactctttgttctgagcctacagaaacatcactacaattttcaccaatacgtgagccagcaacaaccatatttagctcagagcaggataacatgtcaactgaacggttggaagtgccaaagcttgtgtcatcttgtccagtagtagataacagcaaggaggctaaaagtactggagaggagaatgcagcgcagcaaagcaataatgaattatcttctgtaatcaaatctccacaacctgcctcatcagttcatcagatgaaaactgcacaaaacctacagttgccacttaggcatgatgagcatagtagcgatgacaggaaagaagaacacattgaatctggaaatgaaatgatccatcctgcgaagaaagcaaaactggaagtgcaagaggacattaatgtaatcggaaactttgatttttcttcaatacatagtcatactactagtcctgcaaaagctattaccgacgacattatgtcagagtctgttgcacaacagaaatccattcctgatataatgagcattgttgacggtgaggtttacagaagggatcctggtagagagctggctaaacctgtaggaagaagagcaggagataagcctggtcctagagtgaaaaagatcttccgaaaggaagaaggaaaagaatcatctgccttggttcaaaagctacagaaagagattaaggaagtagttagagatacaggcacaaatatacttgagaaggatgaatcttttgatgaaaaactgttgactgcgttccgggcagctatagggaaatcagtggatggaccagccaaaagtactaacaccaatcaattaataagaacaaggaggtcattgcttcagaagggcaagaaacgtgagaatttgaccaaaaagttgtatggaacatctacaggaagaagaagaagcgattggcatcgtgattgggaagttgaattctggaaataccgttgctccccaggaataaatcctgaaaagattgagacattgcaatcagtacttcagctactaaagaaatcctctgaaatggacaaggaaagtgctaaggggaaaagggaagagaacaacaacagttccattttgtctaggttgtatttagctgatgcatcagttgttcccaggaaggatgatattaggcctctctctgcccttgcaggatgtgcgccattagaaaaaagtagccaaattaaagctagttgtaacaaatcgtctagcatacctgcaggaggcaacgagacaatgaaaatcagttcacccagcagcactgggaaagcatcaagctattcaattctgaataaagaggcacctagcagaagagaaaatagaaatagccagccctcccaggacaagagaaaccaatcctctggtgatatcaagcaggacaaaagaaaatgggctcttgagatcctggcaagaaaaaatgccagttctattacaaataaagatcaaactggaggcaatgatgctcttaagggaaacttccctctactggcacaacttccggttgatatgaggccgcagctggcagctggcagcaacaaaaaggttccggtatcagttagacaggcacaatttcaccgaattgctgagcattatttgcagaaagcaaatttggatgtcattcgcagatgtgcagatactgaattggccattgctgatgctgtcaatgtagaaaagggtatttatgaaaggtcaaatagcaaatcaatttatgtgaatctttgctctcaggctactcgccagcatgccaaggcaaaatctgataatgacacttcaactctaaccaaaaggactgaatcaggcagtgatcagatatcacaggaagctacatctgagggtaccaatgttagtggcagtgatatggaagaggatctaaacagagcagctatctccaatcaaaagaatgaactagaggatgatactgccccagaacatattgtgcacaaggatactgttagcttcaacagtgcagaagacgcactaaggaaagcgggcctttttgattcccctcctaacagtcctgagagagggaacacggcggttgaaggtaactctgaatccacggcagtttctaattgtcctaagttttcacaaaagaa

SEQ ID NO: 42291 - DNA, 3968 bp, Zea Mays
ctgcctcccctcctcgatacttgcgttgcgtgaattaccagtaccaggtatagtcctcttcttcttgcgcggtggctgcgccgccgtagtcgtagtcggcgcgccttggccggacgccgcagacacacagcctgcctcaccgggtagcgctgctgccaactgtagctaatctggtcttgctggtccccatccctaacaccaaagaatgccaccacttcctcccgatttatcctggcaccaccagctcgaacacgccaacactgcttctccttcattcctgatggtcaatttggcccgttgctagaaatagggccggcagtgttcttcgtccttccccttcttcgttggaacaagcaatacttaacaagtgagatcggcatggcaaccaacaagaccatgacgccctcaatttcgggctgggccgagcgttcgttcgatcgagatgatatggcccaacaatgaactgctctttactttttatttcccttttgtcggaggaagccatgaacgacggcgtcgctaggtcgccgagtcgccgacgctgtcaactccctgcggcatcacaatccatgtcgctctaggcgtgggctaagcatcaagcgacccgacgctcgccgaatcaacagcagcgccagcgaaaatcggaccctagcgacgctctccgaccaaaccaagcagcggcgcggccacttcagcgctcaggcagtggctcggccacatccaggagagggccagtggggaaggcgcggcgccaaatcgaggaggggtcgccgccagggcggctggacggcgccggctcgccggctccccgtggccaggcggccagccgcctccgtagccgctcctgacatctctgcgttgctgcaacagcatacggctgcatggcgcacagcggcacaagtacagccgcacaggcacacgaaacctcatttgccacaccaaagctcaaccaggatgttcccgtgggagatggacattgatggagagtcgagcaaaactctgggacagatggaagacctggaaaaaattccattggagaatgagagttgtggcatttgtagagacatcgtcatcgacagaggagttttggattgttgctcacactggttttgctatacatgtattgacaactgggccgccatcacaaatcggtgccccctttgcaaaagtgaattccaacacataacatgcactccagtatatggtacgattggagctactgacgaagatgaatactctttaaccagctgtgatgatgattggtatgggcaagaggaaagcagcacactttccttcccgtcatactatattgatgcagaagccgtagtttgtttggatgatggtgattgcaagattcggaatggacttgtggcagctgaggatgattcaactttagatacatctattgcttgtgattcctgtgataaatggtaccatgctatttgtgtggcgttcaatgcaacaatggcatctgacagttcatggctctgcccaagatgcaagtttaacgaagtggaatatgaggcaaatgtaatcttgaagcaaaaccttggtgaggactgtgtgattggttctgataggacatgtaccaacgcatcattttctgggagggtgtcagtatctgttgctgatgagggagaaactgcccttgttgtatcaatggtgggtgcacattctgaaactaggggtggtctatcagaagcttcactaggacttgagacagcacatgaaacatttaactgcagtccatacccaagccattcaaaagatgtccttgttgcagatgctagttccttgaggaacacagatattgtcagtagatcccagaataaaccttctgaaataaatgttgtccacactctttgttctgagcctacagaaacatcactacaattttcaccaatacgtgagccagcaacaaccatatttagctcagagcaggataacatgtcaactgaacggttggaagtgccaaagcttgtgtcatcttgtccagtagtagataacagcaaggaggctaaaagtactggagaggagaatgcagcgcagcaaagcaataatgaattatcttctgtaatcaaatctccacaacctgcctcatcagatgcagttcatcagatgaaaactgcacaaaacctacagttgccacttaggcatgatgagcatagtagcgatgacaggaaagaagaacacattgaatctggaaatgaaatgatccatcctgcgaagaaagcaaaactggaagtgcaagaggacattaatgtaatcggaaactttgatttttcttcaatacatagtcatactactagtcctgcaaaagctattaccgacgacattatgtcagagtctgttgcacaacagaaatccattcctgatataatgagcattgttgacggtgaggtttacagaagggatcctggtagagagctggctaaacctgtaggaagaagagcaggagataagcctggtcctagagtgaaaaagatcttccgaaaggaagaaggaaaagaatcatctgccttggttcaaaagctacagaaagagattaaggaagtagttagagatacaggcacaaatatacttgagaaggatgaatcttttgatgaaaaactgttgactgcgttccgggcagctatagggaaatcagtggatggaccagccaaaagtactaacaccaatcaattaataagaacaaggaggtcattgcttcagaagggcaagaaacgtgagaatttgaccaaaaagttgtatggaacatctacaggaagaagaagaagcgattggcatcgtgattgggaagttgaattctggaaataccgttgctccccaggaataaatcctgaaaagattgagacattgcaatcagtacttcagctactaaagaaatcctctgaaatggacaaggaaagtgctaaggggaaaagggaagagaacaacaacagttccattttgtctaggttgtatttagctgatgcatcagttgttcccaggaaggatgatattaggcctctctctgcccttgcaggatgtgcgccattagaaaaaagtagccaaattaaagctagttgtaacaaatcgtctagcatacctgcaggaggcaacgagacaatgaaaatcagttcacccagcagcactgggaaagcatcaagctattcaattctgaataaagaggcacctagcagaagagaaaatagaaatagccagccctcccaggacaagagaaaccaatcctctggtgatatcaagcaggacaaaagaaaatgggctcttgagatcctggcaagaaaaaatgccagttctattacaaataaagatcaaactggaggcaatgatgctcttaagggaaacttccctctactggcacaacttccggttgatatgaggccgcagctggcagctggcagcaacaaaaaggttccggtatcagttagacaggcacaatttcaccgaattgctgagcattatttgcagaaagcaaatttggatgtcattcgcagatgtgcagatactgaattggccattgctgatgctgtcaatgtagaaaagggtatttatgaaaggtcaaatagcaaatcaatttatgtgaatctttgctctcaggctactcgccagcatgccaaggcaaaatctgataatgacacttcaactctaaccaaaaggactgaatcaggcagtgatcagatatcacaggaagctacatctgagggtaccaatgttagtggcagtgatatggaagaggatctaaacagagcagctatctccaatcaaaagaatgaactagaggatgatactgccccagaacatattgtgcacaaggatactgttagcttcaacagtgcagaagacgcactaaggaaagcgggcctttttgattcccctcctaacagtcctgagagagggaacacggcggttgaaggtaactctgaatccacggcagtttctaattgtcctaagttttcacaaaagaa

SEQ ID NO: 42292 - DNA, 3502 bp, Zea Mays
cccctcctcgatacttgcgttgcgtgaattaccagtaccagccatgaacgacggcgtcgctaggtcgccgagtcgccgacgctgtcaactccctgcggcatcacaatccatgtcgctctaggcgtgggctaagcatcaagcgacccgacgctcgccgaatcaacagcagcgccagcgaaaatcggaccctagcgacgctctccgaccaaaccaagcagcggcgcggccacttcagcgctcaggcagtggctcggccacatccaggagagggccagtggggaaggcgcggcgccaaatcgaggaggggtcgccgccagggcggctggacggcgccggctcgccggctccccgtggccaggcggccagccgcctccgtagccgctcctgacatctctgcgttgctgcaacagcatacggctgcatggcgcacagcggcacaagtacagccgcacaggcacacgaaacctcatttgccacaccaaagctcaaccaggatgttcccgtgggagatggacattgatggagagtcgagcaaaactctgggacagatggaagacctggaaaaaattccattggagaatgagagttgtggcatttgtagagacatcgtcatcgacagaggagttttggattgttgctcacactggttttgctatacatgtattgacaactgggccgccatcacaaatcggtgccccctttgcaaaagtgaattccaacacataacatgcactccagtatatggtacgattggagctactgacgaagatgaatactctttaaccagctgtgatgatgattggtatgggcaagaggaaagcagcacactttccttcccgtcatactatattgatgcagaagccgtagtttgtttggatgatggtgattgcaagattcggaatggacttgtggcagctgaggatgattcaactttagatacatctattgcttgtgattcctgtgataaatggtaccatgctatttgtgtggcgttcaatgcaacaatggcatctgacagttcatggctctgcccaagatgcaagtttaacgaagtggaatatgaggcaaatgtaatcttgaagcaaaaccttggtgaggactgtgtgattggttctgataggacatgtaccaacgcatcattttctgggagggtgtcagtatctgttgctgatgagggagaaactgcccttgttgtatcaatggtgggtgcacattctgaaactaggggtggtctatcagaagcttcactaggacttgagacagcacatgaaacatttaactgcagtccatacccaagccattcaaaagatgtccttgttgcagatgctagttccttgaggaacacagatattgtcagtagatcccagaataaaccttctgaaataaatgttgtccacactctttgttctgagcctacagaaacatcactacaattttcaccaatacgtgagccagcaacaaccatatttagctcagagcaggataacatgtcaactgaacggttggaagtgccaaagcttgtgtcatcttgtccagtagtagataacagcaaggaggctaaaagtactggagaggagaatgcagcgcagcaaagcaataatgaattatcttctgtaatcaaatctccacaacctgcctcatcagttcatcagatgaaaactgcacaaaacctacagttgccacttaggcatgatgagcatagtagcgatgacaggaaagaagaacacattgaatctggaaatgaaatgatccatcctgcgaagaaagcaaaactggaagtgcaagaggacattaatgtaatcggaaactttgatttttcttcaatacatagtcatactactagtcctgcaaaagctattaccgacgacattatgtcagagtctgttgcacaacagaaatccattcctgatataatgagcattgttgacggtgaggtttacagaagggatcctggtagagagctggctaaacctgtaggaagaagagcaggagataagcctggtcctagagtgaaaaagatcttccgaaaggaagaaggaaaagaatcatctgccttggttcaaaagctacagaaagagattaaggaagtagttagagatacaggcacaaatatacttgagaaggatgaatcttttgatgaaaaactgttgactgcgttccgggcagctatagggaaatcagtggatggaccagccaaaagtactaacaccaatcaattaataagaacaaggaggtcattgcttcagaagggcaagaaacgtgagaatttgaccaaaaagttgtatggaacatctacaggaagaagaagaagcgattggcatcgtgattgggaagttgaattctggaaataccgttgctccccaggaataaatcctgaaaagattgagacattgcaatcagtacttcagctactaaagaaatcctctgaaatggacaaggaaagtgctaaggggaaaagggaagagaacaacaacagttccattttgtctaggttgtatttagctgatgcatcagttgttcccaggaaggatgatattaggcctctctctgcccttgcaggatgtgcgccattagaaaaaagtagccaaattaaagctagttgtaacaaatcgtctagcatacctgcaggaggcaacgagacaatgaaaatcagttcacccagcagcactgggaaagcatcaagctattcaattctgaataaagaggcacctagcagaagagaaaatagaaatagccagccctcccaggacaagagaaaccaatcctctggtgatatcaagcaggacaaaagaaaatgggctcttgagatcctggcaagaaaaaatgccagttctattacaaataaagatcaaactggaggcaatgatgctcttaagggaaacttccctctactggcacaacttccggttgatatgaggccgcagctggcagctggcagcaacaaaaaggttccggtatcagttagacaggcacaatttcaccgaattgctgagcattatttgcagaaagcaaatttggatgtcattcgcagatgtgcagatactgaattggccattgctgatgctgtcaatgtagaaaagggtatttatgaaaggtcaaatagcaaatcaatttatgtgaatctttgctctcaggctactcgccagcatgccaaggcaaaatctgataatgacacttcaactctaaccaaaaggactgaatcaggcagtgatcagatatcacaggaagctacatctgagggtaccaatgttagtggcagtgatatggaagaggatctaaacagagcagctatctccaatcaaaagaatgaactagaggatgatactgccccagaacatattgtgcacaaggatactgttagcttcaacagtgcagaagacgcactaaggaaagcgggcctttttgattcccctcctaacagtcctgagagagggaacacggcggttgaaggtaactctgaatccacggcagtttctaattgtcctaagttttcacaaaagaa

SEQ ID NO: 42293 - DNA, 3016 bp, Zea Mays
cttgcgttgcgtgaattaccagtaccagcctcatttgccacaccaaagctcaaccaggatgttcccgtgggagatggacattgatggagagtcgagcaaaactctgggacagatggaagacctggaaaaaattccattggagaatgagagttgtggcatttgtagagacatcgtcatcgacagaggagttttggattgttgctcacactggttttgctatacatgtattgacaactgggccgccatcacaaatcggtgccccctttgcaaaagtgaattccaacacataacatgcactccagtatatggtacgattggagctactgacgaagatgaatactctttaaccagctgtgatgatgattggtatgggcaagaggaaagcagcacactttccttcccgtcatactatattgatgcagaagccgtagtttgtttggatgatggtgattgcaagattcggaatggacttgtggcagctgaggatgattcaactttagatacatctattgcttgtgattcctgtgataaatggtaccatgctatttgtgtggcgttcaatgcaacaatggcatctgacagttcatggctctgcccaagatgcaagtttaacgaagtggaatatgaggcaaatgtaatcttgaagcaaaaccttggtgaggactgtgtgattggttctgataggacatgtaccaacgcatcattttctgggagggtgtcagtatctgttgctgatgagggagaaactgcccttgttgtatcaatggtgggtgcacattctgaaactaggggtggtctatcagaagcttcactaggacttgagacagcacatgaaacatttaactgcagtccatacccaagccattcaaaagatgtccttgttgcagatgctagttccttgaggaacacagatattgtcagtagatcccagaataaaccttctgaaataaatgttgtccacactctttgttctgagcctacagaaacatcactacaattttcaccaatacgtgagccagcaacaaccatatttagctcagagcaggataacatgtcaactgaacggttggaagtgccaaagcttgtgtcatcttgtccagtagtagataacagcaaggaggctaaaagtactggagaggagaatgcagcgcagcaaagcaataatgaattatcttctgtaatcaaaacagttgccacttaggcatgatgagcatagtagcgatgacaggaaagaagaacacattgaatctggaaatgaaatgatccatcctgcgaagaaagcaaaactggaagtgcaagaggacattaatgtaatcggaaactttgatttttcttcaatacatagtcatactactagtcctgcaaaagctattaccgacgacattatgtcagagtctgttgcacaacagaaatccattcctgatataatgagcattgttgacggtgaggtttacagaagggatcctggtagagagctggctaaacctgtaggaagaagagcaggagataagcctggtcctagagtgaaaaagatcttccgaaaggaagaaggaaaagaatcatctgccttggttcaaaagctacagaaagagattaaggaagtagttagagatacaggcacaaatatacttgagaaggatgaatcttttgatgaaaaactgttgactgcgttccgggcagctatagggaaatcagtggatggaccagccaaaagtactaacaccaatcaattaataagaacaaggaggtcattgcttcagaagggcaagaaacgtgagaatttgaccaaaaagttgtatggaacatctacaggaagaagaagaagcgattggcatcgtgattgggaagttgaattctggaaataccgttgctccccaggaataaatcctgaaaagattgagacattgcaatcagtacttcagctactaaagaaatcctctgaaatggacaaggaaagtgctaaggggaaaagggaagagaacaacaacagttccattttgtctaggttgtatttagctgatgcatcagttgttcccaggaaggatgatattaggcctctctctgcccttgcaggatgtgcgccattagaaaaaagtagccaaattaaagctagttgtaacaaatcgtctagcatacctgcaggaggcaacgagacaatgaaaatcagttcacccagcagcactgggaaagcatcaagctattcaattctgaataaagaggcacctagcagaagagaaaatagaaatagccagccctcccaggacaagagaaaccaatcctctggtgatatcaagcaggacaaaagaaaatgggctcttgagatcctggcaagaaaaaatgccagttctattacaaataaagatcaaactggaggcaatgatgctcttaagggaaacttccctctactggcacaacttccggttgatatgaggccgcagctggcagctggcagcaacaaaaaggttccggtatcagttagacaggcacaatttcaccgaattgctgagcattatttgcagaaagcaaatttggatgtcattcgcagatgtgcagatactgaattggccattgctgatgctgtcaatgtagaaaagggtatttatgaaaggtcaaatagcaaatcaatttatgtgaatctttgctctcaggctactcgccagcatgccaaggcaaaatctgataatgacacttcaactctaaccaaaaggactgaatcaggcagtgatcagatatcacaggaagctacatctgagggtaccaatgttagtggcagtgatatggaagaggatctaaacagagcagctatctccaatcaaaagaatgaactagaggatgatactgccccagaacatattgtgcacaaggatactgttagcttcaacagtgcagaagacgcactaaggaaagcgggcctttttgattcccctcctaacagtcctgagagagggaacacggcggttgaaggtaactctgaatccacggcagtttctaattgtcctaagttttcacaaaagaa

SEQ ID NO: 42294 - DNA, 3098 bp, Zea Mays
gcggtccccgtccacccccagcaccccctctgacgtgcttgccggcgagttgcgtactggcctcatttgccacaccaaagctcaaccaggatgttcccgtgggagatggacattgatggagagtcgagcaaaactctgggacagatggaagacctggaaaaaattccattggagaatgagagttgtggcatttgtagagacatcgtcatcgacagaggagttttggattgttgctcacactggttttgctatacatgtattgacaactgggccgccatcacaaatcggtgccccctttgcaaaagtgaattccaacacataacatgcactccagtatatggtacgattggagctactgacgaagatgaatactctttaaccagctgtgatgatgattggtatgggcaagaggaaagcagcacactttccttcccgtcatactatattgatgcagaagccgtagtttgtttggatgatggtgattgcaagattcggaatggacttgtggcagctgaggatgattcaactttagatacatctattgcttgtgattcctgtgataaatggtaccatgctatttgtgtggcgttcaatgcaacaatggcatctgacagttcatggctctgcccaagatgcaagtttaacgaagtggaatatgaggcaaatgtaatcttgaagcaaaaccttggtgaggactgtgtgattggttctgataggacatgtaccaacgcatcattttctgggagggtgtcagtatctgttgctgatgagggagaaactgcccttgttgtatcaatggtgggtgcacattctgaaactaggggtggtctatcagaagcttcactaggacttgagacagcacatgaaacatttaactgcagtccatacccaagccattcaaaagatgtccttgttgcagatgctagttccttgaggaacacagatattgtcagtagatcccagaataaaccttctgaaataaatgttgtccacactctttgttctgagcctacagaaacatcactacaattttcaccaatacgtgagccagcaacaaccatatttagctcagagcaggataacatgtcaactgaacggttggaagtgccaaagcttgtgtcatcttgtccagtagtagataacagcaaggaggctaaaagtactggagaggagaatgcagcgcagcaaagcaataatgaattatcttctgtaatcaaatctccacaacctgcctcatcagttcatcagatgaaaactgcacaaaacctacagttgccacttaggcatgatgagcatagtagcgatgacaggaaagaagaacacattgaatctggaaatgaaatgatccatcctgcgaagaaagcaaaactggaagtgcaagaggacattaatgtaatcggaaactttgatttttcttcaatacatagtcatactactagtcctgcaaaagctattaccgacgacattatgtcagagtctgttgcacaacagaaatccattcctgatataatgagcattgttgacggtgaggtttacagaagggatcctggtagagagctggctaaacctgtaggaagaagagcaggagataagcctggtcctagagtgaaaaagatcttccgaaaggaagaaggaaaagaatcatctgccttggttcaaaagctacagaaagagattaaggaagtagttagagatacaggcacaaatatacttgagaaggatgaatcttttgatgaaaaactgttgactgcgttccgggcagctatagggaaatcagtggatggaccagccaaaagtactaacaccaatcaattaataagaacaaggaggtcattgcttcagaagggcaagaaacgtgagaatttgaccaaaaagttgtatggaacatctacaggaagaagaagaagcgattggcatcgtgattgggaagttgaattctggaaataccgttgctccccaggaataaatcctgaaaagattgagacattgcaatcagtacttcagctactaaagaaatcctctgaaatggacaaggaaagtgctaaggggaaaagggaagagaacaacaacagttccattttgtctaggttgtatttagctgatgcatcagttgttcccaggaaggatgatattaggcctctctctgcccttgcaggatgtgcgccattagaaaaaagtagccaaattaaagctagttgtaacaaatcgtctagcatacctgcaggaggcaacgagacaatgaaaatcagttcacccagcagcactgggaaagcatcaagctattcaattctgaataaagaggcacctagcagaagagaaaatagaaatagccagccctcccaggacaagagaaaccaatcctctggtgatatcaagcaggacaaaagaaaatgggctcttgagatcctggcaagaaaaaatgccagttctattacaaataaagatcaaactggaggcaatgatgctcttaagggaaacttccctctactggcacaacttccggttgatatgaggccgcagctggcagctggcagcaacaaaaaggttccggtatcagttagacaggcacaatttcaccgaattgctgagcattatttgcagaaagcaaatttggatgtcattcgcagatgtgcagatactgaattggccattgctgatgctgtcaatgtagaaaagggtatttatgaaaggtcaaatagcaaatcaatttatgtgaatctttgctctcaggctactcgccagcatgccaaggcaaaatctgataatgacacttcaactctaaccaaaaggactgaatcaggcagtgatcagatatcacaggaagctacatctgagggtaccaatgttagtggcagtgatatggaagaggatctaaacagagcagctatctccaatcaaaagaatgaactagaggatgatactgccccagaacatattgtgcacaaggatactgttagcttcaacagtgcagaagacgcactaaggaaagcgggcctttttgattcccctcctaacagtcctgagagagggaacacggcggttgaaggtaactctgaatccacggcagtttctaattgtcctaagttttcacaaaagaa

SEQ ID NO: 42295 - DNA, 3095 bp, Zea Mays
gtccacccccagcaccccctctgacgtgcttgccggcgagttgcgtactggcctcatttgccacaccaaagctcaaccaggatgttcccgtgggagatggacattgatggagagtcgagcaaaactctgggacagatggaagacctggaaaaaattccattggagaatgagagttgtggcatttgtagagacatcgtcatcgacagaggagttttggattgttgctcacactggttttgctatacatgtattgacaactgggccgccatcacaaatcggtgccccctttgcaaaagtgaattccaacacataacatgcactccagtatatggtacgattggagctactgacgaagatgaatactctttaaccagctgtgatgatgattggtatgggcaagaggaaagcagcacactttccttcccgtcatactatattgatgcagaagccgtagtttgtttggatgatggtgattgcaagattcggaatggacttgtggcagctgaggatgattcaactttagatacatctattgcttgtgattcctgtgataaatggtaccatgctatttgtgtggcgttcaatgcaacaatggcatctgacagttcatggctctgcccaagatgcaagtttaacgaagtggaatatgaggcaaatgtaatcttgaagcaaaaccttggtgaggactgtgtgattggttctgataggacatgtaccaacgcatcattttctgggagggtgtcagtatctgttgctgatgagggagaaactgcccttgttgtatcaatggtgggtgcacattctgaaactaggggtggtctatcagaagcttcactaggacttgagacagcacatgaaacatttaactgcagtccatacccaagccattcaaaagatgtccttgttgcagatgctagttccttgaggaacacagatattgtcagtagatcccagaataaaccttctgaaataaatgttgtccacactctttgttctgagcctacagaaacatcactacaattttcaccaatacgtgagccagcaacaaccatatttagctcagagcaggataacatgtcaactgaacggttggaagtgccaaagcttgtgtcatcttgtccagtagtagataacagcaaggaggctaaaagtactggagaggagaatgcagcgcagcaaagcaataatgaattatcttctgtaatcaaatctccacaacctgcctcatcagatgcagttcatcagatgaaaactgcacaaaacctacagttgccacttaggcatgatgagcatagtagcgatgacaggaaagaagaacacattgaatctggaaatgaaatgatccatcctgcgaagaaagcaaaactggaagtgcaagaggacattaatgtaatcggaaactttgatttttcttcaatacatagtcatactactagtcctgcaaaagctattaccgacgacattatgtcagagtctgttgcacaacagaaatccattcctgatataatgagcattgttgacggtgaggtttacagaagggatcctggtagagagctggctaaacctgtaggaagaagagcaggagataagcctggtcctagagtgaaaaagatcttccgaaaggaagaaggaaaagaatcatctgccttggttcaaaagctacagaaagagattaaggaagtagttagagatacaggcacaaatatacttgagaaggatgaatcttttgatgaaaaactgttgactgcgttccgggcagctatagggaaatcagtggatggaccagccaaaagtactaacaccaatcaattaataagaacaaggaggtcattgcttcagaagggcaagaaacgtgagaatttgaccaaaaagttgtatggaacatctacaggaagaagaagaagcgattggcatcgtgattgggaagttgaattctggaaataccgttgctccccaggaataaatcctgaaaagattgagacattgcaatcagtacttcagctactaaagaaatcctctgaaatggacaaggaaagtgctaaggggaaaagggaagagaacaacaacagttccattttgtctaggttgtatttagctgatgcatcagttgttcccaggaaggatgatattaggcctctctctgcccttgcaggatgtgcgccattagaaaaaagtagccaaattaaagctagttgtaacaaatcgtctagcatacctgcaggaggcaacgagacaatgaaaatcagttcacccagcagcactgggaaagcatcaagctattcaattctgaataaagaggcacctagcagaagagaaaatagaaatagccagccctcccaggacaagagaaaccaatcctctggtgatatcaagcaggacaaaagaaaatgggctcttgagatcctggcaagaaaaaatgccagttctattacaaataaagatcaaactggaggcaatgatgctcttaagggaaacttccctctactggcacaacttccggttgatatgaggccgcagctggcagctggcagcaacaaaaaggttccggtatcagttagacaggcacaatttcaccgaattgctgagcattatttgcagaaagcaaatttggatgtcattcgcagatgtgcagatactgaattggccattgctgatgctgtcaatgtagaaaagggtatttatgaaaggtcaaatagcaaatcaatttatgtgaatctttgctctcaggctactcgccagcatgccaaggcaaaatctgataatgacacttcaactctaaccaaaaggactgaatcaggcagtgatcagatatcacaggaagctacatctgagggtaccaatgttagtggcagtgatatggaagaggatctaaacagagcagctatctccaatcaaaagaatgaactagaggatgatactgccccagaacatattgtgcacaaggatactgttagcttcaacagtgcagaagacgcactaaggaaagcgggcctttttgattcccctcctaacagtcctgagagagggaacacggcggttgaaggtaactctgaatccacggcagtttctaattgtcctaagttttcacaaaagaa

SEQ ID NO: 42296 - DNA, 3153 bp, Zea Mays
ccagcaccccctctgacgtgcttgccggcgagttgcgtactggcctcatttgccacaccaaagctcaaccaggatgttcccgtgggagatggacattgatggagagtcgagcaaaactctgggacagatggaagacctgactcagagctctgccacttatacgtcacagatgttgctttccaaccttgcttcttctgggatcaaagaaaaaattccattggagaatgagagttgtggcatttgtagagacatcgtcatcgacagaggagttttggattgttgctcacactggttttgctatacatgtattgacaactgggccgccatcacaaatcggtgccccctttgcaaaagtgaattccaacacataacatgcactccagtatatggtacgattggagctactgacgaagatgaatactctttaaccagctgtgatgatgattggtatgggcaagaggaaagcagcacactttccttcccgtcatactatattgatgcagaagccgtagtttgtttggatgatggtgattgcaagattcggaatggacttgtggcagctgaggatgattcaactttagatacatctattgcttgtgattcctgtgataaatggtaccatgctatttgtgtggcgttcaatgcaacaatggcatctgacagttcatggctctgcccaagatgcaagtttaacgaagtggaatatgaggcaaatgtaatcttgaagcaaaaccttggtgaggactgtgtgattggttctgataggacatgtaccaacgcatcattttctgggagggtgtcagtatctgttgctgatgagggagaaactgcccttgttgtatcaatggtgggtgcacattctgaaactaggggtggtctatcagaagcttcactaggacttgagacagcacatgaaacatttaactgcagtccatacccaagccattcaaaagatgtccttgttgcagatgctagttccttgaggaacacagatattgtcagtagatcccagaataaaccttctgaaataaatgttgtccacactctttgttctgagcctacagaaacatcactacaattttcaccaatacgtgagccagcaacaaccatatttagctcagagcaggataacatgtcaactgaacggttggaagtgccaaagcttgtgtcatcttgtccagtagtagataacagcaaggaggctaaaagtactggagaggagaatgcagcgcagcaaagcaataatgaattatcttctgtaatcaaatctccacaacctgcctcatcagatgcagttcatcagatgaaaactgcacaaaacctacagttgccacttaggcatgatgagcatagtagcgatgacaggaaagaagaacacattgaatctggaaatgaaatgatccatcctgcgaagaaagcaaaactggaagtgcaagaggacattaatgtaatcggaaactttgatttttcttcaatacatagtcatactactagtcctgcaaaagctattaccgacgacattatgtcagagtctgttgcacaacagaaatccattcctgatataatgagcattgttgacggtgaggtttacagaagggatcctggtagagagctggctaaacctgtaggaagaagagcaggagataagcctggtcctagagtgaaaaagatcttccgaaaggaagaaggaaaagaatcatctgccttggttcaaaagctacagaaagagattaaggaagtagttagagatacaggcacaaatatacttgagaaggatgaatcttttgatgaaaaactgttgactgcgttccgggcagctatagggaaatcagtggatggaccagccaaaagtactaacaccaatcaattaataagaacaaggaggtcattgcttcagaagggcaagaaacgtgagaatttgaccaaaaagttgtatggaacatctacaggaagaagaagaagcgattggcatcgtgattgggaagttgaattctggaaataccgttgctccccaggaataaatcctgaaaagattgagacattgcaatcagtacttcagctactaaagaaatcctctgaaatggacaaggaaagtgctaaggggaaaagggaagagaacaacaacagttccattttgtctaggttgtatttagctgatgcatcagttgttcccaggaaggatgatattaggcctctctctgcccttgcaggatgtgcgccattagaaaaaagtagccaaattaaagctagttgtaacaaatcgtctagcatacctgcaggaggcaacgagacaatgaaaatcagttcacccagcagcactgggaaagcatcaagctattcaattctgaataaagaggcacctagcagaagagaaaatagaaatagccagccctcccaggacaagagaaaccaatcctctggtgatatcaagcaggacaaaagaaaatgggctcttgagatcctggcaagaaaaaatgccagttctattacaaataaagatcaaactggaggcaatgatgctcttaagggaaacttccctctactggcacaacttccggttgatatgaggccgcagctggcagctggcagcaacaaaaaggttccggtatcagttagacaggcacaatttcaccgaattgctgagcattatttgcagaaagcaaatttggatgtcattcgcagatgtgcagatactgaattggccattgctgatgctgtcaatgtagaaaagggtatttatgaaaggtcaaatagcaaatcaatttatgtgaatctttgctctcaggctactcgccagcatgccaaggcaaaatctgataatgacacttcaactctaaccaaaaggactgaatcaggcagtgatcagatatcacaggaagctacatctgagggtaccaatgttagtggcagtgatatggaagaggatctaaacagagcagctatctccaatcaaaagaatgaactagaggatgatactgccccagaacatattgtgcacaaggatactgttagcttcaacagtgcagaagacgcactaaggaaagcgggcctttttgattcccctcctaacagtcctgagagagggaacacggcggttgaaggtaactctgaatccacggcagtttctaattgtcctaagttttcacaaaagaa

SEQ ID NO: 42297 - DNA, 2766 bp, Zea Mays
attattcagacatgaaagaaatgtactgctactaacttggaaaaaattccattggagaatgagagttgtggcatttgtagagacatcgtcatcgacagaggagttttggattgttgctcacactggttttgctatacatgtattgacaactgggccgccatcacaaatcggtgccccctttgcaaaagtgaattccaacacataacatgcactccagtatatggtacgattggagctactgacgaagatgaatactctttaaccagctgtgatgatgattggtatgggcaagaggaaagcagcacactttccttcccgtcatactatattgatgcagaagccgtagtttgtttggatgatggtgattgcaagattcggaatggacttgtggcagctgaggatgattcaactttagatacatctattgcttgtgattcctgtgataaatggtaccatgctatttgtgtggcgttcaatgcaacaatggcatctgacagttcatggctctgcccaagatgcaagtttaacgaagtggaatatgaggcaaatgtaatcttgaagcaaaaccttggtgaggactgtgtgattggttctgataggacatgtaccaacgcatcattttctgggagggtgtcagtatctgttgctgatgagggagaaactgcccttgttgtatcaatggtgggtgcacattctgaaactaggggtggtctatcagaagcttcactaggacttgagacagcacatgaaacatttaactgcagtccatacccaagccattcaaaagatgtccttgttgcagatgctagttccttgaggaacacagatattgtcagtagatcccagaataaaccttctgaaataaatgttgtccacactctttgttctgagcctacagaaacatcactacaattttcaccaatacgtgagccagcaacaaccatatttagctcagagcaggataacatgtcaactgaacggttggaagtgccaaagcttgtgtcatcttgtccagtagtagataacagcaaggaggctaaaagtactggagaggagaatgcagcgcagcaaagcaataatgaattatcttctgtaatcaaaacagttgccacttaggcatgatgagcatagtagcgatgacaggaaagaagaacacattgaatctggaaatgaaatgatccatcctgcgaagaaagcaaaactggaagtgcaagaggacattaatgtaatcggaaactttgatttttcttcaatacatagtcatactactagtcctgcaaaagctattaccgacgacattatgtcagagtctgttgcacaacagaaatccattcctgatataatgagcattgttgacggtgaggtttacagaagggatcctggtagagagctggctaaacctgtaggaagaagagcaggagataagcctggtcctagagtgaaaaagatcttccgaaaggaagaaggaaaagaatcatctgccttggttcaaaagctacagaaagagattaaggaagtagttagagatacaggcacaaatatacttgagaaggatgaatcttttgatgaaaaactgttgactgcgttccgggcagctatagggaaatcagtggatggaccagccaaaagtactaacaccaatcaattaataagaacaaggaggtcattgcttcagaagggcaagaaacgtgagaatttgaccaaaaagttgtatggaacatctacaggaagaagaagaagcgattggcatcgtgattgggaagttgaattctggaaataccgttgctccccaggaataaatcctgaaaagattgagacattgcaatcagtacttcagctactaaagaaatcctctgaaatggacaaggaaagtgctaaggggaaaagggaagagaacaacaacagttccattttgtctaggttgtatttagctgatgcatcagttgttcccaggaaggatgatattaggcctctctctgcccttgcaggatgtgcgccattagaaaaaagtagccaaattaaagctagttgtaacaaatcgtctagcatacctgcaggaggcaacgagacaatgaaaatcagttcacccagcagcactgggaaagcatcaagctattcaattctgaataaagaggcacctagcagaagagaaaatagaaatagccagccctcccaggacaagagaaaccaatcctctggtgatatcaagcaggacaaaagaaaatgggctcttgagatcctggcaagaaaaaatgccagttctattacaaataaagatcaaactggaggcaatgatgctcttaagggaaacttccctctactggcacaacttccggttgatatgaggccgcagctggcagctggcagcaacaaaaaggttccggtatcagttagacaggctactcgccagcatgccaaggcaaaatctgataatgacacttcaactctaaccaaaaggactgaatcaggcagtgatcagatatcacaggaagctacatctgagggtaccaatgttagtggcagtgatatggaagaggatctaaacagagcagctatctccaatcaaaagaatgaactagaggatgatactgccccagaacatattgtgcacaaggatactgttagcttcaacagtgcagaagacgcactaaggaaagcgggcctttttgattcccctcctaacagtcctgagagagggaacacggcggttgaaggtaactctgaatccacggcagtttctaattgtcctaagttttcacaaaagaa

SEQ ID NO: 42298 - DNA, 2882 bp, Zea Mays
gaaagaaatgtactgctactaacttggaaaaaattccattggagaatgagagttgtggcatttgtagagacatcgtcatcgacagaggagttttggattgttgctcacactggttttgctatacatgtattgacaactgggccgccatcacaaatcggtgccccctttgcaaaagtgaattccaacacataacatgcactccagtatatggtacgattggagctactgacgaagatgaatactctttaaccagctgtgatgatgattggtatgggcaagaggaaagcagcacactttccttcccgtcatactatattgatgcagaagccgtagtttgtttggatgatggtgattgcaagattcggaatggacttgtggcagctgaggatgattcaactttagatacatctattgcttgtgattcctgtgataaatggtaccatgctatttgtgtggcgttcaatgcaacaatggcatctgacagttcatggctctgcccaagatgcaagtttaacgaagtggaatatgaggcaaatgtaatcttgaagcaaaaccttggtgaggactgtgtgattggttctgataggacatgtaccaacgcatcattttctgggagggtgtcagtatctgttgctgatgagggagaaactgcccttgttgtatcaatggtgggtgcacattctgaaactaggggtggtctatcagaagcttcactaggacttgagacagcacatgaaacatttaactgcagtccatacccaagccattcaaaagatgtccttgttgcagatgctagttccttgaggaacacagatattgtcagtagatcccagaataaaccttctgaaataaatgttgtccacactctttgttctgagcctacagaaacatcactacaattttcaccaatacgtgagccagcaacaaccatatttagctcagagcaggataacatgtcaactgaacggttggaagtgccaaagcttgtgtcatcttgtccagtagtagataacagcaaggaggctaaaagtactggagaggagaatgcagcgcagcaaagcaataatgaattatcttctgtaatcaaaacagttgccacttaggcatgatgagcatagtagcgatgacaggaaagaagaacacattgaatctggaaatgaaatgatccatcctgcgaagaaagcaaaactggaagtgcaagaggacattaatgtaatcggaaactttgatttttcttcaatacatagtcatactactagtcctgcaaaagctattaccgacgacattatgtcagagtctgttgcacaacagaaatccattcctgatataatgagcattgttgacggtgaggtttacagaagggatcctggtagagagctggctaaacctgtaggaagaagagcaggagataagcctggtcctagagtgaaaaagatcttccgaaaggaagaaggaaaagaatcatctgccttggttcaaaagctacagaaagagattaaggaagtagttagagatacaggcacaaatatacttgagaaggatgaatcttttgatgaaaaactgttgactgcgttccgggcagctatagggaaatcagtggatggaccagccaaaagtactaacaccaatcaattaataagaacaaggaggtcattgcttcagaagggcaagaaacgtgagaatttgaccaaaaagttgtatggaacatctacaggaagaagaagaagcgattggcatcgtgattgggaagttgaattctggaaataccgttgctccccaggaataaatcctgaaaagattgagacattgcaatcagtacttcagctactaaagaaatcctctgaaatggacaaggaaagtgctaaggggaaaagggaagagaacaacaacagttccattttgtctaggttgtatttagctgatgcatcagttgttcccaggaaggatgatattaggcctctctctgcccttgcaggatgtgcgccattagaaaaaagtagccaaattaaagctagttgtaacaaatcgtctagcatacctgcaggaggcaacgagacaatgaaaatcagttcacccagcagcactgggaaagcatcaagctattcaattctgaataaagaggcacctagcagaagagaaaatagaaatagccagccctcccaggacaagagaaaccaatcctctggtgatatcaagcaggacaaaagaaaatgggctcttgagatcctggcaagaaaaaatgccagttctattacaaataaagatcaaactggaggcaatgatgctcttaagggaaacttccctctactggcacaacttccggttgatatgaggccgcagctggcagctggcagcaacaaaaaggttccggtatcagttagacagaaagcaaatttggatgtcattcgcagatgtgcagatactgaattggccattgctgatgctgtcaatgtagaaaagggtatttatgaaaggtcaaatagcaaatcaatttatgtgaatctttgctctcaggctactcgccagcatgccaaggcaaaatctgataatgacacttcaactctaaccaaaaggactgaatcaggcagtgatcagatatcacaggaagctacatctgagggtaccaatgttagtggcagtgatatggaagaggatctaaacagagcagctatctccaatcaaaagaatgaactagaggatgatactgccccagaacatattgtgcacaaggatactgttagcttcaacagtgcagaagacgcactaaggaaagcgggcctttttgattcccctcctaacagtcctgagagagggaacacggcggttgaaggtaactctgaatccacggcagtttctaattgtcctaagttttcacaaaagaa

SEQ ID NO: 42299 - DNA, 2201 bp, Zea Mays
cccctcccgtccttcccctccccctatcctttctctctctcctctccctcctcttctttattgctttaacgttactcccactagccacccactcttcctcgaggccaccacaacacccccgggacacacacacagtcacacacacataaaaaaaaaaaaatcccccctcgcctcggattcgctcgcgcccccgcccgccgacgcaacagcgaggtcgttccgttccaggcttcggacggaggcggggtgacgtaaggaggtgcgcgggaggatccgttcgcgcccggaggaccgggatccggcgcccgtcgtcgtcgacgcccatgtcgggccacctcgatcgcttcgcgcggccatgttttgaagggtgctcaagtcacgatgaacgtagagaccataagtcagactttgaagtctctgaagatgaaaagaagacaagaataagctctttgaagaaaaaagcaatagatgcatcaacaaagattaggcactcattaaaaaagactagaaggaagagtggtagtagggtcctttctgtgtctattgaggatgtgcgcgatctagaggagctgcaagctgttgaagcatttagacaagcattactcttggatgagctgttgcctgcaaggcatgacgactatcatatgatgctgagatttctgaaggcaaggaaatttgatatcgataaagccaagcaaatgtggattgatatgcttcagtggcggagggagtatggcactgatacaattgtggaggacttcgaatacactgagttgagcaccgttttgcaatattatcctcatggttatcatggagttgacaaagaggggagacctgtttacattgaaaggcttggaaagcttgctctcttgctgcaaaaaggcacattgattccagcacgacaattctggatgtccacggagtggggttgaaaaatttcagcaaaactgcacgcgaattaattcaacgactgcagaaaattgacaatgataactacccagagactctataccaaatgtttatcgtcaatgctggtccgggcttccggttactatggaacactgtgaagtccttccttgatcccaaaacgaccgccaagatacatatagtccaaagtggtggggttcattgtgctcgtcaaattgtaactatttccaatggtgaggaaaaatttattacttacgccaaaccgaagcgccacgcaatgagagggagtgacacatcaactgctgagtctggttcagaagctgatgatgctgtgtcccccaaagctctcagaagttacatatcacatcctaagttgaccccagttcgtgaagaggtcaaaatggtcagggctactagcttttctactcgtgtccctgaatatgatgtacctgttgttgacaaggccgtggatgctacatggaagagagagcaaccacgaaaggcaccatccgtgccccaagatgcagactcatctgtgaaaactgcatccaagccatctggccgcccctgggataagatcgctgcaaatctgatggcttgtcttatggctattgtaatgttggttcgatcaatcaaagatcttgccacaatgagattgtcatctaaaggcgggtcagaagaaagctactgtacattgtacccggactccgtccagaaagaggaattccgtcctccttcgccattccctgggttcgctgaagccgacctattcgccgtggtcttgcaaaggctgggagagcttgaagagaaggtccagatgcttcaagaaaagccttctgaaatgccttgcgagaaagaagagttgcttaacgctgctgtgcgtcgtgtggatgcattggaagctgaactaattgtaacaaagaaggctttgcacgaggctcttatcaggcaagaggaactgctcgcgaacatcgacagcaaggagattgccagggctcagagaaagaagaaaacaatgttctgctactaggacaacacctgcttccgtgaggagatgacaaacgcggcggaccccttcatttttctgacacttgtgaatcaacaggtttccgttgtaaatcaacaaaattctggcataaataaaatgttttttttttaaaaattgcaatcctgagcattgctgcctcctcccggtctcgcaatctggttgttgttagttgcagcataactgcataattggttggttagccgcgccgatgataattggttggttt

SEQ ID NO: 42300 - DNA, 2397 bp, Zea Mays
ctctctcctctccctcctcttctttattgctttaacgttactcccactagccacccactcttcctcgaggccaccacaacacccccgggacacacacacagtcacacacacataaaaaaaaaaaaatcccccctcgcctcggattcgctcgcgcccccgcccgccgacgcaacagcgaggtcgttccgttccaggcttcggacggaggcggggtgacgtaaggaggtgcgcgggaggatccgttcgcgcccggaggaccgggatccggcgcccgtcgtcgtcgacgcccatgtcgggccacctcgatcgcttcgcgcggccatgttttgaagggtgctcaagtcacgatgaacgtagagaccataagtcagactttgaagtctctgaagatgaaaagaagacaagaataagctctttgaagaaaaaagcaatagatgcatcaacaaagattaggcactcattaaaaaagactagaaggaagagtggtagtagggtcctttctgtgtctattgaggatgtgcgcgatctagaggagctgcaagctgttgaagcatttagacaagcattactcttggatgagctgttgcctgcaaggcatgacgactatcatatgatgctgagatttctgaaggcaaggaaatttgatatcgataaagccaagcaaatgtggattgatatgcttcagtggcggagggagtatggcactgatacaattgtggaggacttcgaatacactgagttgagcaccgttttgcaatattatcctcatggttatcatggagttgacaaagaggggagacctgtttacattgaaaggcttggaaaggttgaccctagcaaacttatgaatgtcacaacgatggatcgatacgtgcgataccatgtgaaggagtttgagaggagcttcttgattaaatttccagcttgctctcttgctgcaaaaaggcacattgattccagcacgacaattctggatgtccacggagtggggttgaaaaatttcagcaaaactgcacgcgaattaattcaacgactgcagaaaattgacaatgataactacccagagactctataccaaatgtttatcgtcaatgctggtccgggcttccggttactatggaacactgtgaagtccttccttgatcccaaaacgaccgccaagatacatgttcttgggaacaaataccaaagtaagctgcttgaaacaattgacgctagaattccttggtggcacttgtacctgtcctgaatacggaggttgccttaaggctgaaaagggaccgtggaaggacccaaacatacttaagatagtccaaagtggtggggttcattgtgctcgtcaaattgtaactatttccaatggtgaggaaaaatttattacttacgccaaaccgaagcgccacgcaatgagagggagtgacacatcaactgctgagtctggttcagaagctgatgatgctgtgtcccccaaagctctcagaagttacatatcacatcctaagttgaccccagttcgtgaagaggtcaaaatggtcagggctactagcttttctactcgtgtccctgaatatgatgtacctgttgttgacaaggccgtggatgctacatggaagagagagcaaccacgaaaggcaccatccgtgccccaagactcatctgtgaaaactgcatccaagccatctggccgcccctgggataagatcgctgcaaatctgatggcttgtcttatggctattgtaatgttggttcgatcaatcaaagatcttgccacaatgagattgtcatctaaaggcgggtcagaagaaagctactgtacattgtacccggactccgtccagaaagaggaattccgtcctccttcgccattccctgggttcgctgaagccgacctattcgccgtggtcttgcaaaggctgggagagcttgaagagaaggtccagatgcttcaagaaaagccttctgaaatgccttgcgagaaagaagagttgcttaacgctgctgtgcgtcgtgtggatgcattggaagctgaactaattgtaacaaagaaggctttgcacgaggctcttatcaggcaagaggaactgctcgcgaacatcgacagcaaggagattgccagggctcagagaaagaagaaaacaatgttctgctactaggacaacacctgcttccgtgaggagatgacaaacgcggcggaccccttcatttttctgacacttgtgaatcaacaggtttccgttgtaaatcaacaaaattctggcataaataaaatgttttttttttaaaaattgcaatcctgagcattgctgcctcctcccggtctcgcaatctggttgttgttagttgcagcataactgcataattggttggttagccgcgccgatgataattggttggttt

SEQ ID NO: 42301 - DNA, 2256 bp, Zea Mays
cactcttcctcgaggccaccacaacacccccgggacacacacacagtcacacacacataaaaaaaaaaaaatcccccctcgcctcggattcgctcgcgcccccgcccgccgacgcaacagcgaggtcgttccgttccaggcttcggacggaggcggggtgacgtaaggaggtgcgcgggaggatccgttcgcgcccggaggaccgggatccggcgcccgtcgtcgtcgacgcccatgtcgggccacctcgatcgcttcgcgcggccatgttttgaagggtgctcaagtcacgatgaacgtagagaccataagtcagactttgaagtctctgaagatgaaaagaagacaagaataagctctttgaagaaaaaagcaatagatgcatcaacaaagattaggcactcattaaaaaagactagaaggaagagtggtagtagggtcctttctgtgtctattgaggatgtgcgcgatctagaggagctgcaagctgttgaagcatttagacaagcattactcttggatgagctgttgcctgcaaggcatgacgactatcatatgatgctgagatttctgaaggcaaggaaatttgatatcgataaagccaagcaaatgtggattgatatgcttcagtggcggagggagtatggcactgatacaattgtggaggacttcgaatacactgagttgagcaccgttttgcaatattatcctcatggttatcatggagttgacaaagaggggagacctgtttacattgaaaggcttggaaagcttgctctcttgctgcaaaaaggcacattgattccagcacgacaattctggatgtccacggagtggggttgaaaaatttcagcaaaactgcacgcgaattaattcaacgactgcagaaaattgacaatgataactacccagagactctataccaaatgtttatcgtcaatgctggtccgggcttccggttactatggaacactgtgaagtccttccttgatcccaaaacgaccgccaagatacatgttcttgggaacaaataccaaagtaagctgcttgaaacaattgacgctagtgaattgccagaattccttggtggcacttgtacctgtcctgaatacggaggttgccttaaggctgaaaagggaccgtggaaggacccaaacatacttaagatagtccaaagtggtggggttcattgtgctcgtcaaattgtaactatttccaatggtgaggaaaaatttattacttacgccaaaccgaagcgccacgcaatgagagggagtgacacatcaactgctgagtctggttcagaagctgatgatgctgtgtcccccaaagctctcagaagttacatatcacatcctaagttgaccccagttcgtgaagaggtcaaaatggtcagggctactagcttttctactcgtgtccctgaatatgatgtacctgttgttgacaaggccgtggatgctacatggaagagagagcaaccacgaaaggcaccatccgtgccccaagactcatctgtgaaaactgcatccaagccatctggccgcccctgggataagatcgctgcaaatctgatggcttgtcttatggctattgtaatgttggttcgatcaatcaaagatcttgccacaatgagattgtcatctaaaggcgggtcagaagaaagctactgtacattgtacccggactccgtccagaaagaggaattccgtcctccttcgccattccctgggttcgctgaagccgacctattcgccgtggtcttgcaaaggctgggagagcttgaagagaaggtccagatgcttcaagaaaagccttctgaaatgccttgcgagaaagaagagttgcttaacgctgctgtgcgtcgtgtggatgcattggaagctgaactaattgtaacaaagaaggctttgcacgaggctcttatcaggcaagaggaactgctcgcgaacatcgacagcaaggagattgccagggctcagagaaagaagaaaacaatgttctgctactaggacaacacctgcttccgtgaggagatgacaaacgcggcggaccccttcatttttctgacacttgtgaatcaacaggtttccgttgtaaatcaacaaaattctggcataaataaaatgttttttttttaaaaattgcaatcctgagcattgctgcctcctcccggtctcgcaatctggttgttgttagttgcagcataactgcataattggttggttagccgcgccgatgataattggttggttt

SEQ ID NO: 42302 - DNA, 2262 bp, Zea Mays
cactcttcctcgaggccaccacaacacccccgggacacacacacagtcacacacacataaaaaaaaaaaaatcccccctcgcctcggattcgctcgcgcccccgcccgccgacgcaacagcgaggtcgttccgttccaggcttcggacggaggcggggtgacgtaaggaggtgcgcgggaggatccgttcgcgcccggaggaccgggatccggcgcccgtcgtcgtcgacgcccatgtcgggccacctcgatcgcttcgcgcggccatgttttgaagggtgctcaagtcacgatgaacgtagagaccataagtcagactttgaagtctctgaagatgaaaagaagacaagaataagctctttgaagaaaaaagcaatagatgcatcaacaaagattaggcactcattaaaaaagactagaaggaagagtggtagtagggtcctttctgtgtctattgaggatgtgcgcgatctagaggagctgcaagctgttgaagcatttagacaagcattactcttggatgagctgttgcctgcaaggcatgacgactatcatatgatgctgagatttctgaaggcaaggaaatttgatatcgataaagccaagcaaatgtggattgatatgcttcagtggcggagggagtatggcactgatacaattgtggaggacttcgaatacactgagttgagcaccgttttgcaatattatcctcatggttatcatggagttgacaaagaggggagacctgtttacattgaaaggcttggaaagcttgctctcttgctgcaaaaaggcacattgattccagcacgacaattctggatgtccacggagtggggttgaaaaatttcagcaaaactgcacgcgaattaattcaacgactgcagaaaattgacaatgataactacccagagactctataccaaatgtttatcgtcaatgctggtccgggcttccggttactatggaacactgtgaagtccttccttgatcccaaaacgaccgccaagatacatgttcttgggaacaaataccaaagtaagctgcttgaaacaattgacgctagtgaattgccagaattccttggtggcacttgtacctgtcctgaatacggaggttgccttaaggctgaaaagggaccgtggaaggacccaaacatacttaagatagtccaaagtggtggggttcattgtgctcgtcaaattgtaactatttccaatggtgaggaaaaatttattacttacgccaaaccgaagcgccacgcaatgagagggagtgacacatcaactgctgagtctggttcagaagctgatgatgctgtgtcccccaaagctctcagaagttacatatcacatcctaagttgaccccagttcgtgaagaggtcaaaatggtcagggctactagcttttctactcgtgtccctgaatatgatgtacctgttgttgacaaggccgtggatgctacatggaagagagagcaaccacgaaaggcaccatccgtgccccaagatgcagactcatctgtgaaaactgcatccaagccatctggccgcccctgggataagatcgctgcaaatctgatggcttgtcttatggctattgtaatgttggttcgatcaatcaaagatcttgccacaatgagattgtcatctaaaggcgggtcagaagaaagctactgtacattgtacccggactccgtccagaaagaggaattccgtcctccttcgccattccctgggttcgctgaagccgacctattcgccgtggtcttgcaaaggctgggagagcttgaagagaaggtccagatgcttcaagaaaagccttctgaaatgccttgcgagaaagaagagttgcttaacgctgctgtgcgtcgtgtggatgcattggaagctgaactaattgtaacaaagaaggctttgcacgaggctcttatcaggcaagaggaactgctcgcgaacatcgacagcaaggagattgccagggctcagagaaagaagaaaacaatgttctgctactaggacaacacctgcttccgtgaggagatgacaaacgcggcggaccccttcatttttctgacacttgtgaatcaacaggtttccgttgtaaatcaacaaaattctggcataaataaaatgttttttttttaaaaattgcaatcctgagcattgctgcctcctcccggtctcgcaatctggttgttgttagttgcagcataactgcataattggttggttagccgcgccgatgataattggttggttt

SEQ ID NO: 42303 - DNA, 1965 bp, Zea Mays
cgcgtagcttcctacgagggagaggttttgaagggtgctcaagtcacgatgaacgtagagaccataagtcagactttgaagtctctgaagatgaaaagaagacaagaataagctctttgaagaaaaaagcaatagatgcatcaacaaagattaggcactcattaaaaaagactagaaggaagagtggtagtagggtcctttctgtgtctattgaggatgtgcgcgatctagaggagctgcaagctgttgaagcatttagacaagcattactcttggatgagctgttgcctgcaaggcatgacgactatcatatgatgctgagatttctgaaggcaaggaaatttgatatcgataaagccaagcaaatgtggattgatatgcttcagtggcggagggagtatggcactgatacaattgtggaggacttcgaatacactgagttgagcaccgttttgcaatattatcctcatggttatcatggagttgacaaagaggggagacctgtttacattgaaaggcttggaaaggttgaccctagcaaacttatgaatgtcacaacgatggatcgatacgtgcgataccatgtgaaggagtttgagaggagcttcttgattaaatttccagcttgctctcttgctgcaaaaaggcacattgattccagcacgacaattctggatgtccacggagtggggttgaaaaatttcagcaaaactgcacgcgaattaattcaacgactgcagaaaattgacaatgataactacccagagactctataccaaatgtttatcgtcaatgctggtccgggcttccggttactatggaacactgtgaagtccttccttgatcccaaaacgaccgccaagatacatatagtccaaagtggtggggttcattgtgctcgtcaaattgtaactatttccaatggtgaggaaaaatttattacttacgccaaaccgaagcgccacgcaatgagagggagtgacacatcaactgctgagtctggttcagaagctgatgatgctgtgtcccccaaagctctcagaagttacatatcacatcctaagttgaccccagttcgtgaagaggtcaaaatggtcagggctactagcttttctactcgtgtccctgaatatgatgtacctgttgttgacaaggccgtggatgctacatggaagagagagcaaccacgaaaggcaccatccgtgccccaagatgcagactcatctgtgaaaactgcatccaagccatctggccgcccctgggataagatcgctgcaaatctgatggcttgtcttatggctattgtaatgttggttcgatcaatcaaagatcttgccacaatgagattgtcatctaaaggcgggtcagaagaaagctactgtacattgtacccggactccgtccagaaagaggaattccgtcctccttcgccattccctgggttcgctgaagccgacctattcgccgtggtcttgcaaaggctgggagagcttgaagagaaggtccagatgcttcaagaaaagccttctgaaatgccttgcgagaaagaagagttgcttaacgctgctgtgcgtcgtgtggatgcattggaagctgaactaattgtaacaaagaaggctttgcacgaggctcttatcaggcaagaggaactgctcgcgaacatcgacagcaaggagattgccagggctcagagaaagaagaaaacaatgttctgctactaggacaacacctgcttccgtgaggagatgacaaacgcggcggaccccttcatttttctgacacttgtgaatcaacaggtttccgttgtaaatcaacaaaattctggcataaataaaatgttttttttttaaaaattgcaatcctgagcattgctgcctcctcccggtctcgcaatctggttgttgttagttgcagcataactgcataattggttggttagccgcgccgatgataattggttggttt

SEQ ID NO: 42304 - DNA, 776 bp, Zea Mays
aaaacaactactcaaaattatcaaattgactaggatgctaaatgaaaaagtgaacgatacataaagacatgtacaaactcgaaagtataaaaaacataaaaataaaatactatacgatacaacaaaaaacacaaaagtttcttttaaacatgaacttgcccgtcctttatgacaagacaaattgcttatttgattacataaatatttgatacaaatatcaacattgttctcctgctttaaatagaaaagacatcaatgctctaatccacagtactcagcacataaaagttccaggtactcagaaacatacaagcaaggatctggaatcacatgataatgtccttcctttgcgattaccaagagcatggttattataagagcaccgtcgttactattacatcgttctcgtggatgcacatctgctacacagggagcgctgccactatccgatgcattagtggggatgccaaccaaaatgtactcaagaaagagaccgctagggaggagctcagagagttgctggatctgctcaacggagggaacgaaatccctgctcatacaagaggtgtcagaagaaagcggtgctcgtcacagctaccatatccctgtatgatcaatatgaatgaatgaacaaaacaaaacacagaacgaatcgcaggcattcaggaaaccatgacgacggacgcgaggagctcgcaacgagaccggatgcatcgtcgtcacaaggcgaagcgcgagcgctagaagaggtggcggcggcgggtggtggcttaaac

SEQ ID NO: 42305 - DNA, 2863 bp, Zea Mays
ctagctataactaaaacgaaatggagggagtattagttaagagatagagttagacatagagatacacaaatacaaatgctcttctcacacccgcagcagcggtcacactcaagtcccaacaataggaagcagcagaagatgataggagggtcagcgtgactgcgtgagcggccgtggtcagacacgagacgcggtccaagagtcccgcagccgcagggcccaactaatcggccgtcagtcctttgtcccccacctgctcagtgcataatcaacgggccctacccgcgtctcttcttgcctcgcctgctgctgctcgctcctgccgcgacggccgccggcgaccctcccggcacccgtgtagctggttggcccttcggcatcgccgtccgcgcgccggtcaaccgctccgcgctcgtgctccccttccctccccaccaactataccagcacctatagatccagctcggcacggcagcttaagaccagtctccctctgcttcctccctcccttgtcccttgtcccttccttgtttcttcgcctggcgttcccgttccctgccacctcgcccgctctcctccccctctctcgaccacctcctcgggagtagaggggggctgctctgggcgtggtgcggcccccagatctgggccggcgggcggagggcgggatgaagtcgtcgctgagaagccggcaggagtcgcggcgggtcagcaacggcgtcatcatcggcgccatgctgctgtccctctgcgtcctcagtttcgtcaaggccagatactgcgccacccccctcggcaaggccgaggaccagctcgaggagcagatgaacgccagcatccggatggagccggaggagtcgtcgccggccaggacgcccggaggtctaggaggaggacgagcaggaagcggaagaagagaatgtggtgaccaagccgccgcctccgccgccggccgtcacggctaacaggggcagcaagaagaagaagggcaagggcaagccgacgtgctacatgacgagcaagcggtcggagcggtgcgacgcgtccggcgacatccgggtggacgggaaccgctccaccatctacgtcggcgggatagagagggagtggaggacgaagccgtacgcgcgctaccacgaccccgtggccatggcccacgtccgcgagtacacgctgaaggcgctcccggagccgggggcggcggcggcgcccgcgtgcaccaggaaccacagcgtccccggcttcctcttctccaacggcgggttctccggcaacctgtaccacgactacacggacgtgctggtgccgctgttcatcagcacgcaccagttccgtgggcgcgtgcagttcctggtgagcgggatgaagccgtggtgggtgggcaagttcacgcccttcttccggcagctcacgcggcacgacgtgatcgacgtggacaaggacggggaggtgcactgcttcccgcggatcgtggtgggcgccaccttccacagggacatgggcgtggacccgcggcgcgcgccgggccacgtctccgcggtggacttcaagcgcgccctgcgcgccgccttcgggctgaagcgcgaggcggcgtcccgcggcggcggcggcggcgccacgggggacgggaaaccgcggctgctcatcatctcccggcgtgggtcgcgccggttcctgaactcgcgggagatggcggtcgccgcgggcgacgccgggttcgaggtgcgggtggcggagcccgaccagcgcacggacatggcggcgttcgcggcgctggtgaactccgcggacgccatggtgggcgtgcacggcgccgggctgaccaacatggtgttcctgccccgcggcgccgtgctggtccaggtggtgccgttcggcgggctggagtggctgacgggcgtcacgttcaaggagcccgcggcggacatggaggtgagctacatggactaccacgtgcggctggaggagagctcgctggtggaccagtacccgaggggccaccaggtgctcaccgacccctacgccgtgcaccggcaggggtgggacgcgctcaagacggcgtatctggacaagcagaacatccggatggatctcgacaggttcagggccacgctgcgggaggtcatggcccggttgccgtctccatgaccggccggcggccgccgtcagctccaaccgcccaaccgtccggtctggaggtagataggttggtgtatctaaatctgtcgtccccgctgcatgctcaaactagcttaatcttccttcctttttttccttccttttttttaactagcaagattctttcgatccctccattgttttgctgtgttattactgctacataaggaacctcatgggaaaacgatgagcaagcaaagcaagaagaccaagctgtcgcttttaaaaaaaaaataaaaaaaaatgtatacagtgagagagagagagagcagggccagctgaatctagcacagatgtcgatctgttaatttgtactagtatacagcaacccttttttttttgtgattattggttactcatgtagtcatgtgtgtatcagtgtgtggatggatgccaagatgtaaagaactctagcaaggaccatgagacttatgattaggtcatctccgacctcacccatttctggattttttttttcctgcgatgctttgtcaggtctggtcggccattgtcgtgcacaacgagtgtgcaagttcccctgtcgcggtggctggactggatcgcatcgcggtgtcgatttgggtagtggtagcacttagcagcagaaggaacttggcagttgacacagcctagttgtttggccacttgccagcgacggcgacgggcggacgacgcatgagatgac

SEQ ID NO: 42306 - DNA, 1646 bp, Zea Mays
ccgcaggcccattgaggacaccagagtgtatggatcgctgccgcgtgctcccgtcgcggctcccgcacgcggacgctgtcgaccaactactcgttgtccttttcccgaacgccgagccctagcgtcaacgcggccaggcggcggtcagggccgggcgtcaggcggcagcagtggagcacgcagcccagcagctctaagttctattcagattggtgttttgctggtaccatgtccagtccgtggagccctctgagtattgaggaagacgaagagatacaagagcttggtgccgaggagcagcaggttggtgagcagctgcggcagggtgatgggcagcagcaggagttgacagctgatgcaagagcacaagagaccggaatgaaacgtgcaagatcagtgtccagttcatctactaatccatcaaattctcgtaaatctgagggaaagataaaggttgaggaaaatgcaccaggagctgcaacaggagtgattttgtctcttcgtgaaagtttacaggactgtaaacaaagccttgcatcttgccaggtggaactggaagctgcaaaatcagaaatcgagaagtggcattcagcatttcagagcattccagctgtaccttctggtaccattccagatcctgtttcagtggtgtcttacctcagtaccctgaagtcatcagaggaatcattgaaggagcagctggagaaagcaaagaaaagggaggcagcttttatagtaacatttgcaaaacgagagcaggagattgcagaactgaagacaaggagattattgcttgatccagcaattcatgaggaatttacacgtttaaagaatcttgtggaggagaaagagaaaaaaataaaggagctacaggacaatgttgctgctgtcaattttactccatccagcaaactggggaaaatgctaatggctaaatgtagaacattgcaagaggaaaatgaagagattgggacgatggcatcagaaggaaaaatccatgagcttggaatgaaaattgcagttctgaagtctcagaacaatgagctcaggaatcaatttgatgttttgtacaaacacatggatggtgtaacaaatgatgtggagagatcaaacgaactggtgtccatcctgcaagaggagttagaagctaaggatctagagctgactagattgaaggaggtgcttgcccagaaaggagctactcaggacgcaccggtggagaccagtgacgacgctggaaacggtcaggaggcagattcagatacactgcaagtgaaggcggaaagctaagggagtttaggctttgaagtgtgtttgttgggacttgtgggaaaagtaatatcatgttatgcggtctcatagcatgtctaggttattatatagtaggggaatcactgcacaaaaacatcggcaaacttttatctatgatcgtacatatggctttacaaaagattattttgcattgtagacaacactattatagtgtggattttgaaattagatatataataataatatagatgagtaagctgtgagtaagaaagcctcaaactgattcgctacagatttgcgctggctgaaccagtaatgatctccaacaattcatatgaatattctcacatgcaaggcattattcgtcatttccg

SEQ ID NO: 42307 - DNA, 1657 bp, Zea Mays
ccgcaggcccattgaggacaccagagtgtatggatcgctgccgcgtgctcccgtcgcggctcccgcacgcggacgctgtcgaccaactactcgttgtccttttcccgaacgccgagccctagcgtcaacgcggccaggcggcggtcagggccgggcgtcaggcggcagcagtggagcacgcagcccagcagctctaagttctattcagattggtgttttgctggtaccatgtccagtccgtggagccctctgagtattgaggaagacgaagagatacaagagcttggtgccgaggagcagcaggttggtgagcagctgcggcagggtgatgggcagcagcaggagttgacagctgatgcaagagcacaagagaccggaatgaaacgtgcaagatcagtgtccagttcatctactaatccatcaaattctcgtaaatctgagggaaagataaaggttgaggaaaatgcaccaggagctgcaacaggagtgattttgtctcttcgtgaaaggtggaactggaagctgcaaaatcagaaatcgagaagtggcattcagcatttcagagcattccagctgtaccttctggtaccattccagatcctgtttcagtggtgtcttacctcagtaccctgaagtcatcagaggaatcattgaaggagcagctggagaaagcaaagaaaagggaggcagcttttatagtaacatttgcaaaacgagagcaggagattgcagaactgaagtctgcagttagagatttaaaaacacaattaaggccaccatcaatgcagacaaggagattattgcttgatccagcaattcatgaggaatttacacgtttaaagaatcttgtggaggagaaagagaaaaaaataaaggagctacaggacaatgttgctgctgtcaattttactccatccagcaaactggggaaaatgctaatggctaaatgtagaacattgcaagaggaaaatgaagagattgggacgatggcatcagaaggaaaaatccatgagcttggaatgaaaattgcagttctgaagtctcagaacaatgagctcaggaatcaatttgatgttttgtacaaacacatggatggtgtaacaaatgatgtggagagatcaaacgaactggtgtccatcctgcaagaggagttagaagctaaggatctagagctgactagattgaaggaggtgcttgcccagaaaggagctactcaggacgcaccggtggagaccagtgacgacgctggaaacggtcaggaggcagattcagatacactgcaagtgaaggcggaaagctaagggagtttaggctttgaagtgtgtttgttgggacttgtgggaaaagtaatatcatgttatgcggtctcatagcatgtctaggttattatatagtaggggaatcactgcacaaaaacatcggcaaacttttatctatgatcgtacatatggctttacaaaagattattttgcattgtagacaacactattatagtgtggattttgaaattagatatataataataatatagatgagtaagctgtgagtaagaaagcctcaaactgattcgctacagatttgcgctggctgaaccagtaatgatctccaacaattcatatgaatattctcacatgcaaggcattattcgtcatttccg

SEQ ID NO: 42308 - DNA, 1564 bp, Zea Mays
caatttttgaaatgcttagcttggctttgtccccaaattgcttactatcctgatttaattttatgtatcaagattcagattggtgttttgctggtaccatgtccagtccgtggagccctctgagtattgaggaagacgaagagatacaagagcttggtgccgaggagcagcaggttggtgagcagctgcggcagggtgatgggcagcagcaggagttgacagctgatgcaagagcacaagagaccggaatgaaacgtgcaagatcagtgtccagttcatctactaatccatcaaattctcgtaaatctgagggaaagataaaggttgaggaaaatgcaccaggagctgcaacaggagtgattttgtctcttcgtgaaagtttacaggactgtaaacaaagccttgcatcttgccaggtggaactggaagctgcaaaatcagaaatcgagaagtggcattcagcatttcagagcattccagctgtaccttctggtaccattccagatcctgtttcagtggtgtcttacctcagtaccctgaagtcatcagaggaatcattgaaggagcagctggagaaagcaaagaaaagggaggcagcttttatagtaacatttgcaaaacgagagcaggagattgcagaactgaagtctgcagttagagatttaaaaacacaattaaggccaccatcaatgcagacaaggagattattgcttgatccagcaattcatgaggaatttacacgtttaaagaatcttgtggaggagaaagagaaaaaaataaaggagctacaggacaatgttgctgctgtcaattttactccatccagcaaactggggaaaatgctaatggctaaatgtagaacattgcaagaggaaaatgaagagattgggacgatggcatcagaaggaaaaatccatgagcttggaatgaaaattgcagttctgaagtctcagaacaatgagctcaggaatcaatttgatgttttgtacaaacacatggatggtgtaacaaatgatgtggagagatcaaacgaactggtgtccatcctgcaagaggagttagaagctaaggatctagagctgactagattgaaggaggtgcttgcccagaaaggagctactcaggacgcaccggtggagaccagtgacgacgctggaaacggtcaggaggcagattcagatacactgcaagtgaaggcggaaagctaagggagtttaggctttgaagtgtgtttgttgggacttgtgggaaaagtaatatcatgttatgcggtctcatagcatgtctaggttattatatagtaggggaatcactgcacaaaaacatcggcaaacttttatctatgatcgtacatatggctttacaaaagattattttgcattgtagacaacactattatagtgtggattttgaaattagatatataataataatatagatgagtaagctgtgagtaagaaagcctcaaactgattcgctacagatttgcgctggctgaaccagtaatgatctccaacaattcatatgaatattctcacatgcaaggcattattcgtcatttccg

SEQ ID NO: 42309 - DNA, 1508 bp, Zea Mays
cttggctttgtccccaaattgcttactatcctgatttaattttatgtatcaagattcagattggtgttttgctggtaccatgtccagtccgtggagccctctgagtattgaggaagacgaagagatacaagagcttggtgccgaggagcagcaggttggtgagcagctgcggcagggtgatgggcagcagcaggagttgacagctgatgcaagagcacaagagaccggaatgaaacgtgcaagatcagtgtccagttcatctactaatccatcaaattctcgtaaatctgagggaaagataaaggttgaggaaaatgcaccaggagctgcaacaggagtgattttgtctcttcgtgaaaggtggaactggaagctgcaaaatcagaaatcgagaagtggcattcagcatttcagagcattccagctgtaccttctggtaccattccagatcctgtttcagtggtgtcttacctcagtaccctgaagtcatcagaggaatcattgaaggagcagctggagaaagcaaagaaaagggaggcagcttttatagtaacatttgcaaaacgagagcaggagattgcagaactgaagtctgcagttagagatttaaaaacacaattaaggccaccatcaatgcagacaaggagattattgcttgatccagcaattcatgaggaatttacacgtttaaagaatcttgtggaggagaaagagaaaaaaataaaggagctacaggacaatgttgctgctgtcaattttactccatccagcaaactggggaaaatgctaatggctaaatgtagaacattgcaagaggaaaatgaagagattgggacgatggcatcagaaggaaaaatccatgagcttggaatgaaaattgcagttctgaagtctcagaacaatgagctcaggaatcaatttgatgttttgtacaaacacatggatggtgtaacaaatgatgtggagagatcaaacgaactggtgtccatcctgcaagaggagttagaagctaaggatctagagctgactagattgaaggaggtgcttgcccagaaaggagctactcaggacgcaccggtggagaccagtgacgacgctggaaacggtcaggaggcagattcagatacactgcaagtgaaggcggaaagctaagggagtttaggctttgaagtgtgtttgttgggacttgtgggaaaagtaatatcatgttatgcggtctcatagcatgtctaggttattatatagtaggggaatcactgcacaaaaacatcggcaaacttttatctatgatcgtacatatggctttacaaaagattattttgcattgtagacaacactattatagtgtggattttgaaattagatatataataataatatagatgagtaagctgtgagtaagaaagcctcaaactgattcgctacagatttgcgctggctgaaccagtaatgatctccaacaattcatatgaatattctcacatgcaaggcattattcgtcatttccg

SEQ ID NO: 42310 - DNA, 1292 bp, Zea Mays
cattgctccacaatctttcaattcctttccactcgctagggaaagataaaggttgaggaaaatgcaccaggagctgcaacaggagtgattttgtctcttcgtgaaagtttacaggactgtaaacaaagccttgcatcttgccaggtggaactggaagctgcaaaatcagaaatcgagaagtggcattcagcatttcagagcattccagctgtaccttctggtaccattccagatcctgtttcagtggtgtcttacctcagtaccctgaagtcatcagaggaatcattgaaggagcagctggagaaagcaaagaaaagggaggcagcttttatagtaacatttgcaaaacgagagcaggagattgcagaactgaagtctgcagttagagatttaaaaacacaattaaggccaccatcaatgcagacaaggagattattgcttgatccagcaattcatgaggaatttacacgtttaaagaatcttgtggaggagaaagagaaaaaaataaaggagctacaggacaatgttgctgctgtcaattttactccatccagcaaactggggaaaatgctaatggctaaatgtagaacattgcaagaggaaaatgaagagattgggacgatggcatcagaaggaaaaatccatgagcttggaatgaaaattgcagttctgaagtctcagaacaatgagctcaggaatcaatttgatgttttgtacaaacacatggatggtgtaacaaatgatgtggagagatcaaacgaactggtgtccatcctgcaagaggagttagaagctaaggatctagagctgactagattgaaggaggtgcttgcccagaaaggagctactcaggacgcaccggtggagaccagtgacgacgctggaaacggtcaggaggcagattcagatacactgcaagtgaaggcggaaagctaagggagtttaggctttgaagtgtgtttgttgggacttgtgggaaaagtaatatcatgttatgcggtctcatagcatgtctaggttattatatagtaggggaatcactgcacaaaaacatcggcaaacttttatctatgatcgtacatatggctttacaaaagattattttgcattgtagacaacactattatagtgtggattttgaaattagatatataataataatatagatgagtaagctgtgagtaagaaagcctcaaactgattcgctacagatttgcgctggctgaaccagtaatgatctccaacaattcatatgaatattctcacatgcaaggcattattcgtcatttccg

SEQ ID NO: 42311 - DNA, 915 bp, Zea Mays
cctccacaagggtggatggctggcagcatgcatgtgcttgggcttgacaaggagattattgcttgatccagcaattcatgaggaatttacacgtttaaagaatcttgtggaggagaaagagaaaaaaataaaggagctacaggacaatgttgctgctgtcaattttactccatccagcaaactggggaaaatgctaatggctaaatgtagaacattgcaagaggaaaatgaagagattgggacgatggcatcagaaggaaaaatccatgagcttggaatgaaaattgcagttctgaagtctcagaacaatgagctcaggaatcaatttgatgttttgtacaaacacatggatggtgtaacaaatgatgtggagagatcaaacgaactggtgtccatcctgcaagaggagttagaagctaaggatctagagctgactagattgaaggaggtgcttgcccagaaaggagctactcaggacgcaccggtggagaccagtgacgacgctggaaacggtcaggaggcagattcagatacactgcaagtgaaggcggaaagctaagggagtttaggctttgaagtgtgtttgttgggacttgtgggaaaagtaatatcatgttatgcggtctcatagcatgtctaggttattatatagtaggggaatcactgcacaaaaacatcggcaaacttttatctatgatcgtacatatggctttacaaaagattattttgcattgtagacaacactattatagtgtggattttgaaattagatatataataataatatagatgagtaagctgtgagtaagaaagcctcaaactgattcgctacagatttgcgctggctgaaccagtaatgatctccaacaattcatatgaatattctcacatgcaaggcattattcgtcatttccg

SEQ ID NO: 42312 - DNA, 3056 bp, Zea Mays
aaccagaagcagtcgtcaaagggccaaagtcccctgctccccgcccggcgcccgcggcccgccgctcaaacccctaaaccctagccgcaccagcgccctattccctccttcggcggctccggcagcgagcggtcactagcaaccagcatcgtacggcgaagaagcgccgtttacacccatctggcggagatgccgctggggcagcgtccgggggacaagagtgacgcccgctactgcggggtggaggtgctcgacttccctgccggcgaggacctccccgccgttctcaaccactccctcgcctccgccttcgacttcatcctcgtccctctggttgaccccaactaccggccggcgcccggctccgttctgcccgtgtcggcgtcggacctcatccttggcccggcccagtggagcaaccacgtcgtcgggaagatcagcgagtggattgatttggactctgaggacgagcggctccgccttgactccgagctcacgctgaagcaggagattgcgtgggcgtctcacgtctcgttgcaggcatgtgttcttcctgcccccaggagatctttttgtggcaattatgccagagtcgtgaatcaaattttgcaaggcctgaccaatatgcatttgtggctcaggttgcctctggagaagtccgagcctatggatgatgatcttgataaaataaagaataacagccacacgagtgaaattgtagactcatgggaattatggaattcattcagattgctatgtgaccatagtagccaactatgtgtggcacttgatattttgagcactctgccatcaataaactcattagcaaggtggtttggagagcctgtaagggctgctattctgcaaaccgaggcttttcttacaaatgcaaaaggatatccttgtttatcaaagcgccatcagagtctgctaactggattttttaaacattctgttcaggtgataatatctggaagatcaaatcacaatgttttcccagtatctgaaggagtgctctcaggtgacgagagctacgcagaagattcccgtgttcgacatgcattaactccttaccttgaatacattgcgtacctatatcggaagatggatccgcttcctgagcaggaacgcattgagattaattacagggactttttgcagtctcctctgcagcctctaatggacaatttggaagctcaaacttatgagacatttgagaaggatgttgtgaagtacactcagtttccttgaaggagctgatgatcctcatttggcaaaagaaaacacatatttatcgaagagcagttgctaaggccttggttgatagggttgctgatgatgcagtctccacaactaggacggtgctgatggttgtgggagcaggacggggacctctagtacgagcttcattgcaggccgctgaagaaactggtcgcaaattaaaagtatatgctgttgaaaaaaatcctaacgctgttattactcttcatagtttgatcaaattggagggttgggaaagcctggttactgtaatttctagtgacatgcggtgttgggacgcccctgaaaaggcagatgttttggtcagtgaattgcttgggtcctttggtgacaatgaactatctcctgagtgtcttgatggtgctcagagattcttgaagcctgatgggatttccattccttcatcatacaccagcttcatccaaccaataacagcatcaaaattgcacaacgatatcaaagcacacaaagacattgcacattttgaaaccgcatatgttgtcaaactacaccgcatagcgacacttgcacctccacaacaggtttttactttcacccatccaaatttctcaccaaatgctagcaaccaaaggtacaccaagttgcaatttgaaatgctgccagatatgggttcatgccttgtgcatggatttgctggttattttgactctgtactttataaagatgttcatcttggaatcgagccaaacacagctacaccaaacatgtttagctggttccccatcttcttcccattgagaaaacccatctatgtgccggaagggtctcctatagaagtgcacttctggcggtgctgtgcccccacaaaggtgtggtacgagtgggctgtgactacaccgaccctgtcgccgatccacaacagcaatggccggtcctattgggttggtctatagtaactagtaaggcaatcaagatggtcgctttgtgttgtaacagagaagaaaaaaaaacagagagatgatagggtccaccggtccagttctatttgagccgggtgctactggtttctgcctggaggagcagatcaaaggatctgtaacgcgttgctatctgaaaggcatttcaggtcattgtccgcaacaagaagagagtaggatataactatgaactaagcttgagatttagcggtgaatggttaatcaaagaagaaaacaagaagatcaaagggcatctagacattcccgagttttcattcggcgagatcgatgacttggaggtacaagtaaggctcggcgatgacaagggcctcgcctctgatgatagaacacggatctgcaaggatctcaagtcctttttggcgccgatccaggagaaaatgcgcatgtttgaagaagagctcaaaggtagatagcgagtattagcaagagttcgcagtgctaggcaagtgacttggcagttggcaccgccgtgctagctgtgatgtgtgtgtcgcaacgctctcaaagctgagactgtatgtgtactggtgtaatacacttgtcaagatgagcacgtacgaactgttctcttggtatccctcattttcagcatgtgatagtaaaaggaattcaagatgtttttgcatgaatggtatggatataggctctgtttggcacagcttattttcagcttcttcataaatttaagcaaaagttctgtcagcttctgcagcagcttatcagttcagctgcttctcagaatacactaagcagccaacaagcagaagctgctgttcaccagcttctctaataagctgttttttcaacaagcagcag

SEQ ID NO: 42313 - DNA, 2864 bp, Zea Mays
aaccagaagcagtcgtcaaagggccaaagtcccctgctccccgcccggcgcccgcggcccgccgctcaaacccctaaaccctagccgcaccagcgccctattccctccttcggcggctccggcagcgagcggtcactagcaaccagcatcgtacggcgaagaagcgccgtttacacccatctggcggagatgccgctggggcagcgtccgggggacaagagtgacgcccgctactgcggggtggaggtgctcgacttccctgccggcgaggacctccccgccgttctcaaccactccctcgcctccgccttcgacttcatcctcgtccctctggttgaccccaactaccggccggcgcccggctccgttctgcccgtgtcggcgtcggacctcatccttggcccggcccagtggagcaaccacgtcgtcgggaagatcagcgagtggattgatttggactctgaggacgagcggctccgccttgactccgagctcacgctgaagcaggagattgcgtgggcgtctcacgtctcgttgcaggcatgtgttcttcctgcccccaggagatctttttgtggcaattatgccagagtcgtgaatcaaattttgcaaggcctgaccaatatgcatgttgcctctggagaagtccgagcctatggatgatgatcttgataaaataaagaataacagccacacgagtgaaattgtagactcatgggaattatggaattcattcagattgctatgtgaccatagtagccaactatgtgtggcacttgatattttgagcactctgccatcaataaactcattagcaaggtggtttggagagcctgtaagggctgctattctgcaaaccgaggcttttcttacaaatgcaaaaggatatccttgtttatcaaagcgccatcagagtctgctaactggattttttaaacattctgttcaggtgataatatctggaagatcaaatcacaatgttttcccagtatctgaaggagtgctctcaggtgacgagagctacgcagaagcctctaatggacaatttggaagctcaaacttatgagacatttgagaaggatgttgtgaagtacactcagtatcgaagagcagttgctaaggccttggttgatagggttgctgatgatgcagtctccacaactaggacggtgctgatggttgtgggagcaggacggggacctctagtacgagcttcattgcaggccgctgaagaaactggtcgcaaattaaaagtatatgctgttgaaaaaaatcctaacgctgttattactcttcatagtttgatcaaattggagggttgggaaagcctggttactgtaatttctagtgacatgcggtgttgggacgcccctgaaaaggcagatgttttggtcagtgaattgcttgggtcctttggtgacaatgaactatctcctgagtgtcttgatggtgctcagagattcttgaagcctgatgggatttccattccttcatcatacaccagcttcatccaaccaataacagcatcaaaattgcacaacgatatcaaagcacacaaagacattgcacattttgaaaccgcatatgttgtcaaactacaccgcatagcgacacttgcacctccacaacaggtttttactttcacccatccaaatttctcaccaaatgctagcaaccaaaggtacaccaagttgcaatttgaaatgctgccagatatgggttcatgccttgtgcatggatttgctggttattttgactctgtactttataaagatgttcatcttggaatcgagccaaacacagctacaccaaacatgtttagctggttccccatcttcttcccattgagaaaacccatctatgtgccggaagggtctcctatagaagtgcacttctggcggtgctgtgcccccacaaaggtgtggtacgagtgggctgtgactacaccgaccctgtcgccgatccacaacagcaatggccggtcctattgggttggtctatagtaactagtaaggcaatcaagatggtcgctttgtgttgtaacagagaagaaaaaaaaacagagagatgatagggtccaccggtccagttctatttgagccgggtgctactggtttctgcctggaggagcagatcaaaggatctgtaacgcgttgctatctgaaaggcatttcaggtcattgtccgcaacaagaagagagtaggatataactatgaactaagcttgagatttagcggtgaatggttaatcaaagaagaaaacaagaagatcaaagggcatctagacattcccgagttttcattcggcgagatcgatgacttggaggtacaagtaaggctcggcgatgacaagggcctcgcctctgatgatagaacacggatctgcaaggatctcaagtcctttttggcgccgatccaggagaaaatgcgcatgtttgaagaagagctcaaaggtagatagcgagtattagcaagagttcgcagtgctaggcaagtgacttggcagttggcaccgccgtgctagctgtgatgtgtgtgtcgcaacgctctcaaagctgagactgtatgtgtactggtgtaatacacttgtcaagatgagcacgtacgaactgttctcttggtatccctcattttcagcatgtgatagtaaaaggaattcaagatgtttttgcatgaatggtatggatataggctctgtttggcacagcttattttcagcttcttcataaatttaagcaaaagttctgtcagcttctgcagcagcttatcagttcagctgcttctcagaatacactaagcagccaacaagcagaagctgctgttcaccagcttctctaataagctgttttttcaacaagcagcag

SEQ ID NO: 42314 - DNA, 1958 bp, Zea Mays
tagtagggcagacttagtgccggaagctcccacatgggtggggtctggggaagggataaaccaaggcaagtttccccccacaaatgcggagaggctgctttaaaccagtgacctggtgactgagtcctctaatggacaatttggaagctcaaacttatgagacatttgagaaggatgttgtgaagtacactcagtatcgaagagcagttgctaaggccttggttgatagggttgctgatgatgcagtctccacaactaggacggtgctgatggttgtgggagcaggacggggacctctagtacgagcttcattgcaggccgctgaagaaactggtcgcaaattaaaagtatatgctgttgaaaaaaatcctaacgctgttattactcttcatagtttgatcaaattggagggttgggaaagcctggttactgtaatttctagtgacatgcggtgttgggacgcccctgaaaaggcagatgttttggtcagtgaattgcttgggtcctttggtgacaatgaactatctcctgagtgtcttgatggtgctcagagattcttgaagcctgatgggatttccattccttcatcatacaccagcttcatccaaccaataacagcatcaaaattgcacaacgatatcaaagcacacaaagacattgcacattttgaaaccgcatatgttgtcaaactacaccgcatagcgacacttgcacctccacaacaggtttttactttcacccatccaaatttctcaccaaatgctagcaaccaaaggtacaccaagttgcaatttgaaatgctgccagatatgggttcatgccttgtgcatggatttgctggttattttgactctgtactttataaagatgttcatcttggaatcgagccaaacacagctacaccaaacatgtttagctggttccccatcttcttcccattgagaaaacccatctatgtgccggaagggtctcctatagaagtgcacttctggcggtgctgtgcccccacaaaggtgtggtacgagtgggctgtgactacaccgaccctgtcgccgatccacaacagcaatggccggtcctattgggttggtctatagtaactagtaaggcaatcaagatggtcgctttgtgttgtaacagagaagaaaaaaaaacagagagatgatagggtccaccggtccagttctatttgagccgggtgctactggtttctgcctggaggagcagatcaaaggatctgtaacgcgttgctatctgaaaggcatttcaggtcattgtccgcaacaagaagagagtaggatataactatgaactaagcttgagatttagcggtgaatggttaatcaaagaagaaaacaagaagatcaaagggcatctagacattcccgagttttcattcggcgagatcgatgacttggaggtacaagtaaggctcggcgatgacaagggcctcgcctctgatgatagaacacggatctgcaaggatctcaagtcctttttggcgccgatccaggagaaaatgcgcatgtttgaagaagagctcaaaggtagatagcgagtattagcaagagttcgcagtgctaggcaagtgacttggcagttggcaccgccgtgctagctgtgatgtgtgtgtcgcaacgctctcaaagctgagactgtatgtgtactggtgtaatacacttgtcaagatgagcacgtacgaactgttctcttggtatccctcattttcagcatgtgatagtaaaaggaattcaagatgtttttgcatgaatggtatggatataggctctgtttggcacagcttattttcagcttcttcataaatttaagcaaaagttctgtcagcttctgcagcagcttatcagttcagctgcttctcagaatacactaagcagccaacaagcagaagctgctgttcaccagcttctctaataagctgttttttcaacaagcagcag

SEQ ID NO: 42315 - DNA, 1861 bp, Zea Mays
gggaaggatttttttcctagttcacaggcctctaatggacaatttggaagctcaaacttatgagacatttgagaaggatgttgtgaagtacactcagtatcgaagagcagttgctaaggccttggttgatagggttgctgatgatgcagtctccacaactaggacggtgctgatggttgtgggagcaggacggggacctctagtacgagcttcattgcaggccgctgaagaaactggtcgcaaattaaaagtatatgctgttgaaaaaaatcctaacgctgttattactcttcatagtttgatcaaattggagggttgggaaagcctggttactgtaatttctagtgacatgcggtgttgggacgcccctgaaaaggcagatgttttggtcagtgaattgcttgggtcctttggtgacaatgaactatctcctgagtgtcttgatggtgctcagagattcttgaagcctgatgggatttccattccttcatcatacaccagcttcatccaaccaataacagcatcaaaattgcacaacgatatcaaagcacacaaagacattgcacattttgaaaccgcatatgttgtcaaactacaccgcatagcgacacttgcacctccacaacaggtttttactttcacccatccaaatttctcaccaaatgctagcaaccaaaggtacaccaagttgcaatttgaaatgctgccagatatgggttcatgccttgtgcatggatttgctggttattttgactctgtactttataaagatgttcatcttggaatcgagccaaacacagctacaccaaacatgtttagctggttccccatcttcttcccattgagaaaacccatctatgtgccggaagggtctcctatagaagtgcacttctggcggtgctgtgcccccacaaaggtgtggtacgagtgggctgtgactacaccgaccctgtcgccgatccacaacagcaatggccggtcctattgggttggtctatagtaactagtaaggcaatcaagatggtcgctttgtgttgtaacagagaagaaaaaaaaacagagagatgatagggtccaccggtccagttctatttgagccgggtgctactggtttctgcctggaggagcagatcaaaggatctgtaacgcgttgctatctgaaaggcatttcaggtcattgtccgcaacaagaagagagtaggatataactatgaactaagcttgagatttagcggtgaatggttaatcaaagaagaaaacaagaagatcaaagggcatctagacattcccgagttttcattcggcgagatcgatgacttggaggtacaagtaaggctcggcgatgacaagggcctcgcctctgatgatagaacacggatctgcaaggatctcaagtcctttttggcgccgatccaggagaaaatgcgcatgtttgaagaagagctcaaaggtagatagcgagtattagcaagagttcgcagtgctaggcaagtgacttggcagttggcaccgccgtgctagctgtgatgtgtgtgtcgcaacgctctcaaagctgagactgtatgtgtactggtgtaatacacttgtcaagatgagcacgtacgaactgttctcttggtatccctcattttcagcatgtgatagtaaaaggaattcaagatgtttttgcatgaatggtatggatataggctctgtttggcacagcttattttcagcttcttcataaatttaagcaaaagttctgtcagcttctgcagcagcttatcagttcagctgcttctcagaatacactaagcagccaacaagcagaagctgctgttcaccagcttctctaataagctgttttttcaacaagcagcag

SEQ ID NO: 42316 - DNA, 508 bp, Zea Mays
tagtaggaaacggtctatcctgcgcggaatccgaggcggggcgagtcccgatcgagcaggagcagcagtgtggcagctgccgcatgtagtaggcaggccagcgtgtggaagctccgcccagggccgcgcgggggcagatggcggcgatcggcgaccgaggcgcgggggggagccgcggggcgtggagcccggcccgcgaattgcagaccccctagggtcggcccgcccgaaaccctagaagcccggcaggaccacgccaggagggtggcgggcgcgggcgcggcgacggggtacctgagattccgtacggcggcgagcggcggcggcggcggcgggaccaggtcgatgatgcggggcgggcggcggggagttcgcgggcgatttgggaatgggggaatttgtcggggcgggggcctgctgcgagcgacgcggtgaaggaggaaccggcgtcgaccaatcgcgggttcgggcgcggcgggtcgctgcggatggggcccggggaatggcg

SEQ ID NO: 42317 - DNA, 1079 bp, Zea Mays
ccggactctcgaagagaagctctgcagtctgcaccgcatcgaccatcgccggtaagcaacaagagagccccaccgatggcggaggaagctgcatccctggaggcgccgccgccgctccacaatccctcactgcgaaaatcctcccttgacgatgagacccgcgccctcgtcgtccccgacgccgccgccctcccggcgtctcccccctccgccgtcgaggctaacttcgcgcgctacttcgtcgcagcccatgttgtgtttaaagaggaaggagtcatatccactgttgacttcaatgtcggcaagtcagatcgcagtgagatgaaagtcacaggaaaacggaaaaggaatgcacaacacttgcaagaaaattcggcattgtgcaaagtttgtgtaaatgataaatcttttattgtgagatgctgtgtgaaaggttcccttttggagatcaatgaaagattgatcaaacaaccagatcttcttaataccgctgctgacagggaaggatatatagcagtcttccagccgaaaccagctgactggctcaaaattaaggataaattccttagttatgaggactacaagaacttgagaggagtatgctgacacccaaaagaagatgtttcgaacatgaaggcagcgcttaggttcgactcaaccattcgtgtgatgaaatctttactgctccagatattcgcagttcgatagaagcttcatcacatagctcctgagacgcaaacatgtgcgctggactcacttgaacctcgtgcactgggctggactcattttgctttagttatgagtggatgaatggatgtcggcctatacaagatgctaaggtcctgaagatgttgctttgtttattctgtcagaaatttgatgtataagtactgattcacacattacctcccagtgtaataactgatgaactggaatctaattatcaaagattttgttgtcctccaaattatcaaagtaaaagtggaacttaaaacaaaaacaacgatgaccattgcgtcgactgaatattgttcacagttgggagttgggatcaaagagcaggtacaggattgggccac

SEQ ID NO: 42318 - DNA, 2370 bp, Zea Mays
ccggactctcgaagagaagctctgcagtctgcaccgcatcgaccatcgccggtaagcaacaagagagccccaccgatggcggaggaagctgcatccctggaggcgccgccgccgctccacaatccctcactgcgaaaatcctcccttgacgatgagacccgcgccctcgtcgtccccgacgccgccgccctcccggcgtctcccccctccgccgtcgaggctaacttcgcgcgctacttcgtcgcagattttctgaatccagggtatgatcagtatgtgtatcgccatcctaacggattgtgtgtggttggtttagctccagcccatgttgtgtttaaagaggaaggagtcatatccactgttgacttcaatgtcggcaagtcagatcgcagtgagatgaaagtcacaggaaaacggaaaaggaatgcacaacacttgcaagaaaattcggcattgtgcaaagtttgtgtaaatgataaatcttttattgtgagatgctgtgtgaaaggttcccttttggagatcaatgaaagattgatcaaacaaccagatcttcttaataccgctgctgacagggaaggatatatagcagtcttccagccgaaaccagctgactggctcaaaattaaggataaattccttagttatgaggactacaagaacttgagaggagtatgctgacacccaaaagaagatgtttcgaacatgaaggcagcgcttaggttcgactcaaccattcgtgtgatgaaatctttactgctccagatattcgcagttcgatagaagcttcatcacatagctcctgagacgcaaacatgtgcgctggactcacttgaacctcgtgcactgggctggactcattttgctttagttatgagtggatgaatggatgtcggcctatacaagatgctaaggttgtggtgtcaccaacgcattacttgtttcaaatctatcgcaatggtgtaacgttcttggcatgcacccaagtggagatggccccactgatggcagttgagtttctctctcgcgtggctgatgtcttgacagattatcttggagatctgaatgaagatataatcaaggacaactttgtaattgtgtatcagattttggatgagatgatggataatggttttccactcacaactgagccaaacatcttgaaagagatgatcaccccacctaatattgtgaacaaaatgttgaatgttgttactggcaagagttctacccttggcagcaaacttccagatgcagctgcttcttttgtaccttggcgaagaacaacagtcaaggatgcaagcaatgaagtctatgttaacatagtcgaggaacttgatgcatgtgtgaacagagagggggttctcgtgaaatgcgaagcatacggtgaagtccaagtaaactgcagcctcccaggtgtgccagagctgaccatgtcctttgctaaccctgcaattatcaatgatgttaccttccacccctgcgtccgattcaggccttgggaatcaaatcagatcctatcatttgttcctcccgacgggcagttcaagctcatgagttacagggttcagaaactgaagaagacaccgatctatgtgaaaccacaattaacatcagattccgggaactgccgcgttagtgtgatggtcgggattcgaaatgatcctgggaaacctattgattcgataacagtgcagttccagttgccccctcttattgtttctgctgatctgactgcaaactatggcacggttgacatccttgccgacaagacctgtttgtggacaatcgggcagataccaaaagacaaagcaccggcactctctggaaatttacgactggaggaagggctcgcacaactgcatgcattgccgacatttcaggtgaaattcaggattatgggagttgccctatctggccttcaaattgataagctggacgtgaagaacacaccgaacgctccgtacaaaggttttagagcccagactcaagctgggaagtatgaggtcagatcgtaggtgcttgcaggggggcagctgttagttcattcttgtagaaaacgaatgatgctgcggacctggctcatggcctgttaacacattgttatgatcatcagttgagggttcacggccagctgcatttgggtcgttgcatttgatgggaggtgccattgttctttgttcaggtcaataggtgtcctgtacctgtacctgaatcagattatcctctgttgtgtgaaagcaacagaatactgcgaccctaggcctatctagataaaggttttggattctggcaccttgggttataaaattcacttgagtatagaatctcttttttttgttataagaaaaaaaatctcttttttgttag

SEQ ID NO: 42319 - DNA, 1617 bp, Zea Mays
ggccttcccccctcattcacttctgcctttcctcatctgcccgtcgtcgtatcccccggtccgccggtcacctcgacaaacggcgaagggcggcaaaatgctgcagtgcatctttctcctctccgattccggggaggtgatggtggagaagcagatggcggcgcactgcgtggaccgcgctatctgcgcctggttctgggactacgtcgtcgcccacgccgccggcgatccttccaaagtcttacaggttgtggtgtcaccaacgcattacttgtttcaaatctatcgcaatggtgtaacgttcttggcatgcacccaagtggagatggccccactgatggcagttgagtttctctctcgcgtggctgatgtcttgacagattatcttggagatctgaatgaagatataatcaaggacaactttgtaattgtgtatcagattttggatgagatgatggataatggttttccactcacaactgagccaaacatcttgaaagagatgatcaccccacctaatattgtgaacaaaatgttgaatgttgttactggcaagagttctacccttggcagcaaacttccagatgcagctgcttcttttgtaccttggcgaagaacaacagtcaaggatgcaagcaatgaagtctatgttaacatagtcgaggaacttgatgcatgtgtgaacagagagggggttctcgtgaaatgcgaagcatacggtgaagtccaagtaaactgcagcctcccaggccttgggaatcaaatcagatcctatcatttgttcctcccgacgggcagttcaagctcatgagttacagaaactgaagaagacaccgatctatgtgaaaccacaattaacatcagattccgggaactgccgcgttagtgtgatggtcgggattcgaaatgatcctgggaaacctattgattcgataacagtgcagttccagttgccccctcttattgtttctgctgatctgactgcaaactatggcacggttgacatccttgccgacaagacctgtttgtggacaatcgggcagataccaaaagacaaagcaccggcactctctggaaatttacgactggaggaagggctcgcacaactgcatgcattgccgacatttcaggtgaaattcaggattatgggagttgccctatctggccttcaaattgataagctggacgtgaagaacacaccgaacgctccgtacaaaggttttagagcccagactcaagctgggaagtatgaggtcagatcgtaggtgcttgcaggggggcagctgttagttcattcttgtagaaaacgaatgatgctgcggacctggctcatggcctgttaacacattgttatgatcatcagttgagggttcacggccagctgcatttgggtcgttgcatttgatgggaggtgccattgttctttgttcaggtcaataggtgtcctgtacctgtacctgaatcagattatcctctgttgtgtgaaagcaacagaatactgcgaccctaggcctatctagataaaggttttggattctggcaccttgggttataaaattcacttgagtatagaatctcttttttttgttataagaaaaaaaatctcttttttgttag

SEQ ID NO: 42320 - DNA, 1511 bp, Zea Mays
ggccttcccccctcattcacttctgcctttcctcatctgcccgtcgtcgtatcccccggtccgccggtcacctcgacaaacggcgaagggcggcaaaatgctgcagtgcatctttctcctctccgattccggggaggtgatggtggagaagcagatggcggcgcactgcgtggaccgcgctatctgcgcctggttctgggactacgtcgtcgcccacgccgccggcgatccttccaaagtcttacaggttgtggtgtcaccaacgcattacttgtttcaaatctatcgcaatggtgtaacgttcttggcatgcacccaagtggagatggccccactgatggcagttgagtttctctctcgcgtggctgatgtcttgacagattatcttggagatctgaatgaagatataatcaaggacaactttgtaattgtgtatcagattttggatgagatgatggataatggttttccactcacaactgagccaaacatcttgaaagagatgatcaccccacctaatattgtgaacaaaatgttgaatgttgttactggcaagagttctacccttggcagcaaacttccagatgcagctgcttcttttgtaccttggcgaagaacaacagtcaaggatgcaagcaatgaagtctatgttaacatagtcgaggaacttgatgcatgtgtgaacagagagggggttctcgtgaaatgcgaagcatacggtgaagtccaagtaaactgcagcctcccaggtgtgccagagctgaccatgtcctttgctaaccctgcaattatcaatgatgttaccttccacccctgcgtccgattcaggccttgggaatcaaatcagatcctatcatttgttcctcccgacgggcagttcaagctcatgagttacagggttcagaaactgaagaagacaccgatctatgtgaaaccacaattaacatcagattccgggaactgccgcgttagtgtgatggtcgggattcgaaatgatcctgggaaacctattgattcgataacagtgcagttccagttgccccctcttattgtttctgctgatctgactgcaaactatggcacggttgacatccttgccgacaagacctgtttgtggacaatcgggcagataccaaaagacaaagcaccggcactctctggaaatttacgactggaggaagggctcgcacaactgcatgcattgccgacatttcaggctgcccaccaagtggacctactgcaacaagtgctcctccacccgctcctgcacaacctgcggaggctccggcagaatcgtcaccgcaccacctgtcacctagctagcactcaaggctatctatggaatttgcagctatatgtgtagcactgcatgtacctctcagagagtctgataaaaagggtcactcagattttttttcccttgtaaagaggattaccaagaatttgtataccatgtcatttggcagttgccgctgtgtctccggcttctaaagcaaattggttgtgtttac

SEQ ID NO: 42321 - DNA, 1473 bp, Zea Mays
ggccttcccccctcattcacttctgcctttcctcatctgcccgtcgtcgtatcccccggtccgccggtcacctcgacaaacggcgaagggcggcaaaatgctgcagtgcatctttctcctctccgattccggggaggtgatggtggagaagcagatggcggcgcactgcgtggaccgcgctatctgcgcctggttctgggactacgtcgtcgcccacgccgccggcgatccttccaaagtcttacaggttgtggtgtcaccaacgcattacttgtttcaaatctatcgcaatggtgtaacgttcttggcatgcacccaagtggagatggccccactgatggcagttgagattatcttggagatctgaatgaagatataatcaaggacaactttgtaattgtgtatcagattttggatgagatgatggataatggttttccactcacaactgagccaaacatcttgaaagagatgatcaccccacctaatattgtgaacaaaatgttgaatgttgttactggcaagagttctacccttggcagcaaacttccagatgcagctgcttcttttgtaccttggcgaagaacaacagtcaaggatgcaagcaatgaagtctatgttaacatagtcgaggaacttgatgcatgtgtgaacagagagggggttctcgtgaaatgcgaagcatacggtgaagtccaagtaaactgcagcctcccaggtgtgccagagctgaccatgtcctttgctaaccctgcaattatcaatgatgttaccttccacccctgcgtccgattcaggccttgggaatcaaatcagatcctatcatttgttcctcccgacgggcagttcaagctcatgagttacagaaactgaagaagacaccgatctatgtgaaaccacaattaacatcagattccgggaactgccgcgttagtgtgatggtcgggattcgaaatgatcctgggaaacctattgattcgataacagtgcagttccagttgccccctcttattgtttctgctgatctgactgcaaactatggcacggttgacatccttgccgacaagacctgtttgtggacaatcgggcagataccaaaagacaaagcaccggcactctctggaaatttacgactggaggaagggctcgcacaactgcatgcattgccgacatttcaggctgcccaccaagtggacctactgcaacaagtgctcctccacccgctcctgcacaacctgcggaggctccggcagaatcgtcaccgcaccacctgtcacctagctagcactcaaggctatctatggaatttgcagctatatgtgtagcactgcatgtacctctcagagagtctgataaaaagggtcactcagattttttttcccttgtaaagaggattaccaagaatttgtataccatgtcatttggcagttgccgctgtgtctccggcttctaaagcaaattggttgtgtttac

SEQ ID NO: 42322 - DNA, 1847 bp, Zea Mays
ggccttcccccctcattcacttctgcctttcctcatctgcccgtcgtcgtatcccccggtccgccggtcacctcgacaaacggcgaagggcggcaaaatgctgcagtgcatctttctcctctccgattccggggaggtgatggtggagaagcagatggcggcgcactgcgtggaccgcgctatctgcgcctggttctgggactacgtcgtcgcccacgccgccggcgatccttccaaagtcttacaggttgtggtgtcaccaacgcattacttgtttcaaatctatcgcaatggtgtaacgttcttggcatgcacccaagtggagatggccccactgatggcagttgagtttctctctcgcgtggctgatgtcttgacagattatcttggagatctgaatgaagatataatcaaggacaactttgtaattgtgtatcagattttggatgagatgatggataatggttttccactcacaactgagccaaacatcttgaaagagatgatcaccccacctaatattgtgaacaaaatgttgaatgttgttactggcaagagttctacccttggcagcaaacttccagatgcagctgcttcttttgtaccttggcgaagaacaacagtcaaggatgcaagcaatgaagtctatgttaacatagtcgaggaacttgatgcatgtgtgaacagagagggggttctcgtgaaatgcgaagcatacggtgaagtccaagtaaactgcagcctcccaggtgtgccagagctgaccatgtcctttgctaaccctgcaattatcaatgatgttaccttccacccctgcgtccgattcaggccttgggaatcaaatcagatcctatcatttgttcctcccgacgggcagttcaagctcatgagttacagggttcagaaactgaagaagacaccgatctatgtgaaaccacaattaacatcagattccgggaactgccgcgttagtgtgatggtcgggattcgaaatgatcctgggaaacctattgattcgataacagtgcagttccagttgccccctcttattgtttctgctgatctgactgcaaactatggcacggttgacatccttgccgacaagacctgtttgtggacaatcgggcagataccaaaagacaaagcaccggcactctctggaaatttacgactggaggaagggctcgcacaactgcatgcattgccgacatttcagcaccagcagcagaagtcgaggtcgagggcatctgccgcctccagccgccctgcctgacccccaagccgccgcggcgctgctcctcgccgccgccggtacagtcggcgccgccagcctcctgcttcgctcctcctcgtccggcgccgcctcgcagcagcagcggcggcaggagggacgagaagagcaggtagagggagaggagtgcccggactgcggcgggactgggctctgcggccgctgcaaaggagagggcttcgtcttcaagcagctctcggaggagacggccaccagggcacgcaaggccgccaagaacatggccactagatacacttcggggctgcccaccaagtggacctactgcaacaagtgctcctccacccgctcctgcacaacctgcggaggctccggcagaatcgtcaccgcaccacctgtcacctagctagcactcaaggctatctatggaatttgcagctatatgtgtagcactgcatgtacctctcagagagtctgataaaaagggtcactcagattttttttcccttgtaaagaggattaccaagaatttgtataccatgtcatttggcagttgccgctgtgtctccggcttctaaagcaaattggttgtgtttac

SEQ ID NO: 42323 - DNA, 845 bp, Zea Mays
caggatgagagtgatgacggagtgcaattcaacgcttgaacatccgaacaaaaatccttctatatgcaaccaaacaataaatgttgtattggttccatttctatttcaggctaaattggtactactcatgttcaatttaattctcctatgctcaatatctacatccaaatagcctccgtgcccgcctacagacacctcgaggaccgccccctctcccccagtcccactccaaccgcaccactgtgggcgtcgcccccgagctcggaccacgacctttccaccctccgtgcccgctgtcgctcctcgttgccggccgccatcgatcttagcggcggtgtcgacgcttgcatggacgatgccctcaatgtgttcggtgaaatgggcacacgtgttgggatggtgactatcatccacgggggctggacatcgaggttatatcgaggctgatacacagaccgtctcttcacgcatcgcttctcatagcgtctcagttcctcgatccagaaatggtgtgctcatcatgttgtccgtggcctctattttctcaggcgcaaatgcacctctcctcggctatgttccaactttgtttagctggggagagaaagataagcccgattacatatccattttagtgttctaatgacgtcaccaatagttcccatttaagagtaatcaataagctcacaacataaataaattacagcagagtacattgcttattggagcatgggtgaaacctgtttattaagttttatgctgctcataagtttccgtttaggcaaggaaaaactaatatgtatccttacaagctggattcattttttaagttatttatattttagaat

SEQ ID NO: 42324 - DNA, 3223 bp, Zea Mays
cccagatctagcataataggatatttcaggtctttttagtccttgtttgaattttcttagagctaaagctctaaacaaacgtttcaaattaggttgcagtttgtgacaacggaggagaagaaggaaaaaaaatgacagctgaaactgggttcagttcaggacttccggtccagggtaggccagccacatgcggcagtgcagtgcaggcaggcaactgaaacggggcggagacttcgccgaggccgagcggcgagagctcggtttcttgtcgagagagaacccagagagagggtccagagggagcgggctctgagagaaccggagatggggaacatctgcggtggctccgggaaggatcgggtggccgaggatttcaggccgtctagcccagggacaacaatgacctccaagacgagcggcagcataaccaccagcctgagcaccacggggaagctctcctccgtgggcagcagcttcatggcgtccgccagcagccgcagcaccagcggcgggttcgacgagggggccaagtactccgacggccagatcctcgaggcgcccaacctccgcaccttcacattcgtagagctcaagacggccaccaagaacttccggccggacagcgtccttggcgaaggagggttcgggagagtctacaaagggtgggtggatgagaagaccatggcgccgaccaggaacagcaccggcatggttgttgcggtcaagaagctcaactcggagagcatgcaggggtttgaggaatggcagtcggagataaattttctaggaaggctctcccatccgaacctagtgaagctcttgggctactgttgggaggacaaggaacttcttctcgtgtacgaattcatggccaaagggagcttggaaaaccacctattcaggagaggatgtgcccccctgtcctgggagctgaggctgaagatagccattggtgcagctcgaggactcgcgttcttgcatgcatcggaaaaacaagtaatctaccgtgatttcaaggcgtctaacatccttttagacgcgaactataacgcaaagctctctgatttcggccttgctaagctggggccaactggtagcaactcgcacatcacaaccagggtgatggggacatatgggtatgcagctccagagtacgtagccaccggtacgtgtcctcatttctcccacgtaacaagctggtatgatcatacccttcttccttataatgaactgtcaacgcttcctccacgcgctagtcgtttcgaagcagaaacatacaccgcgacgcagactcggttgtctgtccgccacaatcagtataacgcggttgttctcgccctgcagacctttccacacttgattgtgtgaaacagcaggcatatgcatcgttcacgtcactttgagttatattgacacctttggtagtctccatccagctgctcacgttttcagtgtgcacagagcggacactgaaaacgtgagcagctggaaaatgcagacactggacaatgggcattgggtgtaggaacagaatccggattgcagaactgatgtgtttcatactcttaactgctagtagtagaaggggagggagcagagtcgatttgctgtcactgaattcctagagtagtggggcactagtaaaaacgacctgcaccagcagttgctgcggccaagtggataaatatcgcacaagaatcatgaacggccattccagtgccttgtcactttccaagagaaaatgggcaacctgtttttttttatatatatactcctatatagttgaagcacatctggaattctgaattcctagaaatagctgctgatgtttgctgactgaccgcgaaagaaaccgccatgtccatccatattggcgaacagggcatctgtacgtgaagagcgacgtgtacggtttcggcgtggtgatgctggagatgctgtcggggcagcgagcgctggacccgaaccggccgagcgggcagctgagcctggccgactgggcgaagccgtacctggcggaccgccggaggctggcgcggctcatggacccgcggttcgagggccagtacaactccaggcaggcgttccaggcggcgcagctgacgctcggctgcctggccggcgacccccgcagccggccctcgatgaaggaggtggtggagacgctggagcgggtggaggcggtgaagagccgggcgcgcggcggcgggtccgggtccgggtctggccgcgccggtgccgcggcgcaccaccggtcgccgcgcgtcggtggcggtgcccgtgccgcgtccaggcccgccgccaacggccacaacgccaggcccgcgcgatgacgctccggcagggtggtgacgattcttcatgtaaatggcgtctttttttttttggcctggttcgcgtgctgttcttgcatggcggccgctgttgttgtaagttgtagccaatagtgtaatagttaaaaaaaagtgctagaagaaaggaataaccattcaatcaaaaacgtgtttttcttttcgcaaaaggaacaaaggaagaggacggtttttgtgtatgtgttgttgtttttctgttaaccattggtggggggaaaaggacgacgagtttatactgaagaagatcttgtgctgaacgtgttgactttatcgttgctggatctatcaaaaatctgaagcggatcatcgtgacatgccctaacaagtgcatcgagtcaaagtggcgatgcttgcacctgcgccaaatgtctgcacaagtatctaacctcgcccggcagcaacacgcatgttgactgcgacgctgggactcttgcttccagcgtcttgcttttgtaatgcctttttcagaacacataatttctattcaaacttgaatagtaagggatttaatctcctctattccgtctctaaccaaacagatccttatttaatcgatatagaatttatccacacatctgcaaagtttctcacttaaggctattttgacaaccccgttttttcaagcaattttcatttttctcaagaaaaaaataattcattttccatgtaacctgggccgagtcacctacctaaacgcaaaaatacagtgcttgcggactaacagccgacgtctacctttgatacagctgccatttcgatcacctgccacagtttaatctaacattacactgcgttacatgatataaacagcttacatttgctgacccaaatatccaacaccacaaaaaaaa

SEQ ID NO: 42325 - DNA, 3426 bp, Zea Mays
ggcaggcaactgaaacggggcggagacttcgccgaggccgagcggcgagagctcggtttcttgtcggtcagctgcactctcttcgtcagtcactctccctgcatatacttatatatccccctccttgacttcgccatccccctctgctacgctttgttctgggctcttcctggctgcctcctcttcctcctcccctgtacagagagagaacccagagagagggtccagagggagcgggctctgagagaaccggagatggggaacatctgcggtggctccgggaaggatcgggtggccgaggatttcaggccgtctagcccagggacaacaatgacctccaagacgagcggcagcataaccaccagcctgagcaccacggggaagctctcctccgtgggcagcagcttcatggcgtccgccagcagccgcagcaccagcggcgggttcgacgagggggccaagtactccgacggccagatcctcgaggcgcccaacctccgcaccttcacattcgtagagctcaagacggccaccaagaacttccggccggacagcgtccttggcgaaggagggttcgggagagtctacaaagggtgggtggatgagaagaccatggcgccgaccaggaacagcaccggcatggttgttgcggtcaagaagctcaactcggagagcatgcaggggtttgaggaatggcagtcggagataaattttctaggaaggctctcccatccgaacctagtgaagctcttgggctactgttgggaggacaaggaacttcttctcgtgtacgaattcatggccaaagggagcttggaaaaccacctattcaggagtgagttcttacggataaagctccgtgcacgtttcacttaacaagttttggaaatcaccttgcttatgcgctccacatattttttgcctatgcaatacattttgtagtagtagggatgtaggatccatgtggtcgcatagttttccagaggttcaaatctgaaactgcatacacgtaaatacatttcattacacttgaatctcatggggcatatacttgactgaaaaaaaaacactgatattgtggagccaatcaattgcatttcccttcaggaggatgtgcccccctgtcctgggagctgaggctgaagatagccattggtgcagctcgaggactcgcgttcttgcatgcatcggaaaaacaagtaatctaccgtgatttcaaggcgtctaacatccttttagacgcgaactataacgcaaagctctctgatttcggccttgctaagctggggccaactggtagcaactcgcacatcacaaccagggtgatggggacatatgggtatgcagctccagagtacgtagccaccggtacgtgtcctcatttctcccacgtaacaagctggtatgatcatacccttcttccttataatgaactgtcaacgcttcctccacgcgctagtcgtttcgaagcagaaacatacaccgcgacgcagactcggttgtctgtccgccacaatcagtataacgcggttgttctcgccctgcagacctttccacacttgattgtgtgaaacagcaggcatatgcatcgttcacgtcactttgagttatattgacacctttggtagtctccatccagctgctcacgttttcagtgtgcacagagcggacactgaaaacgtgagcagctggaaaatgcagacactggacaatgggcattgggtgtaggaacagaatccggattgcagaactgatgtgtttcatactcttaactgctagtagtagaaggggagggagcagagtcgatttgctgtcactgaattcctagagtagtggggcactagtaaaaacgacctgcaccagcagttgctgcggccaagtggataaatatcgcacaagaatcatgaacggccattccagtgccttgtcactttccaagagaaaatgggcaacctgtttttttttatatatatactcctatatagttgaagcacatctggaattctgaattcctagaaatagctgctgatgtttgctgactgaccgcgaaagaaaccgccatgtccatccatattggcgaacagggcatctgtacgtgaagagcgacgtgtacggtttcggcgtggtgatgctggagatgctgtcggggcagcgagcgctggacccgaaccggccgagcgggcagctgagcctggccgactgggcgaagccgtacctggcggaccgccggaggctggcgcggctcatggacccgcggttcgagggccagtacaactccaggcaggcgttccaggcggcgcagctgacgctcggctgcctggccggcgacccccgcagccggccctcgatgaaggaggtggtggagacgctggagcgggtggaggcggtgaagagccgggcgcgcggcggcgggtccgggtccgggtctggccgcgccggtgccgcggcgcaccaccggtcgccgcgcgtcggtggcggtgcccgtgccgcgtccaggcccgccgccaacggccacaacgccaggcccgcgcgatgacgctccggcagggtggtgacgattcttcatgtaaatggcgtctttttttttttggcctggttcgcgtgctgttcttgcatggcggccgctgttgttgtaagttgtagccaatagtgtaatagttaaaaaaaagtgctagaagaaaggaataaccattcaatcaaaaacgtgtttttcttttcgcaaaaggaacaaaggaagaggacggtttttgtgtatgtgttgttgtttttctgttaaccattggtggggggaaaaggacgacgagtttatactgaagaagatcttgtgctgaacgtgttgactttatcgttgctggatctatcaaaaatctgaagcggatcatcgtgacatgccctaacaagtgcatcgagtcaaagtggcgatgcttgcacctgcgccaaatgtctgcacaagtatctaacctcgcccggcagcaacacgcatgttgactgcgacgctgggactcttgcttccagcgtcttgcttttgtaatgcctttttcagaacacataatttctattcaaacttgaatagtaagggatttaatctcctctattccgtctctaaccaaacagatccttatttaatcgatatagaatttatccacacatctgcaaagtttctcacttaaggctattttgacaaccccgttttttcaagcaattttcatttttctcaagaaaaaaataattcattttccatgtaacctgggccgagtcacctacctaaacgcaaaaatacagtgcttgcggactaacagccgacgtctacctttgatacagctgccatttcgatcacctgccacagtttaatctaacattacactgcgttacatgatataaacagcttacatttgctgacccaaatatccaacaccacaaaaaaaa

SEQ ID NO: 42326 - DNA, 2867 bp, Zea Mays
attcatggatcctgaggctggggcggcctgtcctgggacaacaatgacctccaagacgagcggcagcataaccaccagcctgagcaccacggggaagctctcctccgtgggcagcagcttcatggcgtccgccagcagccgcagcaccagcggcgggttcgacgagggggccaagtactccgacggccagatcctcgaggcgcccaacctccgcaccttcacattcgtagagctcaagacggccaccaagaacttccggccggacagcgtccttggcgaaggagggttcgggagagtctacaaagggtgggtggatgagaagaccatggcgccgaccaggaacagcaccggcatggttgttgcggtcaagaagctcaactcggagagcatgcaggggtttgaggaatggcagtcggagataaattttctaggaaggctctcccatccgaacctagtgaagctcttgggctactgttgggaggacaaggaacttcttctcgtgtacgaattcatggccaaagggagcttggaaaaccacctattcaggagaggatgtgcccccctgtcctgggagctgaggctgaagatagccattggtgcagctcgaggactcgcgttcttgcatgcatcggaaaaacaagtaatctaccgtgatttcaaggcgtctaacatccttttagacgcgaactataacgcaaagctctctgatttcggccttgctaagctggggccaactggtagcaactcgcacatcacaaccagggtgatggggacatatgggtatgcagctccagagtacgtagccaccggtacgtgtcctcatttctcccacgtaacaagctggtatgatcatacccttcttccttataatgaactgtcaacgcttcctccacgcgctagtcgtttcgaagcagaaacatacaccgcgacgcagactcggttgtctgtccgccacaatcagtataacgcggttgttctcgccctgcagacctttccacacttgattgtgtgaaacagcaggcatatgcatcgttcacgtcactttgagttatattgacacctttggtagtctccatccagctgctcacgttttcagtgtgcacagagcggacactgaaaacgtgagcagctggaaaatgcagacactggacaatgggcattgggtgtaggaacagaatccggattgcagaactgatgtgtttcatactcttaactgctagtagtagaaggggagggagcagagtcgatttgctgtcactgaattcctagagtagtggggcactagtaaaaacgacctgcaccagcagttgctgcggccaagtggataaatatcgcacaagaatcatgaacggccattccagtgccttgtcactttccaagagaaaatgggcaacctgtttttttttatatatatactcctatatagttgaagcacatctggaattctgaattcctagaaatagctgctgatgtttgctgactgaccgcgaaagaaaccgccatgtccatccatattggcgaacagggcatctgtacgtgaagagcgacgtgtacggtttcggcgtggtgatgctggagatgctgtcggggcagcgagcgctggacccgaaccggccgagcgggcagctgagcctggccgactgggcgaagccgtacctggcggaccgccggaggctggcgcggctcatggacccgcggttcgagggccagtacaactccaggcaggcgttccaggcggcgcagctgacgctcggctgcctggccggcgacccccgcagccggccctcgatgaaggaggtggtggagacgctggagcgggtggaggcggtgaagagccgggcgcgcggcggcgggtccgggtccgggtctggccgcgccggtgccgcggcgcaccaccggtcgccgcgcgtcggtggcggtgcccgtgccgcgtccaggcccgccgccaacggccacaacgccaggcccgcgcgatgacgctccggcagggtggtgacgattcttcatgtaaatggcgtctttttttttttggcctggttcgcgtgctgttcttgcatggcggccgctgttgttgtaagttgtagccaatagtgtaatagttaaaaaaaagtgctagaagaaaggaataaccattcaatcaaaaacgtgtttttcttttcgcaaaaggaacaaaggaagaggacggtttttgtgtatgtgttgttgtttttctgttaaccattggtggggggaaaaggacgacgagtttatactgaagaagatcttgtgctgaacgtgttgactttatcgttgctggatctatcaaaaatctgaagcggatcatcgtgacatgccctaacaagtgcatcgagtcaaagtggcgatgcttgcacctgcgccaaatgtctgcacaagtatctaacctcgcccggcagcaacacgcatgttgactgcgacgctgggactcttgcttccagcgtcttgcttttgtaatgcctttttcagaacacataatttctattcaaacttgaatagtaagggatttaatctcctctattccgtctctaaccaaacagatccttatttaatcgatatagaatttatccacacatctgcaaagtttctcacttaaggctattttgacaaccccgttttttcaagcaattttcatttttctcaagaaaaaaataattcattttccatgtaacctgggccgagtcacctacctaaacgcaaaaatacagtgcttgcggactaacagccgacgtctacctttgatacagctgccatttcgatcacctgccacagtttaatctaacattacactgcgttacatgatataaacagcttacatttgctgacccaaatatccaacaccacaaaaaaaa

SEQ ID NO: 42327 - DNA, 2618 bp, Zea Mays
ctttcctgccttctgctaaattttgtttcttgcaagtttcattctgaagttccactagctaaagatgcatgccttgtttagatcctagattaagatttcttgtcccttgaatgtatcatggcttgtttagaggccggggcagcacttctccggtctcaatttttgttcttcacttctatttatttcatcagagattcgcggtttttatccactagcaagggtgggaaaagggacaacaatgacctccaagacgagcggcagcataaccaccagcctgagcaccacggggaagctctcctccgtgggcagcagcttcatggcgtccgccagcagccgcagcaccagcggcgggttcgacgagggggccaagtactccgacggccagatcctcgaggcgcccaacctccgcaccttcacattcgtagagctcaagacggccaccaagaacttccggccggacagcgtccttggcgaaggagggttcgggagagtctacaaagggtgggtggatgagaagaccatggcgccgaccaggaacagcaccggcatggttgttgcggtcaagaagctcaactcggagagcatgcaggggtttgaggaatggcagtcggagataaattttctaggaaggctctcccatccgaacctagtgaagctcttgggctactgttgggaggacaaggaacttcttctcgtgtacgaattcatggccaaagggagcttggaaaaccacctattcaggagtgagttcttacggataaagctccgtgcacgtttcacttaacaagttttggaaatcaccttgcttatgcgctccacatattttttgcctatgcaatacattttgtagtagtagggatgtaggatccatgtggtcgcatagttttccagaggttcaaatctgaaactgcatacacgtaaatacatttcattacacttgaatctcatggggcatatacttgactgaaaaaaaaacactgatattgtggagccaatcaattgcatttcccttcaggaggatgtgcccccctgtcctgggagctgaggctgaagatagccattggtgcagctcgaggactcgcgttcttgcatgcatcggaaaaacaagtaatctaccgtgatttcaaggcgtctaacatccttttagacgcgaactataacgcaaagctctctgatttcggccttgctaagctggggccaactggtagcaactcgcacatcacaaccagggtgatggggacatatgggtatgcagctccagagtacgtagccaccgggcatctgtacgtgaagagcgacgtgtacggtttcggcgtggtgatgctggagatgctgtcggggcagcgagcgctggacccgaaccggccgagcgggcagctgagcctggccgactgggcgaagccgtacctggcggaccgccggaggctggcgcggctcatggacccgcggttcgagggccagtacaactccaggcaggcgttccaggcggcgcagctgacgctcggctgcctggccggcgacccccgcagccggccctcgatgaaggaggtggtggagacgctggagcgggtggaggcggtgaagagccgggcgcgcggcggcgggtccgggtccgggtctggccgcgccggtgccgcggcgcaccaccggtcgccgcgcgtcggtggcggtgcccgtgccgcgtccaggcccgccgccaacggccacaacgccaggcccgcgcgatgacgctccggcagggtggtgacgattcttcatgtaaatggcgtctttttttttttggcctggttcgcgtgctgttcttgcatggcggccgctgttgttgtaagttgtagccaatagtgtaatagttaaaaaaaagtgctagaagaaaggaataaccattcaatcaaaaacgtgtttttcttttcgcaaaaggaacaaaggaagaggacggtttttgtgtatgtgttgttgtttttctgttaaccattggtggggggaaaaggacgacgagtttatactgaagaagatcttgtgctgaacgtgttgactttatcgttgctggatctatcaaaaatctgaagcggatcatcgtgacatgccctaacaagtgcatcgagtcaaagtggcgatgcttgcacctgcgccaaatgtctgcacaagtatctaacctcgcccggcagcaacacgcatgttgactgcgacgctgggactcttgcttccagcgtcttgcttttgtaatgcctttttcagaacacataatttctattcaaacttgaatagtaagggatttaatctcctctattccgtctctaaccaaacagatccttatttaatcgatatagaatttatccacacatctgcaaagtttctcacttaaggctattttgacaaccccgttttttcaagcaattttcatttttctcaagaaaaaaataattcattttccatgtaacctgggccgagtcacctacctaaacgcaaaaatacagtgcttgcggactaacagccgacgtctacctttgatacagctgccatttcgatcacctgccacagtttaatctaacattacactgcgttacatgatataaacagcttacatttgctgacccaaatatccaacaccacaaaaaaaa

SEQ ID NO: 42328 - DNA, 2341 bp, Zea Mays
ctgccttctgctaaattttgtttcttgcaagtttcattctgaagttccactagctaaagatgcatgccttgtttagatcctagattaagatttcttgtcccttgaatgtatcatggcttgtttagaggccggggcagcacttctccggtctcaatttttgttcttcacttctatttatttcatcagagattcgcggtttttatccactagcaagggtgggaaaagggacaacaatgacctccaagacgagcggcagcataaccaccagcctgagcaccacggggaagctctcctccgtgggcagcagcttcatggcgtccgccagcagccgcagcaccagcggcgggttcgacgagggggccaagtactccgacggccagatcctcgaggcgcccaacctccgcaccttcacattcgtagagctcaagacggccaccaagaacttccggccggacagcgtccttggcgaaggagggttcgggagagtctacaaagggtgggtggatgagaagaccatggcgccgaccaggaacagcaccggcatggttgttgcggtcaagaagctcaactcggagagcatgcaggggtttgaggaatggcagtcggagataaattttctaggaaggctctcccatccgaacctagtgaagctcttgggctactgttgggaggacaaggaacttcttctcgtgtacgaattcatggccaaagggagcttggaaaaccacctattcaggagaggatgtgcccccctgtcctgggagctgaggctgaagatagccattggtgcagctcgaggactcgcgttcttgcatgcatcggaaaaacaagtaatctaccgtgatttcaaggcgtctaacatccttttagacgcgaactataacgcaaagctctctgatttcggccttgctaagctggggccaactggtagcaactcgcacatcacaaccagggtgatggggacatatgggtatgcagctccagagtacgtagccaccgggcatctgtacgtgaagagcgacgtgtacggtttcggcgtggtgatgctggagatgctgtcggggcagcgagcgctggacccgaaccggccgagcgggcagctgagcctggccgactgggcgaagccgtacctggcggaccgccggaggctggcgcggctcatggacccgcggttcgagggccagtacaactccaggcaggcgttccaggcggcgcagctgacgctcggctgcctggccggcgacccccgcagccggccctcgatgaaggaggtggtggagacgctggagcgggtggaggcggtgaagagccgggcgcgcggcggcgggtccgggtccgggtctggccgcgccggtgccgcggcgcaccaccggtcgccgcgcgtcggtggcggtgcccgtgccgcgtccaggcccgccgccaacggccacaacgccaggcccgcgcgatgacgctccggcagggtggtgacgattcttcatgtaaatggcgtctttttttttttggcctggttcgcgtgctgttcttgcatggcggccgctgttgttgtaagttgtagccaatagtgtaatagttaaaaaaaagtgctagaagaaaggaataaccattcaatcaaaaacgtgtttttcttttcgcaaaaggaacaaaggaagaggacggtttttgtgtatgtgttgttgtttttctgttaaccattggtggggggaaaaggacgacgagtttatactgaagaagatcttgtgctgaacgtgttgactttatcgttgctggatctatcaaaaatctgaagcggatcatcgtgacatgccctaacaagtgcatcgagtcaaagtggcgatgcttgcacctgcgccaaatgtctgcacaagtatctaacctcgcccggcagcaacacgcatgttgactgcgacgctgggactcttgcttccagcgtcttgcttttgtaatgcctttttcagaacacataatttctattcaaacttgaatagtaagggatttaatctcctctattccgtctctaaccaaacagatccttatttaatcgatatagaatttatccacacatctgcaaagtttctcacttaaggctattttgacaaccccgttttttcaagcaattttcatttttctcaagaaaaaaataattcattttccatgtaacctgggccgagtcacctacctaaacgcaaaaatacagtgcttgcggactaacagccgacgtctacctttgatacagctgccatttcgatcacctgccacagtttaatctaacattacactgcgttacatgatataaacagcttacatttgctgacccaaatatccaacaccacaaaaaaaa

SEQ ID NO: 42329 - DNA, 2862 bp, Zea Mays
gtttttatccactagcaagggtgggaaaagggacaacaatgacctccaagacgagcggcagcataaccaccagcctgagcaccacggggaagctctcctccgtgggcagcagcttcatggcgtccgccagcagccgcagcaccagcggcgggttcgacgagggggccaagtactccgacggccagatcctcgaggcgcccaacctccgcaccttcacattcgtagagctcaagacggccaccaagaacttccggccggacagcgtccttggcgaaggagggttcgggagagtctacaaagggtgggtggatgagaagaccatggcgccgaccaggaacagcaccggcatggttgttgcggtcaagaagctcaactcggagagcatgcaggggtttgaggaatggcagtcggagataaattttctaggaaggctctcccatccgaacctagtgaagctcttgggctactgttgggaggacaaggaacttcttctcgtgtacgaattcatggccaaagggagcttggaaaaccacctattcaggagaggatgtgcccccctgtcctgggagctgaggctgaagatagccattggtgcagctcgaggactcgcgttcttgcatgcatcggaaaaacaagtaatctaccgtgatttcaaggcgtctaacatccttttagacgcgaactataacgcaaagctctctgatttcggccttgctaagctggggccaactggtagcaactcgcacatcacaaccagggtgatggggacatatgggtatgcagctccagagtacgtagccaccggtacgtgtcctcatttctcccacgtaacaagctggtatgatcatacccttcttccttataatgaactgtcaacgcttcctccacgcgctagtcgtttcgaagcagaaacatacaccgcgacgcagactcggttgtctgtccgccacaatcagtataacgcggttgttctcgccctgcagacctttccacacttgattgtgtgaaacagcaggcatatgcatcgttcacgtcactttgagttatattgacacctttggtagtctccatccagctgctcacgttttcagtgtgcacagagcggacactgaaaacgtgagcagctggaaaatgcagacactggacaatgggcattgggtgtaggaacagaatccggattgcagaactgatgtgtttcatactcttaactgctagtagtagaaggggagggagcagagtcgatttgctgtcactgaattcctagagtagtggggcactagtaaaaacgacctgcaccagcagttgctgcggccaagtggataaatatcgcacaagaatcatgaacggccattccagtgccttgtcactttccaagagaaaatgggcaacctgtttttttttatatatatactcctatatagttgaagcacatctggaattctgaattcctagaaatagctgctgatgtttgctgactgaccgcgaaagaaaccgccatgtccatccatattggcgaacagggcatctgtacgtgaagagcgacgtgtacggtttcggcgtggtgatgctggagatgctgtcggggcagcgagcgctggacccgaaccggccgagcgggcagctgagcctggccgactgggcgaagccgtacctggcggaccgccggaggctggcgcggctcatggacccgcggttcgagggccagtacaactccaggcaggcgttccaggcggcgcagctgacgctcggctgcctggccggcgacccccgcagccggccctcgatgaaggaggtggtggagacgctggagcgggtggaggcggtgaagagccgggcgcgcggcggcgggtccgggtccgggtctggccgcgccggtgccgcggcgcaccaccggtcgccgcgcgtcggtggcggtgcccgtgccgcgtccaggcccgccgccaacggccacaacgccaggcccgcgcgatgacgctccggcagggtggtgacgattcttcatgtaaatggcgtctttttttttttggcctggttcgcgtgctgttcttgcatggcggccgctgttgttgtaagttgtagccaatagtgtaatagttaaaaaaaagtgctagaagaaaggaataaccattcaatcaaaaacgtgtttttcttttcgcaaaaggaacaaaggaagaggacggtttttgtgtatgtgttgttgtttttctgttaaccattggtggggggaaaaggacgacgagtttatactgaagaagatcttgtgctgaacgtgttgactttatcgttgctggatctatcaaaaatctgaagcggatcatcgtgacatgccctaacaagtgcatcgagtcaaagtggcgatgcttgcacctgcgccaaatgtctgcacaagtatctaacctcgcccggcagcaacacgcatgttgactgcgacgctgggactcttgcttccagcgtcttgcttttgtaatgcctttttcagaacacataatttctattcaaacttgaatagtaagggatttaatctcctctattccgtctctaaccaaacagatccttatttaatcgatatagaatttatccacacatctgcaaagtttctcacttaaggctattttgacaaccccgttttttcaagcaattttcatttttctcaagaaaaaaataattcattttccatgtaacctgggccgagtcacctacctaaacgcaaaaatacagtgcttgcggactaacagccgacgtctacctttgatacagctgccatttcgatcacctgccacagtttaatctaacattacactgcgttacatgatataaacagcttacatttgctgacccaaatatccaacaccacaaaaaaaa

SEQ ID NO: 42330 - DNA, 1704 bp, Zea Mays
aatccgcgtcaaccaatgattatataacagcccccgccccacagtcagcccagccccccgccacctgagtacctgacacacagcgaaacgccgaaaccgcgtcaagttccccatctccgatcccccaatcgccctaaccctagactcgccaccgccgccgcgatgctccgctcgccgggcaattcgccccgccgcctctcaccgtcgcccacacccgcgccctccacccctcgcccggcctccccgcccccctccaccgccccctcctcgaagcgccgccggtcggaggtgctcgacgaggacacctacgtcgccgccatcgagcgcatcatcgagcgcgactacttccccgacctgccccgcctccgggaccgcctcgactggctgcaggccgtgcggtcccacgacccgctcatcctccgcgacgcgcagctcaaaatcctagaccgccgccgccgcgcccagcgccacgcggcggggcccgtccccacgccgacgccggccacctccaccgcgctccgctccccgtcctttctcaccacccccgccggatccgtcgccggcggcgtgggaggtcccgacgccgaccacgacgacgacgtcgcggccgcgctctccctggacggcttcttccaccgcttcaccagcgaggacaacgactccttctcgcgcatcctagacaaggtgaaccagcgccgccgcgaacgctacgcgcacctgctggagccgccgccgcctgtcgaggcggggactaaaccgtcagaggacgccaagcgcaacaggatcacggacggggggaagcgcccctcacggaggaggagcgcgcagagcggctcagggggatgaccaaggagataaacaagtcgaacaccaggctacatggcagagccacggctgatgacgcgaggcccaaggaggaggagggggccgccatactgtacgcgctggttgcaggctctactccgggagggatggcctaccacgaccctgacaagttgaagaagtacgatctggaggacctgaggaagaccccgaaccctttctacctcgagtcggacaagaaggccggcaacgggtacagttttgtgaggacgccgtcgccggcacccggcgtggacgagtcgccgttcatgacctggggtgagatcgatggaacaccgctgaggctggactccgatgagacgccgggcggtagcgagagagcgcatttcaagatgccgccgcctcctgctcgcgatgtcaaggcgcacctgctttcgagggacgccgctcggaaaataaaggagcggtctaataccttccataggccgcccctcccctcccctgcgaggggtgtcagcgcaagccctagaaccctctcgcgggccgcgcaaaaattcgtgaggaacgccatctccaagtcggcaaagtcctccagcgccattgacgaatctctccgtgcaagctacagaggctcgaccccgtctgcgagcactcccaagtcaaggttttcacgagaccctggccttgcatcgcgttctccatccacaaggtagggttccacccctccctggtgagtgttagtaaaccacttaatgttatttcataaaatgggtaggtggcccatcctgtactgtaacaaattgtataatgatggaagacatgaaatgatgaagtgatgcttatttactcttatattatctgagccacccttaccaaaatcaa

SEQ ID NO: 42331 - DNA, 1742 bp, Zea Mays
atggaggacacactcactatcagtaggcttagtgtccttatccttgtccgcttagcggcgaaacgccgaaaccgcgtcaagttccccttcttcgatcccccaatcgccgtaaccctagactcgccaccgccgccgcgatgctccgctcgccgggcaattcgccccgcctcctctcaccgtcgcccacacccgcgccctccacccctcgcccgggcctccccgcccccctccaacgccccctcctcgaagcgtcgccggtcggaggtgctcgacgaggacacctacgtcgccgccatcgagcgcatcatcgagcgcgactacttccccgacctgccccgcctccgggaccgcctcgactggctgcaggccgtgcggtcccacgacccgctcatcctacgcgacgcgcagctcaagatcctagaccgccgccgccgcgcccagcgccacgcggcggggcccgtccccacgccgacgccggccacctccaccgcgctccgctccccgtcctttctcaccacccccgccggatccgtcgccggcggcgtgagaggtcccgacgccgaccacgacgacgacgtcgcggccgcgctctccctggacggcttcttccaccgcttcaccagcgaggacaacgactccttctcgcgcatcctagacaaggtgaaccagcgccgccgcgaacgctacgcgcacctgctggagccgccgccgcctgtcgaggcggggactaaaccgtcagaggacgccaagcgcaacaggatcacggacgggtacggtacatcggggcagccaccgagcacgctcgagggcgccaagttcacggcaaagaacttgctgatgtactatccggctgaccagggggaagcgcccctcacggaggaggagcgcgcagagcggctcaggggaatgaccaaggagatagacaagtcgaacaccaggctacatggcagagccacggctgatgacgctaggcccaaggaggaggagggggccgccatactgtacgcgctagttgcaggctctactccgggagggatggcctaccacgaccctgacaagttgaagaagtacgatctggaggacctgaggaagaccccgaaccctttctacctcgagtcggacaagaaggctggcaacgggtacagttttgtgaggacaccgtcgccggcacccggcgtggacgagtcgccgttcatgacgtggggtgagatcgacggaacgccgctgaggctggaccccgacgagacgccgggcggcagcgagagagcgcatttcaagatgccaccacctcctgctcgcgacgtcaaggcgcacttgctttcgagggatgccgcccggaaaataaaggagcggtctaagcccttccataggccgcccctaccctcccctgcgaggggtgtcagcgcgagccctagaaccctttcgccagccgcgcaaaaattcgtgaggaacgccatctccaagtcgtcaaagtcctccagcgccattgacgaatctctccgtgcaagctacagaggctcgaccccgtctgcgagcactcccaagtcaaggttttcaagagaccctggcctcgcatcgcgttctccatccacaaggcagggttccacccctccctggtgagtgttggcataggcatctgggcagaaacaatgggtttggcaagaacttccatgtcactgtactgtactctaaggcagatcgtgcatctggtcttgcaaaaaaatctcataaaagagtttgaa

SEQ ID NO: 42332 - DNA, 1041 bp, Zea Mays
caaaaaaaaaaaaaaaaactcctattccgaggcccagctcagtccacgccgagcatagcccaatctgtaagtttggaccagagcccatggcgatacggcccagcacataggcatagccctcccgccgtcatccttggcttccccgctcccgtcgcgactccaatcgcaattcgcaattcccagccccattccccgtcggccgactccagcgagcgacttcgccccggtcggaagcaccaccagccaccagcgatgtctggcgaggaggaggagaacgccgcggagctcaagatcggcgaaggccaagtgcctgatgaactgcgaggtggcgatcatcctggagcacaagtacgagcagatccagcagcacgcgtcgtcggagtcggacccgtcgtcgcaggtgtcgcaggtgttcgagaagtcgctgcagtacgtgaagcgcttcagccgctacaagaaccccgacgccgtgcgccaggtccgcgagacgctgagccgctacggcctcgccgagttcgagctctgcacgctcggcaacctctgccccgacaccagcggcgaggccaccgcgctcgtcccctccctcaagtccggcggcaggttcgtcggcgaccccggggacgagaagatcgagaagatgctcaacgacctctccctcatcaagaagttcgagtagagcgggagccctctcttctcttatcttcttttctcttggagtagcgagcatccagagaggaggggaattcaacatcaagacgatgtactgataaaattttacttgccttacactactatcgttgaggttcacgtctgcgtattgattagaaccttgtttgatcgataatccaatatactagtagtatgtgtgtggttgatgatctgtctggaattctacacgagaagcctgcagaggatgaggatccgagttggccatgccctctgttcttcagctcgaaatgtactgatttccttgctattgttaaggttcatattatcttcatccgctttccatctagtcatgtatacatgaattaatggaac

SEQ ID NO: 42333 - DNA, 1883 bp, Zea Mays
tttccctccctgcaattcacattgatatgagcattactttgctcttcaagtgtttatatcttgctaaatggtaaccaattcaattctgactttcaccaagaattttgattacctcttttgcgttgaccttgaagcatcaatgactcatttttaggctcgaggcacgatgatgaaacctgtggtgcccagcccaggctacctttacgacctggctccgccactgttggcaacttcgcccgttgcacccccggaggaccgacagcgacgacgccactactgatgccactggccaaccgtgaggacaggacaacggtcgcctctggccgcggatcggcagattcagtcttatttggtgccatggatccagtcgccggtacggcggagcatcggggaccggtggaagtgcgcgcccgcgcgcccggcaagatcatcctcacaggcgagcacgccgtcgtccacggctccgccgccgtcgccgctgccatcgatctctacaccaactcctccctcctcctccgccccgcaggcccaggagagggtggcggcgctggctccagcgcggtagagctggacctcagggactcgggcctgaccttctcatggccgtgctcgcgcctccgcggggcgctgggggaagagatcagcgccaaccccggggctccggcgccgtgctcccccgaccagcttgccgctattgccaggctcttgcaggaccaggacatccctgaggccaagatctggctctccgccggcctctccgccttccttttcctctacacctccattttgggatgcaggcctggcaaggcagtggtgtcctcggacctgcccatgggcgcagggcttggctcatcggcagcattttgtgtctccatgtcgggggcactattgacggctgctggcgcagtaagtgttggagcacacaggggtgctgagggttgggaggtgttggagaagggtgctcttgagctggtcaaccaatgggcgttccaaggggaaaagattattcatgggaaaatgatcaaattcaagaagggggaactgacaaaccttgagtccaggaacccagtcaaaatgcttattactgatacaagagttggtaggaacacaaaggcactggttgctggtgtgtctgaaagagcatctagacatccagatgctatggcttctgtattccatgcagtgaacactatcagtgaagagctttcaagcattgttgagttagtagccgaggatgagatagccatcacctctaaggaggataagctagcagagcttatggagatgaaccaaggtttgcttcagtgtatgggagtcagccattcttctatagaaactgtgttgcggaccactctgaaatatagcttggtctcaaagctaactggagctggtggtggaggctgtgtgttgactctaataccgacgttatcgtccaatattgttctggagaaagtcaccagggagctcgaatctcatggttatcgctgcttcaaagttgaggttggtgggcgaggtctccaagtattccgaggataacataacactcaacctatttcaaggagatgttgtaccatacttttagaagatggcttacctgcactgaagctgtttagattctcttcttgagttattccaagatcatgataggatattcttctcctaagcctagcaggttcttgtatccagtactcgagttgctccaggattaggacattcttatgctatccctagcactcttgtatcaaataagctcatagatgcctgatcattgctggtatgattgttgtattaactattaagtaaacaaacatttaattgctccaaatgttgtatcaaataaaaaaaatatcatcgacctcatgaagccaatagctacccatatg

SEQ ID NO: 42334 - DNA, 1663 bp, Zea Mays
tttccctccctgcaattcacattgatatgagcattactttgctcttcaagtgtttatatcttgctaaatggtaaccaattcaattctgactttcaccaagaattttgattacctcttttgcgttgaccttgaagcatcaatgactcatttttaggctcgaggcacgatgatgaaacctgtggtgcccagcccaggctacctttacgacctggctccgccactgttggcaacttcgcccgttgcacccccggaggaccgacagcgacgacgccactactgatgccactggccaaccgtgaggacaggacaacggtcgcctctggccgcggatcggcagattcagtcttatttggtgccatggatccagtcgccggtacggcggagcatcggggaccggtggaagtgcgcgcccgcgcgcccggcaagatcatcctcacaggcgagcacgccgtcgtccacggctccgccgccgtcgccgctgccatcgatctctacaccaactcctccctcctcctccgccccgcaggcccagatgcaggcctggcaaggcagtggtgtcctcggacctgcccatgggcgcagggcttggctcatcggcagcattttgtgtctccatgtcgggggcactattgacggctgctggcgcagtaagtgttggagcacacaggggtgctgagggttgggaggtgttggagaagggtgctcttgagctggtcaaccaatgggcgttccaaggggaaaagattattcatggcaagccttctggcatcgacaattccgtcagcacttttgggaaaatgatcaaattcaagaagggggaactgacaaaccttgagtccaggaacccagtcaaaatgcttattactgatacaagagttggtaggaacacaaaggcactggttgctggtgtgtctgaaagagcatctagacatccagatgctatggcttctgtattccatgcagtgaacactatcagtgaagagctttcaagcattgttgagttagtagccgaggatgagatagccatcacctctaaggaggataagctagcagagcttatggagatgaaccaaggtttgcttcagtgtatgggagtcagccattcttctatagaaactgtgttgcggaccactctgaaatatagcttggtctcaaagctaactggagctggtggtggaggctgtgtgttgactctaataccgacgttatcgtccaatattgttctggagaaagtcaccagggagctcgaatctcatggttatcgctgcttcaaagttgaggttggtgggcgaggtctccaagtattccgaggataacataacactcaacctatttcaaggagatgttgtaccatacttttagaagatggcttacctgcactgaagctgtttagattctcttcttgagttattccaagatcatgataggatattcttctcctaagcctagcaggttcttgtatccagtactcgagttgctccaggattaggacattcttatgctatccctagcactcttgtatcaaataagctcatagatgcctgatcattgctggtatgattgttgtattaactattaagtaaacaaacatttaattgctccaaatgttgtatcaaataaaaaaaatatcatcgacctcatgaagccaatagctacccatatg

SEQ ID NO: 42335 - DNA, 3927 bp, Zea Mays
tttccctccctgcaattcacattgatatgagcattactttgctcttcaagtgtttatatcttgctaaatggtaaccaattcaattctgactttcaccaagaattttgattacctcttttgcgttgaccttgaagcatcaatgactcatttttaggctcgaggcacgatgatgaaacctgtggtgcccagcccaggctacctttacgacctggctccgccactgttggcaacttcgcccgttgcacccccggaggaccgacagcgacgacgccactactgatgccactggccaaccgtgaggacaggacaacggtcgcctctggccgcggatcggcagattcagtcttatttggtgccatggatccagtcgccggtacggcggagcatcggggaccggtggaagtgcgcgcccgcgcgcccggcaagatcatcctcacaggcgagcacgccgtcgtccacggctccgccgccgtcgccgctgccatcgatctctacaccaactcctccctcctcctccgccccgcaggcccaggagagggtggcggcgctggctccagcgcggtagagctggacctcagggactcgggcctgaccttctcatggccgtgctcgcgcctccgcggggcgctgggggaagagatcagcgccaaccccggggctccggcgccgtgctcccccgaccagcttgccgctattgccaggctcttgcaggaccaggacatccctgaggccaagatctggctctccgccggcctctccgccttccttttcctctacacctccattttgggatgcaggcctggcaaggcagtggtgtcctcggacctgcccatgggcgcagggcttggctcatcggcagcattttgtgtctccatgtcgggggcactattgacggctgctggcgcagtaagtgttggagcacacaggggtgctgagggttgggaggtgttggagaagggtgctcttgagctggtcaaccaatgggcgttccaaggggaaaagattattcatggcaagccttctggcatcgacaattccgtcagcacttttgggaaaatgatcaaattcaagaagggggaactgacaaaccttgagtccaggaacccagtcaaaatgcttattactgatacaagagttggtaggaacacaaaggcactggttgctggtgtgtctgaaagagcatctagacatccagatgctatggcttctgtattccatgcagtgaacactatcagtgaagagctttcaagcattgttgagttagtagccgaggatgagatagccatcacctctaaggaggataagctagcagagcttatggagatgaaccaaggtttgcttcagtgtatgggagtcagccattcttctatagaaactgtgttgcggaccactctgaaatatagcttggtctcaaagctaactggagctggtggtggaggctgtgtgttgactctaataccgacgttatcgtccaatattgttctggagaaagtcaccagggagctcgaatctcatggttatcgctgcttcaaagttgagttcctgtgttgcactacttgtctacttcgtccactcatccggaaacctgcagacgatgaatgaggatctgctcaaaacgtatcatgagagagctgtttccactgatgctcgctcgctaatcactttgttcagagagtgctgcatacaagtcggtttcaggacagctgtttcagtgttcttggataaaaaaagaagaaggcatgctttgcagctgacaaactcacagcagttaagtggcagttgcttatcagcatttgtcctcgagatggctgcacttattgttaaccttcagataaactatgcctctgctcatgacaatgaaacactatttgatattattagtgtaaagactccgatgaacctctcaattgacgagcgatgcaggataaataatttgtccacaagtatgattgcattatcccaggtttcagcacttccatattctgctcattgtgcctcgacgtcatcttcaccagagcagaatatacgtggtctggtgctaataatgtgcaagtcaggctggaccgggttttctgctcttcggattgggaggaaaaattccccaattacctgctgcaaagctcagcttcagaggattcagaccattgccctctcctgttgggattgaaggacaaccacacggggaaacggagatttcattttgaatccttttggcccagatttgatggctttctggaagcggttactaatgcttggggttctgttcaacagtcctcttgtcccctcaagaccctttccctaaaattcaaagtgacgacaaaagggctgcaaagctggagtgacagaaaggttgggaatttcaaactgcaacttgagcttgcccgagaaattttgctgcagcttgaagtggcaaaagagagcagaattcttaatgttttggagacatggctgcttgggcgcttgaagaaatgctctctggctcttgcctccttgatccgctcgatggctaggactagatcaagaattgcctggctcaaagatggtgatgctaatacaaagctcttctactcttggtctcgttatcggaaaaggaaaaatttcatagccaaaattcatgacggagagcagcttgtgaccagtcatagtgataaggctgaggtgtttcggtccttttattctgatttaattggtacagggcagcaaaggtccagatctgtcaaccttgacaccataggactgcagcacattgaccttcaggggctcgaacaacaattctctgaggaggaggtgtggaataccatcaaacagctccctccggacaaagccccgggacctgatgggttcacaggccgtttctataagacctgctggtcaatcatcaaaaaagatattatggctgctatcttgactgtttggaacaaggattttcgaaatttcagatatctcaacacagccttcatcactctgttacctaagaaagaggatgccatccttgccaaggactttcggcctattagcttgatccatagcttcgcaaagttaatcacgaaggtcatggcaaacagacttagtggttatatggacaagttgatttctaagaaccaaagtgcgtttatcaagggcagattcatccaagacaatttcatgttagttcagcagactgcaaagattgctgcatgctcaaaaaacagcccagaattcttctcaagttggacatttccaaggccttcgattcggtatcttggtccttccttcttgaagtgttggaaaaagttggattcggccccatatggagagatgtgattagtgggctgcttatgacctcatctacccaaattatgcttaatggaatgcctggggaatacattcaacacaagaggggtctgcggcagggggactcgttgtcccctcttcttttcatcatcgttatggatgttctcaatggcctaattgttaaagctgctgatgagggcatgctccaacccctttcaacacgctccattcagcaccgaatatcgctctatgctgatgatgtggtgatattcttgagaccggctgctagtgatctgtacttggtaaccaggatattggagctgtttggggacgcctcggggctaaaaaccaatgttcagaaaagcagtatggcccccattcactgctctccggttgacatggaaatagtaactcagatttttccttgcaaagttgaaatgttccctcttaaatacctcgggctacctctttctctcaggaagttaaccaaggagcagctgcagccacttatcgataggcttgcggacctcttacctaattggagggccgacttgatgtctcatgctggcagagctatccaggtgcagcatgtgctcacggcaacagttatatatcacgccatggctttggatctgcctaagtgggctatcaaag

SEQ ID NO: 42336 - DNA, 2282 bp, Zea Mays
aatcaatcattttcttttgttttcttcaataaacatttattggcaagacatattagcatgaatgttttgttacacttttttttgactgcttgcagtattttctaccttttgaaattatgctttatagttgtaaactaaacatgtatttatgtgacaatttagttttccagaaacagttttcctctctatttcagaacatgatctggtactttgtgaagtttttttgtttgtttgcttgtgcagactccgatgaacctctcaattgacgagcgatgcaggataaataatttgtccacaagtatgattgcattatcccaggtttcagcacttccatattctgctcattgtgcctcgacgtcatcttcaccagagcagaatatacgtggtctggtgctaataatgtgcaagtcaggctggaccgggttttctgctcttcggattgggaggaaaaattccccaattacctgctgcaaagctcagcttcagaggattcagaccattgccctctcctgttgggattgaaggacaaccacacggggaaacggagatttcattttgaatccttttggcccagatttgatggctttctggaagcggttactaatgcttggggttctgttcaacagtcctcttgtcccctcaagaccctttccctaaaattcaaagtgacgacaaaagggctgcaaagctggagtgacagaaaggttgggaatttcaaactgcaacttgagcttgcccgagaaattttgctgcagcttgaagtggcaaaagagagcagaattcttaatgttttggagacatggctgcttgggcgcttgaagaaatgctctctggctcttgcctccttgatccgctcgatggctaggactagatcaagaattgcctggctcaaagatggtgatgctaatacaaagctcttctactcttggtctcgttatcggaaaaggaaaaatttcatagccaaaattcatgacggagagcagcttgtgaccagtcatagtgataaggctgaggtgtttcggtccttttattctgatttaattggtacagggcagcaaaggtccagatctgtcaaccttgacaccataggactgcagcacattgaccttcaggggctcgaacaacaattctctgaggaggaggtgtggaataccatcaaacagctccctccggacaaagccccgggacctgatgggttcacaggccgtttctataagacctgctggtcaatcatcaaaaaagatattatggctgctatcttgactgtttggaacaaggattttcgaaatttcagatatctcaacacagccttcatcactctgttacctaagaaagaggatgccatccttgccaaggactttcggcctattagcttgatccatagcttcgcaaagttaatcacgaaggtcatggcaaacagacttagtggttatatggacaagttgatttctaagaaccaaagtgcgtttatcaagggcagattcatccaagacaatttcatgttagttcagcagactgcaaagattgctgcatgctcaaaaaacagcccagaattcttctcaagttggacatttccaaggccttcgattcggtatcttggtccttccttcttgaagtgttggaaaaagttggattcggccccatatggagagatgtgattagtgggctgcttatgacctcatctacccaaattatgcttaatggaatgcctggggaatacattcaacacaagaggggtctgcggcagggggactcgttgtcccctcttcttttcatcatcgttatggatgttctcaatggcctaattgttaaagctgctgatgagggcatgctccaacccctttcaacacgctccattcagcaccgaatatcgctctatgctgatgatgtggtgatattcttgagaccggctgctagtgatctgtacttggtaaccaggatattggagctgtttggggacgcctcggggctaaaaaccaatgttcagaaaagcagtatggcccccattcactgctctccggttgacatggaaatagtaactcagatttttccttgcaaagttgaaatgttccctcttaaatacctcgggctacctctttctctcaggaagttaaccaaggagcagctgcagccacttatcgataggcttgcggacctcttacctaattggagggccgacttgatgtctcatgctggcagagctatccaggtgcagcatgtgctcacggcaacagttatatatcacgccatggctttggatctgcctaagtgggctatcaaag

SEQ ID NO: 42337 - DNA, 1196 bp, Zea Mays
cacagagcatccatccatccctgatcttcacgtggccatatcccaccaccaaccaaccctccaccaacttcatcgcatcaaggcccctggcatctcccgaaagtccaaagggcccctcccccgcgcctccgcggggaccttgttaacaaactgggccgcatccagggggcattctgcaaagcacgagcccgacttgggattgagggtgtcaatggagatgcttgtggatttgagcagtctaatttgggcaaaaggggtagagatgaaccatgttcatctggtctaaaatccaaagcttgtcgtgaaaaaatgaggagggacaagctgaatgacaggttcctggaattaagttcggttatgaatcctggaaaacaagcaaagttggataaagccaatatcttgagcgacgcagcccgtatggtggcacaacttagaggtgaggcagaaaagcttaaagaatcaaatgagaagctgcgggagaatatcaaggacctgaaggaggagaagaatgagctccgcgaagagaaagtgaggctgaaggtagagaaagataggctggagcagcaagtcaaagccatgagtgtagctcctacaggatatgttccccatctccctcatccagcttcataccacccggctgcatttgctccatttgtgccgccacagcaagctgcaggcaacaaaagtgctccaatccctgcacctttccctgggatggcaatgtggcagtggctgcctccgaccatcgtggacacaactcaagacccaaagctctggccgcctaatgcttaggggcagctagctgccttggggtgttgactcgccaatcgccatgccgtttcatgcattgggcggcagatcagagtatcagttagtaggtccctggagaggaggaatcaagtttcgcaactcgcgtcatgtttatgctgtaacagttgcttccagcagtcgtcatcaacttgctttgttctattgaagggtgatgcatgtaattaatatgtggatcttaaccctctagctggcaaatgtgtcctttgctgccttgtgccctttgccccgttcgtgagtggcctgtggaggccgttcctgttcttggtgtccgagattttgccattagctttgtgagacacatacatagcaggaaaagaattcgatgaactaaatctttaaaccgtctctataacgccagcaaaaaa

SEQ ID NO: 42338 - DNA, 1988 bp, Zea Mays
atcaaggcccctggcatctcccgaaagtccaaagggcccctcccccgcgcctccgcggggaccttgttaacaaactgggccgcatccagggggcattctgcaaagcacgagcccggttcgttctcgacctttcgtctcgctctcgcccgcccgaccccgcggagccctagcctagccttgcccccgaccgcggattccccctcggccgccgcgcgcccgcacccgcacccgcgatgatgaactgcgccggaggcggagaccccgtggaggacttcctgatctccggcgccgtcgacgacgaagatctagccatcttctgcgacggagggtacggcgatgccgaccggaacagtcctttcccgtagtatatatgtagactgcgtttctgtttatggcgcggcgcacctaggtcgttttcgctgcagattgctttttgggcttgttagaaaaaattgtgggcggtggtagactaattatttgatttggctgacgtatagcgtctaaaaactattcgcatattatatttcgtttttttgtcaaaaggaaaggacgaaggcttatgcatctgacagtcgagtctgcaatcctgtaacctttgatatctgcatctgaagttcagatatttgagagatttgcagtactagttggttcgggaactaatacctgtacgaaatgtttttactggttcaccaacacacttactgctgctatgatcatgtacaaactgtaccttgaagcaattggagtttgtttgctagctggtataaccttttccgctgatcaatcatgcattatagtataataatatatcgattcaagtgatttgcattatcatgatcatagacatttgattcttatcttctgactggaatgcaagcatgaagcagcacaatgatttattagatatttgagaagctattctgcacgtgcatttcctttcctgttgtggcatttgttcggtacttactttgcaattgtagcagacttgggattgagggtgtcaatggagatgcttgtggatttgagcagtctaatttgggcaaaaggggtagagatgaaccatgttcatctggtctaaaatccaaagcttgtcgtgaaaaaatgaggagggacaagctgaatgacaggttcctggaattaagttcggttatgaatcctggaaaacaagcaaagttggataaagccaatatcttgagcgacgcagcccgtatggtggcacaacttagaggtgaggcagaaaagcttaaagaatcaaatgagaagctgcgggagaatatcaaggacctgaaggaggagaagaatgagctccgcgaagagaaagtgaggctgaaggtagagaaagataggctggagcagcaagtcaaagccatgagtgtagctcctacaggatatgttccccatctccctcatccagcttcataccacccggctgcatttgctccatttgtgccgccacagcaagctgcaggcaacaaaagtgctccaatccctgcacctttccctgggatggcaatgtggcagtggctgcctccgaccatcgtggacacaactcaagacccaaagctctggccgcctaatgcttaggggcagctagctgccttggggtgttgactcgccaatcgccatgccgtttcatgcattgggcggcagatcagagtatcagttagtaggtccctggagaggaggaatcaagtttcgcaactcgcgtcatgtttatgctgtaacagttgcttccagcagtcgtcatcaacttgctttgttctattgaagggtgatgcatgtaattaatatgtggatcttaaccctctagctggcaaatgtgtcctttgctgccttgtgccctttgccccgttcgtgagtggcctgtggaggccgttcctgttcttggtgtccgagattttgccattagctttgtgagacacatacatagcaggaaaagaattcgatgaactaaatctttaaaccgtctctataacgccagcaaaaaa

SEQ ID NO: 42339 - DNA, 1933 bp, Zea Mays
atcaaggcccctggcatctcccgaaagtccaaagggcccctcccccgcgcctccgcggggaccttgttaacaaactgggccgcatccagggggcattctgcaaagcacgagcccggttcgttctcgacctttcgtctcgctctcgcccgcccgaccccgcggagccctagcctagccttgcccccgaccgcggattccccctcggccgccgcgcgcccgcacccgcacccgcgatgatgaactgcgccggaggcggagaccccgtggaggacttcctgatctccggcgccgtcgacgacgaagatctagccatcttctgcgacggaggacttgggattgagggtgtcaatggagatgcttgtggatttgagcagtctaatttgggcaaaaggtattgtttcttgtcgtaactcttcattctgattgtgaagtgcgtgcatgtgggtgaacactgtcaagtttctatccatcatgtgtgtctatttgggcatcttgtccgtccttctcatggggttcaggccccaaacaggaaaacctctctggctttaaaggtttctacaagatgccaacaagtttgtaaaacatcaagtgtgtgcacatgcaatcagatgatagtgattgtatagcatattgctatgaattatctccaatcaaatttcaattcccatgtgatctggtgtgttcattttcttatgcttggcaatggcatcactaacactatgaacatagcattcggcttgtacatggtatttccttatgttctgctctatagtaatataaatatctgttctgtgcaggggtagagatgaaccatgttcatctggtctaaaatccaaagcttgtcgtgaaaaaatgaggagggacaagctgaatgacaggtactgcaaaatcaatgtttaaaaggctgctaggcaacaaggcaagctgggtacgcctggacgcgtaggccacacctttgaaacactgctgcgaatatgtcctatacctcacaagttgttgctcaaaagacaaggaatggtgaatgcacttacttgcacatatcttagttctcatctgttactttgatttgcaggttcctggaattaagttcggttatgaatcctggaaaacaagcaaagttggataaagccaatatcttgagcgacgcagcccgtatggtggcacaacttagaggtgaggcagaaaagcttaaagaatcaaatgagaagctgcgggagaatatcaaggacctgaaggaggagaagaatgagctccgcgaagagaaagtgaggctgaaggtagagaaagataggctggagcagcaagtcaaagccatgagtgtagctcctacaggatatgttccccatctccctcatccagcttcataccacccggctgcatttgctccatttgtgccgccacagcaagctgcaggcaacaaaagtgctccaatccctgcacctttccctgggatggcaatgtggcagtggctgcctccgaccatcgtggacacaactcaagacccaaagctctggccgcctaatgcttaggggcagctagctgccttggggtgttgactcgccaatcgccatgccgtttcatgcattgggcggcagatcagagtatcagttagtaggtccctggagaggaggaatcaagtttcgcaactcgcgtcatgtttatgctgtaacagttgcttccagcagtcgtcatcaacttgctttgttctattgaagggtgatgcatgtaattaatatgtggatcttaaccctctagctggcaaatgtgtcctttgctgccttgtgccctttgccccgttcgtgagtggcctgtggaggccgttcctgttcttggtgtccgagattttgccattagctttgtgagacacatacatagcaggaaaagaattcgatgaactaaatctttaaaccgtctctataacgccagcaaaaaa

SEQ ID NO: 42340 - DNA, 629 bp, Zea Mays
gtttcttctcgtgtttgcactcccctgcccggctgcggctgcccggcagggttaggaggcaagggaagagagggtggaggaagtgggggaggatgagcgaggagaggccggtgccgcggcgggagagcccgtggggtctgcctgagggcgacacgcggcagcccaaggctcaccgctgtaacgaccgcgccgaggacgtcgtccaggcttgctttgaagggaacccattcaagacagttccaggcccatttaagctcttctggcaatgcatgcgctcaaaacctggggaggaaccaaccgagccctatacctacctgcagctagatcctccgagaagggtggaagtgaatctggagcaaacaggaagtgaaccttgaacgagcatgccatctcgtgccgatttgtcttcacctttggagcaaactagctgcatcaactaataaactaggcatagggagatgctcgttcaccatcttgttcaaggtgaatctggaataaactaacagaagcatcaactaattggctgcataagaaaaaaaatataaaccttcagtggctttttcattatcatcttgcatcaactaataaactagctgcatcaactaataaacgagcatgcctagtttacc

SEQ ID NO: 42341 - DNA, 2584 bp, Zea Mays
cgatttccccaccaccgccgtttgatctcacaccaaactgcaactggcagcaaccagtagatgccgccgccggagatgcagaagcggaagctcgcccgtatctgcgacctcgtctcctcctccctgcttctccacctcgaacccgcgccgtcgccgccgcggcagctgacgcgggagggcgagcggcagctcctcctcgcgctctccacgacgatacggcgatgggaccaggaggaggatgagtgggcttgtgaattgtttcaggaaactctttctgattctggagaagttcatagttgctgcttactacctgaagcgcgtccatatgatggatttggttgcctggcaaatattgtctctatgctggttggtttccttgatttctgcagcgactatgtcaaacactcagctggcaacatcctcatttccgtatctagtaccctaattaagtttgaatccatttggattcagttcattgagcttgcctggggggctatacatgcagcatcaaaatgtgttcataacacttcacattctacaaccgactccaacagtgatgacagcactagttcaggcacaagaatcacaagcttcatgacagcacttagtgagcatcgtcttaataccagtcggcaaaccatgtccagtctctttcgagtattgcatgctatcctgaagttccttaaacagagtgacagtgacttgaaagacgacttcatttgtctatccattcatcaaattcataagatgccttggaatttgttccatcaattacatgctggaggacttgccagctgtgccaaggatagcagatttagcaccagtaatgattcagcacagtctagaattctgactggcagtcttctccagctgttgggctctttacttgaccaaagctacctgagagacacagacggacaagatatgtttgtgaaacttgtggatgtagttcccaagatagcatcgttgtccttaggaggacagcatgatggatccaaaagtctttatcagtacttaaagcacaaaattctgatggtaatgatgcggcttaagccatacatacagcaagattgttcgcatattgttagttggctgaaattgcttcgacgttactttggagaccttcttcatcagcctatctcacaacatattgctaaaccagaaaattgtttagaagattctccgtttttattggacatggtagatttagtcgagagtcaggataagtcaactcggcacttgcaaaggcaagctatctatttgttccttagttgttccatatgtttgtcttacaacagaaatgatggtgcacttcagtgttcatgcaagcgtgatgagtgtttgttgggtcacaaagtacaaggctgtagtaatcattgcaactgttttggcttatccgaaatttcagactggtttcagaagtgttatctaaatgggagtatcgactcaaaatcatcaagtttcgcgttatcctttctggaattgtatatggaggaggatgacatgctattcagcatcctcttacaacttttagatgctccactcgttttcctaaaaatagctaacttcgaaactaaggaacttgttggtgtaaaactgttctcaagcatttttgacccagttcaccttttccatctgctgctttttctgctgcactatgatcacatggtactcgttgattatctcatatctagggatgttggtgtgctttgtgctcagtatctattaaggtgtttgcgcttggtttcccagtcttggcatgcttttgttgatgattcagtttactcaacaaaaatagaaaagcttaactgtaaaaggcagaggatttctggggataaagatagcgacagagccagttcaagtaaccagtataagaatggttctggttgtgataaagaagtcgaggattcacggaagcttttcctcgatgctaaaaaatgtctttatttattaaagagaacattggaagatctgcaaaagaaggatttgttcccttacaaccccaagcctcttcttagaagcttggcccggttccaggagctgggtgagcaggggtgaaattcgagttaaacctggtgaggaagctactatctgtagaagttgaagaatgacccttgggcagatagttgtatcgatatagtagttggtaaaagggagctgtgaatataatatatatctcttctaattcatgatctggtctaggactttgagtcgtctgaatcatacagagaaattccagatgctgctacctctttctttttttttttgcaagttgcctgctactctgatgcattgggccatgcgaggtcacctatcatgcaagacaccattgttcattatacattaagtagcatcatatcatggtggcacttcaattatacatcaatcattttgtcctgtgctcttacccaggtcaatgtataagagtgcagagctgaacagcgatagacgatatattcacgcatccgcaaacacatgacgaaaaatttaatggtttgcggttaatgtaccgagtgtttttttaaaatctgtttgtgtttgagtttgggaaaccgaatgaatcgctccctgaaacgatggtttt

SEQ ID NO: 42342 - DNA, 1822 bp, Zea Mays
cgctgctcgatttccccaccaccgccgtttgatctcacaacaaactagggctggatatcgagccagctcggttcggctcgttcgagctcgagctggctcgtacaccaaactgcaactggcagcaaccagtagatgccgccgccggagatgcagaagcggaagctcgcccatatctgcgacctcgtctcctcctccctgcttctccacctcgaacccgcgccgtcgccgccgcggcagctgacgcgggagggcgagcggcagctcctcctcgcgctctccacggtgaacaagacgatacggcgatgggaccaggaggaggatgagtgggcttgtgaattgtttcaggaaactctttctgattctggagaagttcatagttgctgcttactacctgaagcgcgtccatatgatggatttggttgcctggcaaatattgtctctatgctggttggtttccttgatttctgcagcgactatgtcaaacactcagctggcaacatcctcatttccgtatctagtaccctaattaagtttgaatccatttggattcagttcattgagcttgcctggggggctatacatgcagcatcaaaatgtgttcataacacttcacattctacaaccgactccaacagtgatgacagcactagttcaggcacaagaatcacaagcttcatgacagcacttagtgagcatcgtcttaataccagtcggcaaaccatgtccagtctctttcgagtattgcatgctatcctgaagttccttaaacagagtgacagtgacttgaaagacgacttcatttgtctatccattcatcaaattcataagatgccttggaatttgttccatcaattacatgctggaggacttgccagctgtgccaaggatagcagatttagcaccagtaatgattcagcacagtctagaattctgactggcagtcttctccagctgttgggctctttacttgaccaaagctacctgagagacacagacggacaagatatgtttgtgaaacttgtggatgtagttcccaagatagcatcgttgtccttaggaggacagcatgatggatccaaaagtctttatcagtacttaaagcacaaaattctgatggtaatgatgcggcttaagccatacatacagcaagattgttcgcatattgttagttggctgaaattgcttcgacgttactttggagaccttcttcatcagcctatctcacaacatattgctaaaccagaaaattgtttagaagattctccgtttttattggacatggtagatttagtcgagagtcaggataagtcaactcggcacttgcaaaggcaagctatctatttgttccttagttgttccatatgtttgtcttacaacagaaatgatggtgcacttcagtgttcatgcaagcgtgatgagtgtttgttgggtcacaaagtacaaggctgtagtaatcattgcaactgttttggcttatccgaaatttcagactggtttcagaagtgttatctaaatgggagtatcgactcaaaatcatcaagtttcgcgttatcctttctggaattgtatatggaggaggatgacatgctattcagcatcctcttacaacttttagatgctccactcgttttcctaaaaatagctaacttcgaaactaaggaacttgttggtgtaaaactgttctcaagcatttttgacccagttcaccttttccatctgctgctttttctgtgctgcaaccatcattgagaacctggtcaacgttaccatttgtaattggacatgctatgcaaaattaagtactttaggactcataattttg

SEQ ID NO: 42343 - DNA, 1456 bp, Zea Mays
cgctgctcgatttccccaccaccgccgtttgatctcacaacaaactagggctggatatcgagccagctcggttcggctcgttcgagctcgagctggctcgtacaccaaactgcaactggcagcaaccagtagatgccgccgccggagatgcagaagcggaagctcgcccatatctgcgacctcgtctcctcctccctgcttctccacctcgaacccgcgccgtcgccgccgcggcagctgacgcgggagggcgagcggcagctcctcctcgcgctctccacggtgaacaagacgatacggcgatgggaccaggaggaggatgagtgggcttgtgaattgtttcaggaaactctttctgattctggagaagttcatagttgctgcttactacctgaagcgcgtccatatgatggatttggttgcctggcaaatattgtctctatgctggttggtttccttgatttctgcagcgactatgtcaaacactcagctggcaacatcctcatttccgtatctagtaccctaattaagtttgaatccatttggattcagttcattgagcttgcctggggggctatacatgcagcatcaaaatgtgttcataacacttcacattctacaaccgactccaacagtgatgacagcactagttcaggcacaagaatcacaagcttcatgacagcacttagtgagcatcgtcttaataccagtcggcaaaccatgtccagtctctttcgagtattgcatgctatcctgaagttccttaaacagagtgacagtgacttgaaagacgacttcatttgtctatccattcatcaaattcataagatgccttggaatttgttccatcaattacatgctggaggacttgccagctgtgccaaggatagcagatttagcaccagtaatgattcagcacagtctagaattctgactggcagtcttctccagctgttgggctctttacttgaccaaagctacctgagagacacagacggacaagatatgtttgtgaaacttgtggatgtagttcccaagatagcatcgttgtccttaggaggacagcatgatggatccaaaagtctttatcagtacttaaagcacaaaattctgatggtaatgatgcggcttaagccatacatacagcaagattgttcgcatattgttagttggctgaaattgcttcgacgttactttggagaccttcttcatcagcctatctcacaacatattgctaaaccagaaaattgtttagaagattctccgtttttattggacatggtagatttagtcgagagtcaggataagtcaactcggcacttgcaaagactggtttcagaagtgttatctaaatgggagtatcgactcaaaatcatcaagtttcgcgttatcctttctggaattgtatatggaggagggtagtttctttcgatacagttggatatttggattctgt

SEQ ID NO: 42344 - DNA, 4239 bp, Zea Mays
gagccatccagtttatacataattccccacacacacctcggccccgtcccgtttagatcaactctgcccccgccgtacgccccacgccctcctccccgcgaggagccaccagcccaccatctacgccgcctgttctgatgccgccgcccacgcgaggccgaggccgaggccgtggccgcggccgcgggcgcgggcgcggtcgcggtcgcgggaggccaagtaaggacaccgttgctgaggactccgcgcacgccaccgaggaaagtggcgaggaaaacctccaggagaaggtgcaggaaggtggcaaggtaaacctcacggagaaggtgcaggaaggtggcgaggaaaacctcacggagaaggtgcaggaaggtggcgaggaaaacctcacggaaaaggagaatgaagggatagtggaggtctcaaaacccccccaaaggcgtcggaaggatcctgttgcagacccctcttctcttgagtctagtggtttcatgcgatttcgggagaggaggaatgcttcagcggttcaggagcaggggcctaagaagagaaggattactgaggattcaaacatgtgccatcagtgccagaggaatgatagcggaagagttgtacggtgccaaggctgtgtcgtccgaaaaagaaaatacagatattgtgtgaagtgcattaaacgctggtatccacatttatcagaggatgattttgcgaacaattgcccagtttgtcaaaataattgcaattgtaaggcttgtctgcggggagacataacccgagccaactcgaggaaaaaaaagaagttactgcaaataaattctggaggatatagtgtgtctgaacaagataaaattaaattctcaatgcgtatcgtgcactttttgcttccttggctgaaacaattccatcaagagcagatgcaagagaaaagtgccgaggctgcaactaaaggtattgatgcagacaaactggaggtccctctaaccatttgtggaaaaaaggaacgtatatactgcaacaactgcaggacatctattgttgacttccacagaacctgcaataaatgtaactatgatctctgtctccagtgctgccaggagcttcgtcgaggccttgtttctggtaatgatgccaaggttgatggtggaggcaagcaagattttctatcgggagttagtcatgataaaatcataagcaaagggccatccgatggacagaatgacatgttgatagatagtgtagttcctggtgaaaacaacacttctagcttgagacagtggagtgtgaataaagatggaaccataccttgcccaccaaatgcatttggtggttgtgggagctctcttcttgaactgaagtgcttgtttaaagagaagtttattgctgaattactggagaaagctaattcagcgctcaataatgaaatggaggtgaagatagaaggatcaaaatgtccctgcttcactgaatccggtgacatggatgatggtatatcacggaaatcatcttgcagggagaattcctgtgataactacatatattgcccaaccgctacagatgtccaaaatggaagtttagaccatttccaggagcattggttgaagggtgaacctgtaattgtccgtgatacacttgcgttgacttctggattaagctgggaaccgatggttatgtggcgtgccttacgagaaaagaaagagaaagttgagaggctctcagttcttgctcttgaatgcttgggttggtgtgaggtcgatgtaaatattcatatgttttttgcggggtattcaagtgggcttgttggtccagacgatttgcccctgttgcttaagcttaaagattggccaccacatagttcttttgaggagcggctcccaaggcatggtgcagagtttatgtctgcattgccatttcgtgaatacactgatcctaaatggggacctcttaatctggcagtaaagcttcccgataatgttaataagccagaccttggtccaaagacttatattgcatacggtgtttccaaagagttgggaattggtgattctgtcaccaagcttcactgtgatatgtctgatgcggtaaatatacagttttgtgtatgcttcttggcattgatatgcaactctcaacaataaagacctatcttgttaagggcttaacaacacttgaatttacagatctacaacagtagcttaggtcaatatcctcacacatactgatgaaataaaactcaaagcaaaaaggattgccgcggtggaaaagaagaagcggtgtttaggaatgaagattctatctaccaaggaagcaagtggaggccttcaacggtgtgcagattattttggtatgccaacagctcccagtgaatctaacaaggagccaaggcctgaagagtgtgtaaatgaactgggcattaaacaaccagtacagcatgttgcttccgaggagcaggaaggagttcaagatgatgccaaggcagatgcaaatgttatgaatgtttcttttggtaagggaaaatcagaagattcttttggtacaattaatggtaccaacagtggagataaaatagaatctcctagtggtttagcagaaagaacattgactcagcctaccactaagggttgcagtaagcagcgtggccgtagttctaatggtagaggaaacaggactaaaaaaatagaagaggggaatgcgtctggactaattgctgtggctcccgagtcagaagatgatgatgatgatgccgcatttatagatggaaaccaagcagagggtggtgcactgtgggatatttttcgacgggaagatgtgagcaaactgcatgattatctaatgaagcatgcacatgagtttagacattgcaactttgagccagtgaagcaggttactcatcctatacatgatcagtgtttttatctaacaattgagcacaagagaaagcttaaggaagaatatggagtcgagccttggacatttgaacagaagctaggtgaggcagtatttatcccggcaggatgtccccaccaggttagaaatttgaagtcttgcataaaggttgcactagattttgtttctccggaaaatgtccgagagtgcatcaggttaacagaaggtttccgtctgctgccgaagtggcataaggtgaatgaagataaactggaggttaagaagatagctcttcatgcattcaatcaagctattaaagatatcactgatgaatcatctaatagcaatgaaagcaaatggatccggagataatgaggatcatgaaggccattgaatccatgcttgatgtcatggaagttagcaccacccgcattcgacatcttgctatcgagaacctgaatgaaaaccgtagtggcttatcggatgccgacaagataacaaaacctgattttagtgtactatgcatgatattagtaccttatataatacgtagcttggagaaaaggccattcaccgtttctcattgttgggaggttctaaagaatgaagccaaatggttacacttggagcagggctcacaaaatattgatgtgctggtgaacaaaggtgtagggttttctccaagatgtcggatttgacactgaagaagattgagtattggaagaggtccgattgaacatttggcactgacattcaccaacttgttcaaatagaggaaaagaatatggaaatggagaaagagcgcatgtatgcatgtgtaggtcagggagtggctcggatcagccttgagtcaatttccactgcgttttcttcggttatggatgagcacgaggagtaaaagaaacagaagaaggctgagtgtgattctcatatgcttattttcttgtcctgtgtaatggatgtgtgtatgtgaaccatatgcgaacttaaacgtctttgtttgtaccggtcaggccattctgagtgagggttccgtctcttctttttaggactccactgcgaggtgtcggtgtgtgagaaatggtgcaaacgtgtgtatgaaactctacgaggcatactcttatctagtattgtgtctagtgaagaatgggacacatccgatgctactgtaaactcacttgttgcactcactttttgagttggatttttctttcaaacttttttgtatgctctcttgagtttatctaacactagatttcataagtgtgcaccattgtccataactagactcacttaggtaaagctatccattccatgtcctctttataatgtgacataaataaggattttatcact

SEQ ID NO: 42345 - DNA, 4056 bp, Zea Mays
gtttagatcaactctgcccccgccgtacgccccacgccctcctccccgcgaggagccaccagcccaccatctacgccgcctgttctgatgccgccgcccacgcgaggccgaggccgaggccgtggccgcggccgcgggcgcgggcgcggtcgcggtcgcgggaggccaagtaaggacaccgttgctgaggactccgcgcacgccaccgaggaaagtggcgaggaaaacctccaggagaaggtgcaggaaggtggcaaggtaaacctcacggagaaggtgcaggaaggtggcgaggaaaacctcacggagaaggtgcaggaaggtggcgaggaaaacctcacggaaaaggagaatgaagggatagtggaggtctcaaaacccccccaaaggcgtcggaaggatcctgttgcagacccctcttctcttgagtctagtggtttcatgcgatttcgggagaggaggaatgcttcagcggttcaggagcaggggcctaagaagagaaggattactgaggattcaaacatgtgccatcagtgccagaggaatgatagcggaagagttgtacggtgccaaggctgtgtcgtccgaaaaagaaaatacagatattgtgtgaagtgcattaaacgctggtatccacatttatcagaggatgattttgcgaacaattgcccagtttgtcaaaataattgcaattgtaaggcttgtctgcggggagacataacccgagccaactcgaggaaaaaaaagaagttactgcaaataaattctggaggatatagtgtgtctgaacaagataaaattaaattctcaatgcgtatcgtgcactttttgcttccttggctgaaacaattccatcaagagcagatgcaagagaaaagtgccgaggctgcaactaaaggtattgatgcagacaaactggaggtccctctaaccatttgtggaaaaaaggaacgtatatactgcaacaactgcaggacatctattgttgacttccacagaacctgcaataaatgtaactatgatctctgtctccagtgctgccaggagcttcgtcgaggccttgtttctggtaatgatgccaaggttgatggtggaggcaagcaagattttctatcgggagttagtcatgataaaatcataagcaaagggccatccgatggacagaatgacatgttgatagatagtgtagttcctggtgaaaacaacacttctagcttgagacagtggagtgtgaataaagatggaaccataccttgcccaccaaatgcatttggtggttgtgggagctctcttcttgaactgaagtgcttgtttaaagagaagtttattgctgaattactggagaaagctaattcagcgctcaataatgaaatggaggtgaagatagaaggatcaaaatgtccctgcttcactgaatccggtgacatggatgatggtatatcacggaaatcatcttgcagggagaattcctgtgataactacatatattgcccaaccgctacagatgtccaaaatggaagtttagaccatttccaggagcattggttgaagggtgaacctgtaattgtccgtgatacacttgcgttgacttctggattaagctgggaaccgatggttatgtggcgtgccttacgagaaaagaaagagaaagttgagaggctctcagttcttgctcttgaatgcttgggttggtgtgaggtcgatgtaaatattcatatgttttttgcggggtattcaagtgggcttgttggtccagacgatttgcccctgttgcttaagcttaaagattggccaccacatagttcttttgaggagcggctcccaaggcatggtgcagagtttatgtctgcattgccatttcgtgaatacactgatcctaaatggggacctcttaatctggcagtaaagcttcccgataatgttaataagccagaccttggtccaaagacttatattgcatacggtgtttccaaagagttgggaattggtgattctgtcaccaagcttcactgtgatatgtctgatgcggtcaatatcctcacacatactgatgaaataaaactcaaagcaaaaaggattgccgcggtggaaaagaagaagcggtgtttaggaatgaagattctatctaccaaggaagcaagtggaggccttcaacggtgtgcagattattttggtatgccaacagctcccagtgaatctaacaaggagccaaggcctgaagagtgtgtaaatgaactgggcattaaacaaccagtacagcatgttgcttccgaggagcaggaaggagttcaagatgatgccaaggcagatgcaaatgttatgaatgtttcttttggtaagggaaaatcagaagattcttttggtacaattaatggtaccaacagtggagataaaatagaatctcctagtggtttagcagaaagaacattgactcagcctaccactaagggttgcagtaagcagcgtggccgtagttctaatggtagaggaaacaggactaaaaaaatagaagaggggaatgcgtctggactaattgctgtggctcccgagtcagaagatgatgatgatgatgccgcatttatagatggaaaccaagcagagggtggtgcactgtgggatatttttcgacgggaagatgtgagcaaactgcatgattatctaatgaagcatgcacatgagtttagacattgcaactttgagccagtgaagcaggttactcatcctatacatgatcagtgtttttatctaacaattgagcacaagagaaagcttaaggaagaatatggagtcgagccttggacatttgaacagaagctaggtgaggcagtatttatcccggcaggatgtccccaccagtcttgcataaaggttgcactagattttgtttctccggaaaatgtccgagagtgcatcaggttaacagaaggtttccgtctgctgccgaagtggcataaggtgaatgaagataaactggaggttaagaagatagctcttcatgcattcaatcaagctattaaagatatcactgatgaatcatctaatagcaatgaaagcaaatggatccggagataatgaggatcatgaaggccattgaatccatgcttgatgtcatggaagttagcaccacccgcattcgacatcttgctatcgagaacctgaatgaaaaccgtagtggcttatcggatgccgacaagataacaaaacctgattttagtgtactatgcatgatattagtaccttatataatacgtagcttggagaaaaggccattcaccgtttctcattgttgggaggttctaaagaatgaagccaaatggttacacttggagcagggctcacaaaatattgatgtgctggtgaacaaaggtgtagggttttctccaagatgtcggatttgacactgaagaagattgagtattggaagaggtccgattgaacatttggcactgacattcaccaacttgttcaaatagaggaaaagaatatggaaatggagaaagagcgcatgtatgcatgtgtaggtcagggagtggctcggatcagccttgagtcaatttccactgcgttttcttcggttatggatgagcacgaggagtaaaagaaacagaagaaggctgagtgtgattctcatatgcttattttcttgtcctgtgtaatggatgtgtgtatgtgaaccatatgcgaacttaaacgtctttgtttgtaccggtcaggccattctgagtgagggttccgtctcttctttttaggactccactgcgaggtgtcggtgtgtgagaaatggtgcaaacgtgtgtatgaaactctacgaggcatactcttatctagtattgtgtctagtgaagaatgggacacatccgatgctactgtaaactcacttgttgcactcactttttgagttggatttttctttcaaacttttttgtatgctctcttgagtttatctaacactagatttcataagtgtgcaccattgtccataactagactcacttaggtaaagctatccattccatgtcctctttataatgtgacataaataaggattttatcact

SEQ ID NO: 42346 - DNA, 4009 bp, Zea Mays
caactctgcccccgccgtacgccccacgccctcctccccgcgaggagccaccagcccaccatctacgccgcctgttctgatgccgccgcccacgcgaggccgaggccgaggccgtggccgcggccgcgggcgcgggcgcggtcgcggtcgcgggaggccaagtaaggacaccgttgctgaggactccgcgcacgccaccgaggaaagtggcgaggaaaacctccaggagaaggtgcaggaaggtggcaaggtaaacctcacggagaaggtgcaggaaggtggcgaggaaaacctcacggagaaggtgcaggaaggtggcgaggaaaacctcacggaaaaggagaatgaagggatagtggaggtctcaaaacccccccaaaggcgtcggaaggatcctgttgcagacccctcttctcttgagtctagtggtttcatgcgatttcgggagaggaggaatgcttcagcggttcaggagcaggggcctaagaagagaaggattactgaggattcaaacatgtgccatcagtgccagaggaatgatagcggaagagttgtacggtgccaaggctgtgtcgtccgaaaaagaaaatacagatattgtgtgaagtgcattaaacgctggtatccacatttatcagaggatgattttgcgaacaattgcccagtttgtcaaaataattgcaattgtaaggcttgtctgcggggagacataacccgatctggaggatatagtgtgtctgaacaagataaaattaaattctcaatgcgtatcgtgcactttttgcttccttggctgaaacaattccatcaagagcagatgcaagagaaaagtgccgaggctgcaactaaaggtattgatgcagacaaactggaggtccctctaaccatttgtggaaaaaaggaacgtatatactgcaacaactgcaggacatctattgttgacttccacagaacctgcaataaatgtaactatgatctctgtctccagtgctgccaggagcttcgtcgaggccttgtttctggtaatgatgccaaggttgatggtggaggcaagcaagattttctatcgggagttagtcatgataaaatcataagcaaagggccatccgatggacagaatgacatgttgatagatagtgtagttcctggtgaaaacaacacttctagcttgagacagtggagtgtgaataaagatggaaccataccttgcccaccaaatgcatttggtggttgtgggagctctcttcttgaactgaagtgcttgtttaaagagaagtttattgctgaattactggagaaagctaattcagcgctcaataatgaaatggaggtgaagatagaaggatcaaaatgtccctgcttcactgaatccggtgacatggatgatggtatatcacggaaatcatcttgcagggagaattcctgtgataactacatatattgcccaaccgctacagatgtccaaaatggaagtttagaccatttccaggagcattggttgaagggtgaacctgtaattgtccgtgatacacttgcgttgacttctggattaagctgggaaccgatggttatgtggcgtgccttacgagaaaagaaagagaaagttgagaggctctcagttcttgctcttgaatgcttgggttggtgtgaggtcgatgtaaatattcatatgttttttgcggggtattcaagtgggcttgttggtccagacgatttgcccctgttgcttaagcttaaagattggccaccacatagttcttttgaggagcggctcccaaggcatggtgcagagtttatgtctgcattgccatttcgtgaatacactgatcctaaatggggacctcttaatctggcagtaaagcttcccgataatgttaataagccagaccttggtccaaagacttatattgcatacggtgtttccaaagagttgggaattggtgattctgtcaccaagcttcactgtgatatgtctgatgcggtcaatatcctcacacatactgatgaaataaaactcaaagcaaaaaggattgccgcggtggaaaagaagaagcggtgtttaggaatgaagattctatctaccaaggaagcaagtggaggccttcaacggtgtgcagattattttggtatgccaacagctcccagtgaatctaacaaggagccaaggcctgaagagtgtgtaaatgaactgggcattaaacaaccagtacagcatgttgcttccgaggagcaggaaggagttcaagatgatgccaaggcagatgcaaatgttatgaatgtttcttttggtaagggaaaatcagaagattcttttggtacaattaatggtaccaacagtggagataaaatagaatctcctagtggtttagcagaaagaacattgactcagcctaccactaagggttgcagtaagcagcgtggccgtagttctaatggtagaggaaacaggactaaaaaaatagaagaggggaatgcgtctggactaattgctgtggctcccgagtcagaagatgatgatgatgatgccgcatttatagatggaaaccaagcagagggtggtgcactgtgggatatttttcgacgggaagatgtgagcaaactgcatgattatctaatgaagcatgcacatgagtttagacattgcaactttgagccagtgaagcaggttactcatcctatacatgatcagtgtttttatctaacaattgagcacaagagaaagcttaaggaagaatatggagtcgagccttggacatttgaacagaagctaggtgaggcagtatttatcccggcaggatgtccccaccagtcttgcataaaggttgcactagattttgtttctccggaaaatgtccgagagtgcatcaggttaacagaaggtttccgtctgctgccgaagtggcataaggtgaatgaagataaactggaggttaagaagatagctcttcatgcattcaatcaagctattaaagatatcactgatgaatcatctaatagcaatgaaagcaaatggatccggagataatgaggatcatgaaggccattgaatccatgcttgatgtcatggaagttagcaccacccgcattcgacatcttgctatcgagaacctgaatgaaaaccgtagtggcttatcggatgccgacaagataacaaaacctgattttagtgtactatgcatgatattagtaccttatataatacgtagcttggagaaaaggccattcaccgtttctcattgttgggaggttctaaagaatgaagccaaatggttacacttggagcagggctcacaaaatattgatgtgctggtgaacaaaggtgtagggttttctccaagatgtcggatttgacactgaagaagattgagtattggaagaggtccgattgaacatttggcactgacattcaccaacttgttcaaatagaggaaaagaatatggaaatggagaaagagcgcatgtatgcatgtgtaggtcagggagtggctcggatcagccttgagtcaatttccactgcgttttcttcggttatggatgagcacgaggagtaaaagaaacagaagaaggctgagtgtgattctcatatgcttattttcttgtcctgtgtaatggatgtgtgtatgtgaaccatatgcgaacttaaacgtctttgtttgtaccggtcaggccattctgagtgagggttccgtctcttctttttaggactccactgcgaggtgtcggtgtgtgagaaatggtgcaaacgtgtgtatgaaactctacgaggcatactcttatctagtattgtgtctagtgaagaatgggacacatccgatgctactgtaaactcacttgttgcactcactttttgagttggatttttctttcaaacttttttgtatgctctcttgagtttatctaacactagatttcataagtgtgcaccattgtccataactagactcacttaggtaaagctatccattccatgtcctctttataatgtgacataaataaggattttatcact

SEQ ID NO: 42347 - DNA, 3691 bp, Zea Mays
ctctgcccccgccgtacgccccacgccctcctccccgcgaggagccaccagcccaccatctacgccgcctgttctgatgccgccgcccacgcgaggccgaggccgaggccgtggccgcggccgcgggcgcgggcgcggtcgcggtcgcgggaggccaagtaaggacaccgttgctgaggactccgcgcacgccaccgaggaaagtggcgaggaaaacctccaggagaaggtgcaggaaggtggcaaggtaaacctcacggagaaggtgcaggaaggtggcgaggaaaacctcacggagaaggtgcaggaaggtggcgaggaaaacctcacggaaaaggagaatgaagggatagtggaggtctcaaaacccccccaaaggcgtcggaaggatcctgttgcagacccctcttctcttgagtctagtggtttcatgcgatttcgggagaggaggaatgcttcagcggttcaggagcaggggcctaagaagagaaggattactgaggattcaaacatgtgccatcagtgccagaggaatgatagcggaagagttgtacggtgccaaggctgtgtcgtccgaaaaagaaaatacagatattgtgtgaagtgcattaaacgctggtatccacatttatcagaggatgattttgcgaacaattgcccagtttgtcaaaataattgcaattgtaaggcttgtctgcggggagacataacccgatctggaggatatagtgtgtctgaacaagataaaattaaattctcaatgcgtatcgtgcactttttgcttccttggctgaaacaattccatcaagagcagatgcaagagaaaagtgccgaggctgcaactaaaggtattgatgcagacaaactggaggtccctctaaccatttgtggaaaaaaggaacgtatatactgcaacaactgcaggacatctattgttgacttccacagaacctgcaataaatgtaactatgatctctgtctccagtgctgccaggagcttcgtcgaggccttgtttctggtaatgatgccaaggttgatggtggaggcaagcaagattttctatcgggagttagtcatgataaaatcataagcaaagggccatccgatggacagaatgacatgttgatagatagtgtagttcctggtgaaaacaacacttctagcttgagacagtggagtgtgaataaagatggaaccataccttgcccaccaaatgcatttggtggttgtgggagctctcttcttgaactgaagtgcttgtttaaagagaagtttattgctgaattactggagaaagctaattcagcgctcaataatgaaatggaggtgaagatagaaggatcaaaatgtccctgcttcactgaatccggtgacatggatgatggtatatcacggaaatcatcttgcagggagaattcctgtgataactacatatattgcccaaccgctacagatgtccaaaatggaagtttagaccatttccaggagcattggttgaagggtgaacctgtaattgtccgtgatacacttgcgttgacttctggattaagctgggaaccgatggttatgtggcgtgccttacgagaaaagaaagagaaagttgagaggctctcagttcttgctcttgaatgcttgggttggtgtgaggtcaatatcctcacacatactgatgaaataaaactcaaagcaaaaaggattgccgcggtggaaaagaagaagcggtgtttaggaatgaagattctatctaccaaggaagcaagtggaggccttcaacggtgtgcagattattttggtatgccaacagctcccagtgaatctaacaaggagccaaggcctgaagagtgtgtaaatgaactgggcattaaacaaccagtacagcatgttgcttccgaggagcaggaaggagttcaagatgatgccaaggcagatgcaaatgttatgaatgtttcttttggtaagggaaaatcagaagattcttttggtacaattaatggtaccaacagtggagataaaatagaatctcctagtggtttagcagaaagaacattgactcagcctaccactaagggttgcagtaagcagcgtggccgtagttctaatggtagaggaaacaggactaaaaaaatagaagaggggaatgcgtctggactaattgctgtggctcccgagtcagaagatgatgatgatgatgccgcatttatagatggaaaccaagcagagggtggtgcactgtgggatatttttcgacgggaagatgtgagcaaactgcatgattatctaatgaagcatgcacatgagtttagacattgcaactttgagccagtgaagcaggttactcatcctatacatgatcagtgtttttatctaacaattgagcacaagagaaagcttaaggaagaatatggagtcgagccttggacatttgaacagaagctaggtgaggcagtatttatcccggcaggatgtccccaccaggttagaaatttgaagtcttgcataaaggttgcactagattttgtttctccggaaaatgtccgagagtgcatcaggttaacagaaggtttccgtctgctgccgaagtggcataaggtgaatgaagataaactggaggttaagaagatagctcttcatgcattcaatcaagctattaaagatatcactgatgaatcatctaatagcaatgaaagcaaatggatccggagataatgaggatcatgaaggccattgaatccatgcttgatgtcatggaagttagcaccacccgcattcgacatcttgctatcgagaacctgaatgaaaaccgtagtggcttatcggatgccgacaagataacaaaacctgattttagtgtactatgcatgatattagtaccttatataatacgtagcttggagaaaaggccattcaccgtttctcattgttgggaggttctaaagaatgaagccaaatggttacacttggagcagggctcacaaaatattgatgtgctggtgaacaaaggtgtagggttttctccaagatgtcggatttgacactgaagaagattgagtattggaagaggtccgattgaacatttggcactgacattcaccaacttgttcaaatagaggaaaagaatatggaaatggagaaagagcgcatgtatgcatgtgtaggtcagggagtggctcggatcagccttgagtcaatttccactgcgttttcttcggttatggatgagcacgaggagtaaaagaaacagaagaaggctgagtgtgattctcatatgcttattttcttgtcctgtgtaatggatgtgtgtatgtgaaccatatgcgaacttaaacgtctttgtttgtaccggtcaggccattctgagtgagggttccgtctcttctttttaggactccactgcgaggtgtcggtgtgtgagaaatggtgcaaacgtgtgtatgaaactctacgaggcatactcttatctagtattgtgtctagtgaagaatgggacacatccgatgctactgtaaactcacttgttgcactcactttttgagttggatttttctttcaaacttttttgtatgctctcttgagtttatctaacactagatttcataagtgtgcaccattgtccataactagactcacttaggtaaagctatccattccatgtcctctttataatgtgacataaataaggattttatcact

SEQ ID NO: 42348 - DNA, 4159 bp, Zea Mays
caatcccgctattgtttcgcgtggcggggagataagctggctcatccacacgtggttcctactaatttccaatcccagcaaactacacctgccgctgcttggggctgcttccgccgccgccgctcgatctagttcgttgagcatggctgcggaggcactgggagctatgcgttcccgttaccgcagtgcggctattgagccccttcgattacgattgagcaacccatctgattctggttgcggaagatacgtgtttcgaaatttgatttccgctatgctactagcatatatgcatatggaaagtggcgaggaaaacctccaggagaaggtgcaggaaggtggcaaggtaaacctcacggagaaggtgcaggaaggtggcgaggaaaacctcacggagaaggtgcaggaaggtggcgaggaaaacctcacggaaaaggagaatgaagggatagtggaggtctcaaaacccccccaaaggcgtcggaaggatcctgttgcagacccctcttctcttgagtctagtggtttcatgcgatttcgggagaggaggaatgcttcagcggttcaggagcaggggcctaagaagagaaggattactgaggattcaaacatgtgccatcagtgccagaggaatgatagcggaagagttgtacggtgccaaggctgtgtcgtccgaaaaagaaaatacagatattgtgtgaagtgcattaaacgctggtatccacatttatcagaggatgattttgcgaacaattgcccagtttgtcaaaataattgcaattgtaaggcttgtctgcggggagacataacccgagccaactcgaggaaaaaaaagaagttactgcaaataaattctggaggatatagtgtgtctgaacaagataaaattaaattctcaatgcgtatcgtgcactttttgcttccttggctgaaacaattccatcaagagcagatgcaagagaaaagtgccgaggctgcaactaaaggtattgatgcagacaaactggaggtccctctaaccatttgtggaaaaaaggaacgtatatactgcaacaactgcaggacatctattgttgacttccacagaacctgcaataaatgtaactatgatctctgtctccagtgctgccaggagcttcgtcgaggccttgtttctggtaatgatgccaaggttgatggtggaggcaagcaagattttctatcgggagttagtcatgataaaatcataagcaaagggccatccgatggacagaatgacatgttgatagatagtgtagttcctggtgaaaacaacacttctagcttgagacagtggagtgtgaataaagatggaaccataccttgcccaccaaatgcatttggtggttgtgggagctctcttcttgaactgaagtgcttgtttaaagagaagtttattgctgaattactggagaaagctaattcagcgctcaataatgaaatggaggtgaagatagaaggatcaaaatgtccctgcttcactgaatccggtgacatggatgatggtatatcacggaaatcatcttgcagggagaattcctgtgataactacatatattgcccaaccgctacagatgtccaaaatggaagtttagaccatttccaggagcattggttgaagggtgaacctgtaattgtccgtgatacacttgcgttgacttctggattaagctgggaaccgatggttatgtggcgtgccttacgagaaaagaaagagaaagttgagaggctctcagttcttgctcttgaatgcttgggttggtgtgaggtcgatgtaaatattcatatgttttttgcggggtattcaagtgggcttgttggtccagacgatttgcccctgttgcttaagcttaaagattggccaccacatagttcttttgaggagcggctcccaaggcatggtgcagagtttatgtctgcattgccatttcgtgaatacactgatcctaaatggggacctcttaatctggcagtaaagcttcccgataatgttaataagccagaccttggtccaaagacttatattgcatacggtgtttccaaagagttgggaattggtgattctgtcaccaagcttcactgtgatatgtctgatgcggtcaatatcctcacacatactgatgaaataaaactcaaagcaaaaaggattgccgcggtggaaaagaagaagcggtgtttaggaatgaagattctatctaccaaggaagcaagtggaggccttcaacggtgtgcagattattttggtatgccaacagctcccagtgaatctaacaaggagccaaggcctgaagagtgtgtaaatgaactgggcattaaacaaccagtacagcatgttgcttccgaggagcaggaaggagttcaagatgatgccaaggcagatgcaaatgttatgaatgtttcttttggtaagggaaaatcagaagattcttttggtacaattaatggtaccaacagtggagataaaatagaatctcctagtggtttagcagaaagaacattgactcagcctaccactaagggttgcagtaagcagcgtggccgtagttctaatggtagaggaaacaggactaaaaaaatagaagaggggaatgcgtctggactaattgctgtggctcccgagtcagaagatgatgatgatgatgccgcatttatagatggaaaccaagcagagggtggtgcactgtgggatatttttcgacgggaagatgtgagcaaactgcatgattatctaatgaagcatgcacatgagtttagacattgcaactttgagccagtgaagcaggttactcatcctatacatgatcagtgtttttatctaacaattgagcacaagagaaagcttaaggaagaatatggagtcgagccttggacatttgaacagaagctaggtgaggcagtatttatcccggcaggatgtccccaccaggttagaaatttgaagtcttgcataaaggttgcactagattttgtttctccggaaaatgtccgagagtgcatcaggttaacagaaggtttccgtctgctgccgaagtggcataaggtgaatgaagataaactggaggttaagaagatagctcttcatgcattcaatcaagctattaaagatatcactgatgaatcatctaatagcaatgaaagcaaatggatccggagataatgaggatcatgaaggccattgaatccatgcttgatgtcatggaagttagcaccacccgcattcgacatcttgctatcgagaacctgaatgaaaaccgtagtggcttatcggatgccgacaagataacaaaacctgattttagtgtactatgcatgatattagtaccttatataatacgtagcttggagaaaaggccattcaccgtttctcattgttgggaggttctaaagaatgaagccaaatggttacacttggagcagggctcacaaaatattgatgtgctggtgaacaaaggtgtagggttttctccaagatgtcggatttgacactgaagaagattgagtattggaagaggtccgattgaacatttggcactgacattcaccaacttgttcaaatagaggaaaagaatatggaaatggagaaagagcgcatgtatgcatgtgtaggtcagggagtggctcggatcagccttgagtcaatttccactgcgttttcttcggttatggatgagcacgaggagtaaaagaaacagaagaaggctgagtgtgattctcatatgcttattttcttgtcctgtgtaatggatgtgtgtatgtgaaccatatgcgaacttaaacgtctttgtttgtaccggtcaggccattctgagtgagggttccgtctcttctttttaggactccactgcgaggtgtcggtgtgtgagaaatggtgcaaacgtgtgtatgaaactctacgaggcatactcttatctagtattgtgtctagtgaagaatgggacacatccgatgctactgtaaactcacttgttgcactcactttttgagttggatttttctttcaaacttttttgtatgctctcttgagtttatctaacactagatttcataagtgtgcaccattgtccataactagactcacttaggtaaagctatccattccatgtcctctttataatgtgacataaataaggattttatcact

SEQ ID NO: 42349 - DNA, 3978 bp, Zea Mays
atggctgcggaggcactgggagctatgcgttcccgttaccgcagtgcggctattgagccccttcgattacgattgagcaacccatctgattctggttgcggaagatacgtgtttcgaaatttgatttccgctatgctactagcatatatgcatatggaaagtggcgaggaaaacctccaggagaaggtgcaggaaggtggcaaggtaaacctcacggagaaggtgcaggaaggtggcgaggaaaacctcacggagaaggtgcaggaaggtggcgaggaaaacctcacggaaaaggagaatgaagggatagtggaggtctcaaaacccccccaaaggcgtcggaaggatcctgttgcagacccctcttctcttgagtctagtggtttcatgcgatttcgggagaggaggaatgcttcagcggttcaggagcaggggcctaagaagagaaggattactgaggattcaaacatgtgccatcagtgccagaggaatgatagcggaagagttgtacggtgccaaggctgtgtcgtccgaaaaagaaaatacagatattgtgtgaagtgcattaaacgctggtatccacatttatcagaggatgattttgcgaacaattgcccagtttgtcaaaataattgcaattgtaaggcttgtctgcggggagacataacccgatctggaggatatagtgtgtctgaacaagataaaattaaattctcaatgcgtatcgtgcactttttgcttccttggctgaaacaattccatcaagagcagatgcaagagaaaagtgccgaggctgcaactaaaggtattgatgcagacaaactggaggtccctctaaccatttgtggaaaaaaggaacgtatatactgcaacaactgcaggacatctattgttgacttccacagaacctgcaataaatgtaactatgatctctgtctccagtgctgccaggagcttcgtcgaggccttgtttctggtaatgatgccaaggttgatggtggaggcaagcaagattttctatcgggagttagtcatgataaaatcataagcaaagggccatccgatggacagaatgacatgttgatagatagtgtagttcctggtgaaaacaacacttctagcttgagacagtggagtgtgaataaagatggaaccataccttgcccaccaaatgcatttggtggttgtgggagctctcttcttgaactgaagtgcttgtttaaagagaagtttattgctgaattactggagaaagctaattcagcgctcaataatgaaatggaggtgaagatagaaggatcaaaatgtccctgcttcactgaatccggtgacatggatgatggtatatcacggaaatcatcttgcagggagaattcctgtgataactacatatattgcccaaccgctacagatgtccaaaatggaagtttagaccatttccaggagcattggttgaagggtgaacctgtaattgtccgtgatacacttgcgttgacttctggattaagctgggaaccgatggttatgtggcgtgccttacgagaaaagaaagagaaagttgagaggctctcagttcttgctcttgaatgcttgggttggtgtgaggtcgatgtaaatattcatatgttttttgcggggtattcaagtgggcttgttggtccagacgatttgcccctgttgcttaagcttaaagattggccaccacatagttcttttgaggagcggctcccaaggcatggtgcagagtttatgtctgcattgccatttcgtgaatacactgatcctaaatggggacctcttaatctggcagtaaagcttcccgataatgttaataagccagaccttggtccaaagacttatattgcatacggtgtttccaaagagttgggaattggtgattctgtcaccaagcttcactgtgatatgtctgatgcggtcaatatcctcacacatactgatgaaataaaactcaaagcaaaaaggattgccgcggtggaaaagaagaagcggtgtttaggaatgaagattctatctaccaaggaagcaagtggaggccttcaacggtgtgcagattattttggtatgccaacagctcccagtgaatctaacaaggagccaaggcctgaagagtgtgtaaatgaactgggcattaaacaaccagtacagcatgttgcttccgaggagcaggaaggagttcaagatgatgccaaggcagatgcaaatgttatgaatgtttcttttggtaagggaaaatcagaagattcttttggtacaattaatggtaccaacagtggagataaaatagaatctcctagtggtttagcagaaagaacattgactcagcctaccactaagggttgcagtaagcagcgtggccgtagttctaatggtagaggaaacaggactaaaaaaatagaagaggggaatgcgtctggactaattgctgtggctcccgagtcagaagatgatgatgatgatgccgcatttatagatggaaaccaagcagagggtggtgcactgtgggatatttttcgacgggaagatgtgagcaaactgcatgattatctaatgaagcatgcacatgagtttagacattgcaactttgagccagtgaagcaggttactcatcctatacatgatcagtgtttttatctaacaattgagcacaagagaaagcttaaggaagaatatggagtcgagccttggacatttgaacagaagctaggtgaggcagtatttatcccggcaggatgtccccaccaggttagaaatttgaagtcttgcataaaggttgcactagattttgtttctccggaaaatgtccgagagtgcatcaggttaacagaaggtttccgtctgctgccgaagtggcataaggtgaatgaagataaactggaggttaagaagatagctcttcatgcattcaatcaagctattaaagatatcactgatgaatcatctaatagcaatgaaagcaaatggatccggagataatgaggatcatgaaggccattgaatccatgcttgatgtcatggaagttagcaccacccgcattcgacatcttgctatcgagaacctgaatgaaaaccgtagtggcttatcggatgccgacaagataacaaaacctgattttagtgtactatgcatgatattagtaccttatataatacgtagcttggagaaaaggccattcaccgtttctcattgttgggaggttctaaagaatgaagccaaatggttacacttggagcagggctcacaaaatattgatgtgctggtgaacaaaggtgtagggttttctccaagatgtcggatttgacactgaagaagattgagtattggaagaggtccgattgaacatttggcactgacattcaccaacttgttcaaatagaggaaaagaatatggaaatggagaaagagcgcatgtatgcatgtgtaggtcagggagtggctcggatcagccttgagtcaatttccactgcgttttcttcggttatggatgagcacgaggagtaaaagaaacagaagaaggctgagtgtgattctcatatgcttattttcttgtcctgtgtaatggatgtgtgtatgtgaaccatatgcgaacttaaacgtctttgtttgtaccggtcaggccattctgagtgagggttccgtctcttctttttaggactccactgcgaggtgtcggtgtgtgagaaatggtgcaaacgtgtgtatgaaactctacgaggcatactcttatctagtattgtgtctagtgaagaatgggacacatccgatgctactgtaaactcacttgttgcactcactttttgagttggatttttctttcaaacttttttgtatgctctcttgagtttatctaacactagatttcataagtgtgcaccattgtccataactagactcacttaggtaaagctatccattccatgtcctctttataatgtgacataaataaggattttatcact

SEQ ID NO: 42350 - DNA, 2068 bp, Zea Mays
atgttctcaaaggcagaaaatgaaggtcaatatcctcacacatactgatgaaataaaactcaaagcaaaaaggattgccgcggtggaaaagaagaagcggtgtttaggaatgaagattctatctaccaaggaagcaagtggaggccttcaacggtgtgcagattattttggtatgccaacagctcccagtgaatctaacaaggagccaaggcctgaagagtgtgtaaatgaactgggcattaaacaaccagtacagcatgttgcttccgaggagcaggaaggagttcaagatgatgccaaggcagatgcaaatgttatgaatgtttcttttggtaagggaaaatcagaagattcttttggtacaattaatggtaccaacagtggagataaaatagaatctcctagtggtttagcagaaagaacattgactcagcctaccactaagggttgcagtaagcagcgtggccgtagttctaatggtagaggaaacaggactaaaaaaatagaagaggggaatgcgtctggactaattgctgtggctcccgagtcagaagatgatgatgatgatgccgcatttatagatggaaaccaagcagagggtggtgcactgtgggatatttttcgacgggaagatgtgagcaaactgcatgattatctaatgaagcatgcacatgagtttagacattgcaactttgagccagtgaagcaggttactcatcctatacatgatcagtgtttttatctaacaattgagcacaagagaaagcttaaggaagaatatggagtcgagccttggacatttgaacagaagctaggtgaggcagtatttatcccggcaggatgtccccaccaggttagaaatttgaagtcttgcataaaggttgcactagattttgtttctccggaaaatgtccgagagtgcatcaggttaacagaaggtttccgtctgctgccgaagtggcataaggtgaatgaagataaactggaggttaagaagatagctcttcatgcattcaatcaagctattaaagatatcactgatgaatcatctaatagcaatgaaagcaaatggatccggagataatgaggatcatgaaggccattgaatccatgcttgatgtcatggaagttagcaccacccgcattcgacatcttgctatcgagaacctgaatgaaaaccgtagtggcttatcggatgccgacaagataacaaaacctgattttagtgtactatgcatgatattagtaccttatataatacgtagcttggagaaaaggccattcaccgtttctcattgttgggaggttctaaagaatgaagccaaatggttacacttggagcagggctcacaaaatattgatgtgctggtgaacaaaggtgtagggttttctccaagatgtcggatttgacactgaagaagattgagtattggaagaggtccgattgaacatttggcactgacattcaccaacttgttcaaatagaggaaaagaatatggaaatggagaaagagcgcatgtatgcatgtgtaggtcagggagtggctcggatcagccttgagtcaatttccactgcgttttcttcggttatggatgagcacgaggagtaaaagaaacagaagaaggctgagtgtgattctcatatgcttattttcttgtcctgtgtaatggatgtgtgtatgtgaaccatatgcgaacttaaacgtctttgtttgtaccggtcaggccattctgagtgagggttccgtctcttctttttaggactccactgcgaggtgtcggtgtgtgagaaatggtgcaaacgtgtgtatgaaactctacgaggcatactcttatctagtattgtgtctagtgaagaatgggacacatccgatgctactgtaaactcacttgttgcactcactttttgagttggatttttctttcaaacttttttgtatgctctcttgagtttatctaacactagatttcataagtgtgcaccattgtccataactagactcacttaggtaaagctatccattccatgtcctctttataatgtgacataaataaggattttatcact

SEQ ID NO: 42351 - DNA, 2956 bp, Zea Mays
gttttatctctttttatgtgtttccctgtttcgtcgtttttcggttctcctttgtctcccttttcttttctttgggggttgagctctgaggttttcatatgaggtttcatttctagcctaccccaacgtgcttgggacaaaaggctttgttgttgttgttgttgttgattggcgcaattccaaagcgggtaatcaactgtaggacagttcatgaagcaattgttagtgcctaatggatttctgatatcagaggagctttgtcagtgggggttttgacagattaccttcagctttggcctttgggatttgatatctggcatcgagctgcagccggaggttgacgacaagcatatcttcagtattgccccaaatggtgtgtactcagccaaatcagcatatgaaggtctgtttctgggatctgagacatttggacactataaaagaatatggaaatcttgggcattgccaaaatatcgtttcttcctttggttggttgcccataagagatgttggacaactgatagattggcaaagcgaggcctgaatcatccagagaaatgtcttctatgtgatcaagaggaagaaaatatggaccacctccttgtgcaatgttccttctcacgggaattctggtaccttttactcaggaaattcggtcttcactctcttgcaccatagctgactgtaaactctttcctgggatggtgggaagtggtgggaggagcagtccttggtctcacaaaaaaggccttaactcatcattttgggagcttggactttatggaatcatcgaaataaatgcatttttgatggctgcaatacaagtatgtccttatgtctcagagctgctgatgaggaaagaagatgggaagtagctggggcaaaaggcctcgctcatttggctgcacccttggtcaatatcctcacacatactgatgaaataaaactcaaagcaaaaaggattgccgcggtggaaaagaagaagcggtgtttaggaatgaagattctatctaccaaggaagcaagtggaggccttcaacggtgtgcagattattttggtatgccaacagctcccagtgaatctaacaaggagccaaggcctgaagagtgtgtaaatgaactgggcattaaacaaccagtacagcatgttgcttccgaggagcaggaaggagttcaagatgatgccaaggcagatgcaaatgttatgaatgtttcttttggtaagggaaaatcagaagattcttttggtacaattaatggtaccaacagtggagataaaatagaatctcctagtggtttagcagaaagaacattgactcagcctaccactaagggttgcagtaagcagcgtggccgtagttctaatggtagaggaaacaggactaaaaaaatagaagaggggaatgcgtctggactaattgctgtggctcccgagtcagaagatgatgatgatgatgccgcatttatagatggaaaccaagcagagggtggtgcactgtgggatatttttcgacgggaagatgtgagcaaactgcatgattatctaatgaagcatgcacatgagtttagacattgcaactttgagccagtgaagcaggttactcatcctatacatgatcagtgtttttatctaacaattgagcacaagagaaagcttaaggaagaatatggagtcgagccttggacatttgaacagaagctaggtgaggcagtatttatcccggcaggatgtccccaccaggttagaaatttgaagtcttgcataaaggttgcactagattttgtttctccggaaaatgtccgagagtgcatcaggttaacagaaggtttccgtctgctgccgaagtggcataaggtgaatgaagataaactggaggttaagaagatagctcttcatgcattcaatcaagctattaaagatatcactgatgaatcatctaatagcaatgaaagcaaatggatccggagataatgaggatcatgaaggccattgaatccatgcttgatgtcatggaagttagcaccacccgcattcgacatcttgctatcgagaacctgaatgaaaaccgtagtggcttatcggatgccgacaagataacaaaacctgattttagtgtactatgcatgatattagtaccttatataatacgtagcttggagaaaaggccattcaccgtttctcattgttgggaggttctaaagaatgaagccaaatggttacacttggagcagggctcacaaaatattgatgtgctggtgaacaaaggtgtagggttttctccaagatgtcggatttgacactgaagaagattgagtattggaagaggtccgattgaacatttggcactgacattcaccaacttgttcaaatagaggaaaagaatatggaaatggagaaagagcgcatgtatgcatgtgtaggtcagggagtggctcggatcagccttgagtcaatttccactgcgttttcttcggttatggatgagcacgaggagtaaaagaaacagaagaaggctgagtgtgattctcatatgcttattttcttgtcctgtgtaatggatgtgtgtatgtgaaccatatgcgaacttaaacgtctttgtttgtaccggtcaggccattctgagtgagggttccgtctcttctttttaggactccactgcgaggtgtcggtgtgtgagaaatggtgcaaacgtgtgtatgaaactctacgaggcatactcttatctagtattgtgtctagtgaagaatgggacacatccgatgctactgtaaactcacttgttgcactcactttttgagttggatttttctttcaaacttttttgtatgctctcttgagtttatctaacactagatttcataagtgtgcaccattgtccataactagactcacttaggtaaagctatccattccatgtcctctttataatgtgacataaataaggattttatcact

SEQ ID NO: 42352 - DNA, 2329 bp, Zea Mays
tccttctcacgggaattctggtaccttttactcaggaaattcggtcttcactctcttgcaccatagctgactgtaaactctttcctgggatggtgggaagtggtgggaggagcagtccttggtctcacaaaaaaggccttaactcatcattttgggagcttggactttatggaatcatcgaaataaatgcatttttgatggctgcaatacaagtatgtccttatgtctcagagctgctgatgaggaaagaagatgggaagtagctggggcaaaaggcctcgctcatttggctgcacccttggtcaatatcctcacacatactgatgaaataaaactcaaagcaaaaaggattgccgcggtggaaaagaagaagcggtgtttaggaatgaagattctatctaccaaggaagcaagtggaggccttcaacggtgtgcagattattttggtatgccaacagctcccagtgaatctaacaaggagccaaggcctgaagagtgtgtaaatgaactgggcattaaacaaccagtacagcatgttgcttccgaggagcaggaaggagttcaagatgatgccaaggcagatgcaaatgttatgaatgtttcttttggtaagggaaaatcagaagattcttttggtacaattaatggtaccaacagtggagataaaatagaatctcctagtggtttagcagaaagaacattgactcagcctaccactaagggttgcagtaagcagcgtggccgtagttctaatggtagaggaaacaggactaaaaaaatagaagaggggaatgcgtctggactaattgctgtggctcccgagtcagaagatgatgatgatgatgccgcatttatagatggaaaccaagcagagggtggtgcactgtgggatatttttcgacgggaagatgtgagcaaactgcatgattatctaatgaagcatgcacatgagtttagacattgcaactttgagccagtgaagcaggttactcatcctatacatgatcagtgtttttatctaacaattgagcacaagagaaagcttaaggaagaatatggagtcgagccttggacatttgaacagaagctaggtgaggcagtatttatcccggcaggatgtccccaccagtcttgcataaaggttgcactagattttgtttctccggaaaatgtccgagagtgcatcaggttaacagaaggtttccgtctgctgccgaagtggcataaggtgaatgaagataaactggaggttaagaagatagctcttcatgcattcaatcaagctattaaagatatcactgatgaatcatctaatagcaatgaaagcaaatggatccggagataatgaggatcatgaaggccattgaatccatgcttgatgtcatggaagttagcaccacccgcattcgacatcttgctatcgagaacctgaatgaaaaccgtagtggcttatcggatgccgacaagataacaaaacctgattttagtgtactatgcatgatattagtaccttatataatacgtagcttggagaaaaggccattcaccgtttctcattgttgggaggttctaaagaatgaagccaaatggttacacttggagcagggctcacaaaatattgatgtgctggtgaacaaaggtgtagggttttctccaagatgtcggatttgacactgaagaagattgagtattggaagaggtccgattgaacatttggcactgacattcaccaacttgttcaaatagaggaaaagaatatggaaatggagaaagagcgcatgtatgcatgtgtaggtcagggagtggctcggatcagccttgagtcaatttccactgcgttttcttcggttatggatgagcacgaggagtaaaagaaacagaagaaggctgagtgtgattctcatatgcttattttcttgtcctgtgtaatggatgtgtgtatgtgaaccatatgcgaacttaaacgtctttgtttgtaccggtcaggccattctgagtgagggttccgtctcttctttttaggactccactgcgaggtgtcggtgtgtgagaaatggtgcaaacgtgtgtatgaaactctacgaggcatactcttatctagtattgtgtctagtgaagaatgggacacatccgatgctactgtaaactcacttgttgcactcactttttgagttggatttttctttcaaacttttttgtatgctctcttgagtttatctaacactagatttcataagtgtgcaccattgtccataactagactcacttaggtaaagctatccattccatgtcctctttataatgtgacataaataaggattttatcact

SEQ ID NO: 42353 - DNA, 1804 bp, Zea Mays
ctccctcccacctccatccccatccccatcttccaccctcccttgctcactcatccacacaccccacgcttgcaatttgcaattcccttgtttggggtaacaagccaagcaagcaaacctcctgctggctgctgtccaacagcaacatgcaacaacccaagcaaatcaaagcttcaccatcaccatcaccgccgaggtcaggtcacctcagctttgctcagctccctagccagcagtaactgcccagtggaagtgcagagtggcctgtgagtactggcagtacaaatcacctcatctccagtcctgcccggctcgcctgccatgcagtccggctacggcggcgtgtccgagttccagcagttcatcatggacggcggctttgccatgtccgcgccgccgccgcctcagcagcagcagccacagaccgccaccgcccaggagctgggcgggcccttcaggtaccagccgctgcaccaccacgcgctgccgccgcagcaccaccaccacgcgccgcacatgccgccgcacttcgcccacttcggcggtcgtgcagccgcacgcgtcggcgtccttcttcgagcggctggtgcagcggctgatggagcaccaggagagcctccaccggcagttcctggaggccatggagcggcgcgagcgggaccgcgccgcgcgggacgaggcgtggcggcggcaggaggccgacaagttcgcccgcgaggccgccgcgcgcgcgcaggaccgcgccagcgccgcggcgcgggaggccgccatcatcgcctacctggagaagatctcgggcgagtccatcacgctgccgccgccggcgtccggcgacgaagacgcggcggcggccggaaaggagctggtgccgtacgaaggcggggacgcggcggcggcccccgagggtggcgggtcgctgcacctcagctcgtcgcggtggcccaagcacgaggtggaggcgctgatccgggtgcggacggggctggaggggcggttccaggagcccgggctcaagggcccgctgtgggaggaggtgagcgcgcgcatggcggcggcgggctacggccgcagcgccaagcgctgcaaggagaagtgggagaacatcaacaagtacttccgcaaggccaaggagagcggcaagaagcggccggcgcacgccaagacgtgcccctacttcgacgagctggaccgcctctactcccgcttgggccaggcaaagcaggcgagctcggagctgctggacgcggtggtcaagtaccccgacgtgcgctacggcccgccggggttcgggatggacagggagcaggcctccggcggcgggggcaataataataacactaataatgaaggtggacaggacggcggcgctgaggatttcgacggagaggaggacggcattggcaaggggagggccggcgatggtcaggacgacgaggtggaaagccatggccacgaggatgagtagctagctgcattgcattgcatgcatggcgccatggatgcgacgaccacaggacatacgatgcgagctgggcgccatctgtttaatttgttcgttcgttctttctttcttcttgctactaaatcagagtactactagcttttatcactaccttttgttattagctaccacctgcatgcatctgctgctgcttctagctagctgttattatgtatactactatatatgatatgatgatactactgttaatcactggtccaaggaatcattaaataatttgtacgatcaccattgcatattatatagctcctggagcagtgttttaattttagggaaattaaa

SEQ ID NO: 42354 - DNA, 1574 bp, Zea Mays
tgctaatgagcctaattccaaacaatccaaagggggaaggaactgctgccgccgcagcggaacaggtctgaacctccccttcgccggagacagccgcgacttcgcgagcggcatggtactgcctccccttcgccgacccaggaggctgcccggcggcggcgctctgccgcgacggccagggtttcctcgtcgcccgttgacgcgtccggctgctgattgatctgataaagaatggtatttagaaaaagctgtgttcctgatttttctgctgggcttcatccctcatgataggtgctgttatgctcatccgtttttttttgtggagatctttcttatcatttactttacaggatgattcatatctggagagagctagatcagtactattggagttgatttcaaaatccgcactgttgagcaaggtgtgaagacaataaagctgcagatttgggatactgctggccaacaagagcgttaggaccggcacaagcagaagcagctactaccgtggggctcatggcatattgttgtgacacttacccacggggtacgcgggtatgggtactgcacacccgacggggtacgcgggtatgggtactgcacacccgacggggtacgcgggtatgggtactgcacacccgaatccgtacctgctttacccgatgggtagaggtttccgcctaattgcgtatccgtgggttgtccggatgcagggataggaggcaagcccatccatggcctttcataggcctccagttgccactttactcgactgagcccatgggctagctctcacccgtggtcatgtaggatgtgtttggttggatgtataagtagggatggaggagtgcatgagccgcctccggagccgccacgacgctgacaaccgtggctggaacccgctccatgttgctgctcgcaagggagacctcaaggagggtgggcatgttaaaatcatggatgaactactggagcgtcgaaccaaaggggcttgcggctgtgagttgacgctagcttcctctgactcacttattgcctgcatttttagatagtaaagttgttgggtatgcacatttgcagtgtcattaatcatttttcatgatggagttgatgctgcttcttcatgaacagatctttcaagcatatgttgactcacttattacaagcatgcgaacaaataagcaggaagctagctagtttgcgcttcggagcaaggaaaggtatccgccttgtaggttcctcacgttggtgaagccctgcttatatgcagcacacgtacacaataaactcactcttataataaatatataaaaaaacaattagttgtaaatctaagatgagatagcactaggttaaggtaagcttaccgcgttgacgaggtctgcagtggcgagtttggaccggatgccagagcggcaaccctgttagttagttggtttggttagcggcaaatgaaatcaattaattactatgtatgaggcaggcattaccacaatcaagttttggtccttggcgtagagcgcggaaacctgttccacaaactggggattcttctccttcccatgcggagtgac

SEQ ID NO: 42355 - DNA, 1279 bp, Zea Mays
tgctaatgagcctaattccaaacaatccaaagggggaaggaactgctgccgccgcagcggaacaggtctgaacctccccttcgccggagacagccgcgacttcgcgagcggcatggtactgcctccccttcgccgacccaggaggctgcccggcggcggcgctctgccgcgacggccagggtttcctcgtcgcccgttgacgcgtccggctgctgattgatctgataaagaatgatctttcttatcatttactttacaggatgattcatatctggagagagctagatcagtactattggagttgatttcaaaatccgcactgttgagcaaggtgtgaagacaataaagctgcagatttgggatactgctggccaacaagagcgttaggaccggcacaagcagaagcagctactaccgtggggctcatggcatattgttgtgacacttacccacggggtacgcgggtatgggtactgcacacccgacggggtacgcgggtatgggtactgcacacccgacggggtacgcgggtatgggtactgcacacccgaatccgtacctgctttacccgatgggtagaggtttccgcctaattgcgtatccgtgggttgtccggatgcagggataggaggcaagcccatccatggcctttcataggcctccagttgccactttactcgactgagcccatgggctagctctcacccgtggtcatgtaggatgtgtttggttggatgtataagtagggatggaggagtgcatgagccgcctccggagccgccacgacgctgacaaccgtggctggaacccgctccatgttgctgctcgcaagggagacctcaaggaggtggtggtatatacaaatgggagaagaagaaaaaaaaaatagcaaataaaaggttgtatgcaaggcagattattgggctactccacgtggtacgaagaagatgaagatgagcgtgcggaccatcatggatggatagaaagcgactagactcgaccactaccagaatttgtctctgctttttctaaaaacactcatcaaactcagagtcgcaaaaaattcaattttttttttgtctatttctaaaaaacactctgtttggcactcggtaaagattttctttgccaagtgtcgaaaaaatcactcggcagcaacgaaccgaattctaataatgaacgccgctgggccaattgccaaatgtcattagggcttgtttccatagtggtgttatcaacttgactggtccaggtagcaataccaagcattggatttctt

SEQ ID NO: 42356 - DNA, 1431 bp, Zea Mays
tgctaatgagcctaattccaaacaatccaaagggggaaggaactgctgccgccgcagcggaacaggtctgaacctccccttcgccggagacagccgcgacttcgcgagcggcatggtactgcctccccttcgccgacccaggaggctgcccggcggcggcgctctgccgcgacggccagggtttcctcgtcgcccgttgacgcgtccggctgctgattgatctgataaagaatggtatttagaaaaagctgtgttcctgatttttctgctgggcttcatccctcatgataggtgctgttatgctcatccgtttttttttgtggagatctttcttatcatttactttacaggatgattcatatctggagagagctagatcagtactattggagttgatttcaaaatccgcactgttgagcaaggtgtgaagacaataaagctgcagatttgggatactgctggccaacaagagcgttaggaccggcacaagcagaagcagctactaccgtggggctcatggcatattgttgtgacacttacccacggggtacgcgggtatgggtactgcacacccgacggggtacgcgggtatgggtactgcacacccgacggggtacgcgggtatgggtactgcacacccgaatccgtacctgctttacccgatgggtagaggtttccgcctaattgcgtatccgtgggttgtccggatgcagggataggaggcaagcccatccatggcctttcataggcctccagttgccactttactcgactgagcccatgggctagctctcacccgtggtcatgtaggatgtgtttggttggatgtataagtagggatggaggagtgcatgagccgcctccggagccgccacgacgctgacaaccgtggctggaacccgctccatgttgctgctcgcaagggagacctcaaggagggtgggcatgttaaaatcatggatgaactactggagcgtcgaaccaaaggggcttgcggctgtggtggtatatacaaatgggagaagaagaaaaaaaaaatagcaaataaaaggttgtatgcaaggcagattattgggctactccacgtggtacgaagaagatgaagatgagcgtgcggaccatcatggatggatagaaagcgactagactcgaccactaccagaatttgtctctgctttttctaaaaacactcatcaaactcagagtcgcaaaaaattcaattttttttttgtctatttctaaaaaacactctgtttggcactcggtaaagattttctttgccaagtgtcgaaaaaatcactcggcagcaacgaaccgaattctaataatgaacgccgctgggccaattgccaaatgtcattagggcttgtttccatagtggtgttatcaacttgactggtccaggtagcaataccaagcattggatttctt

SEQ ID NO: 42357 - DNA, 1254 bp, Zea Mays
tgctaatgagcctaattccaaacaatccaaagggggaaggaactgctgccgccgcagcggaacaggtctgaacctccccttcgccggagacagccgcgacttcgcgagcggcatggtactgcctccccttcgccgacccaggaggctgcccggcggcggcgctctgccgcgacggccagggtttcctcgtcgcccgttgacgcgtccggctgctgattgatctgataaagaatggatgattcatatctggagagagctagatcagtactattggagttgatttcaaaatccgcactgttgagcaaggtgtgaagacaataaagctgcagatttgggatactgctggccaacaagagcgttaggaccggcacaagcagaagcagctactaccgtggggctcatggcatattgttgtgacacttacccacggggtacgcgggtatgggtactgcacacccgacggggtacgcgggtatgggtactgcacacccgacggggtacgcgggtatgggtactgcacacccgaatccgtacctgctttacccgatgggtagaggtttccgcctaattgcgtatccgtgggttgtccggatgcagggataggaggcaagcccatccatggcctttcataggcctccagttgccactttactcgactgagcccatgggctagctctcacccgtggtcatgtaggatgtgtttggttggatgtataagtagggatggaggagtgcatgagccgcctccggagccgccacgacgctgacaaccgtggctggaacccgctccatgttgctgctcgcaagggagacctcaaggaggtggtggtatatacaaatgggagaagaagaaaaaaaaaatagcaaataaaaggttgtatgcaaggcagattattgggctactccacgtggtacgaagaagatgaagatgagcgtgcggaccatcatggatggatagaaagcgactagactcgaccactaccagaatttgtctctgctttttctaaaaacactcatcaaactcagagtcgcaaaaaattcaattttttttttgtctatttctaaaaaacactctgtttggcactcggtaaagattttctttgccaagtgtcgaaaaaatcactcggcagcaacgaaccgaattctaataatgaacgccgctgggccaattgccaaatgtcattagggcttgtttccatagtggtgttatcaacttgactggtccaggtagcaataccaagcattggatttctt

SEQ ID NO: 42358 - DNA, 2910 bp, Zea Mays
aaggagagtaaattgattttttctcaaaaacaatatcatttcttcttagccaaagagcccaacaagtgcttgccgcccctagcaaaatgatgttcctaagattgtgctcaaacccctctagccagcttccaaacatattagaaacactagaaggtggagatatcccaaaggctaaaaaaattacaccccagaccctacgagcaaatcgatattcaaagaacaagtgcttaattatctctggcttatgacaaaagcaacaagatttgtttccatgccaattgtgtttggcaagattattcttagttaggattactcccctcctaaggtaccaaaggaaaactttgatctttagcggagcttttaatttccatagtcttttgtttagattgggcacctcatttttattaatgcttgataatgtgatttcacagagaactgcccggattgggtcagattccaatgaaaaacatcatcctcttgtgttaactgaatgttagcaatgcgctaacgaagttcattccactccgttagcctagatccaaataaagtacgtctccaagaaaaaatggtttcattatttgttagcacctcaacaatagttttaaattttgctcttgtgatgttatatagcctagggtactgatctttcaacccctgccctccaagccaggtatcttcccagaatctcacatgtgatccattttttattttgaaggttccaaaacatagaaaatcttgttttaccttcattaaactatacaaaaaatgtgagtctccggttttccaatcaacttcgactagaggtttagagcctagatatttgttcctaataagttgttgccaagtgtcgtccgatgttaaaagcttgaataaccatttgcttaggagcgttgtgttcttaatatttagatcatggatcccaaggccaccttggtctttgggctgacataagatagtccatctagcaaggcggtatttcttcttgctcttatctccttgccaaaagaaccgagagcgaaaatagtcaagttttctaagaacacctttaggaatagcgaaaaaagacatcatgtataacggaaggctgttgaacaccgagttaatcaatgtcagtctacctccaattgaaaggtgtttccctttccaactggctagtcttttttccacacgttcctctattatcttccaatctgagtttctaagctttttgaagtgtataggtagccctagatattttagaggaaaatccccatgtttgcagccaaacaattccaaataactctctaaagaatcttgggcatctccaaagcataatacttcactcttatggaaatttattttgagacctgagatttgttcaaaagcgcctaacaacaacttcatattacgagccttctctaagtcgttttccatgaaaatgatcgtatcatctgcatattgcagaatagataagcctccatcaattaagtgaggcactaccccactgacttgcccatgttctttagccctgttaatcaagatcgctagcatatctgctacgatgttgaacaggatgggaggcaggggatcgacttggcgtaatcccttctttgtttggaagaattttcccacgtcgtcgttgacattaaccgcaacactacctcccataatgaaggatctaacccaagaaatccacttgggcgcaaatcctttcatccgaagagtttggaataagaatggccatttgaccttgttgtatgccttctcaaaataaattttaagaataaccccacttagccttttcctatgcaactcatgaatggtttcgtgcagtatggcgactccctctaggatatttcgcccacgcatgtatgggcagactacaacatacacattgcatcacgtgttggttcacatgaattgtgcgcgtgcatcacacacaaataaacaccaaatacaataaaattgcactcgggccaagatgaactactacttggtctgggtgcgattttatatcaaaatatactgcccatcttaagctggtatgactgtcttcactctttaaaaatatgtgctcatattaagcccatatgtctgccttggaaattttactatcttaattcattctgaattatctgattctcaattctagttcctcatcaagtacttttgtcactggttatatacgactattttcctttatcttaccccttggtttcacgtgcttcaactaataaatatactgtatattctacacaaataaacaccatatacagctaaaccaaacacaccattattgctccagattccagaatgatattcatactgggcctttagaatgatatgtcctaggatatatattaacctttaatgttctctttttgtttctcttgttgctaccctaccccactccatctggctgctcagggtgggcatgttaaaatcatggatgaactactggagcgtcgaaccaaaggggcttgcggctatctttcaagcatatgttgactcacttattacaagcatgcgaacaaataagcaggaagctagctagtttgcgcttcggagcaaggaaaggtatccgccttgtaggttcctcacgttggtgaagccctgcttatatgcagcacacgtacacaataaactcactcttataataaatatataaaaaaacaattagttgtaaatctaagatgagatagcactaggttaaggtaagcttaccgcgttgacgaggtctgcagtggcgagtttggaccggatgccagagcggcaaccctgttagttagttggtttggttagcggcaaatgaaatcaattaattactatgtatgaggcaggcattaccacaatcaagttttggtccttggcgtagagcgcggaaacctgttccacaaactggggattcttctccttcccatgcggagtgac

SEQ ID NO: 42359 - DNA, 2899 bp, Zea Mays
aaggagagtaaattgattttttctcaaaaacaatatcatttcttcttagccaaagagcccaacaagtgcttgccgcccctagcaaaatgatgttcctaagattgtgctcaaacccctctagccagcttccaaacatattagaaacactagaaggtggagatatcccaaaggctaaaaaaattacaccccagaccctacgagcaaatcgatattcaaagaacaagtgcttaattatctctggcttatgacaaaagcaacaagatttgtttccatgccaattgtgtttggcaagattattcttagttaggattactcccctcctaaggtaccaaaggaaaactttgatctttagcggagcttttaatttccatagtcttttgtttagattgggcacctcatttttattaatgcttgataatgtgatttcacagagaactgcccggattgggtcagattccaatgaaaaacatcatcctcttgtgttaactgaatgttagcaatgcgctaacgaagttcattccactccgttagcctagatccaaataaagtacgtctccaagaaaaaatggtttcattatttgttagcacctcaacaatagttttaaattttgctcttgtgatgttatatagcctagggtactgatctttcaacccctgccctccaagccaggtatcttcccagaatctcacatgtgatccattttttattttgaaggttccaaaacatagaaaatcttgttttaccttcattaaactatacaaaaaatgtgagtctccggttttccaatcaacttcgactagaggtttagagcctagatatttgttcctaataagttgttgccaagtgtcgtccgatgttaaaagcttgaataaccatttgcttaggagcgttgtgttcttaatatttagatcatggatcccaaggccaccttggtctttgggctgacataagatagtccatctagcaaggcggtatttcttcttgctcttatctccttgccaaaagaaccgagagcgaaaatagtcaagttttctaagaacacctttaggaatagcgaaaaaagacatcatgtataacggaaggctgttgaacaccgagttaatcaatgtcagtctacctccaattgaaaggtgtttccctttccaactggctagtcttttttccacacgttcctctattatcttccaatctgagtttctaagctttttgaagtgtataggtagccctagatattttagaggaaaatccccatgtttgcagccaaacaattccaaataactctctaaagaatcttgggcatctccaaagcataatacttcactcttatggaaatttattttgagacctgagatttgttcaaaagcgcctaacaacaacttcatattacgagccttctctaagtcgttttccatgaaaatgatcgtatcatctgcatattgcagaatagataagcctccatcaattaagtgaggcactaccccactgacttgcccatgttctttagccctgttaatcaagatcgctagcatatctgctacgatgttgaacaggatgggaggcaggggatcgacttggcgtaatcccttctttgtttggaagaattttcccacgtcgtcgttgacattaaccgcaacactacctcccataatgaaggatctaacccaagaaatccacttgggcgcaaatcctttcatccgaagagtttggaataagaatggccatttgaccttgttgtatgccttctcaaaataaattttaagaataaccccacttagccttttcctatgcaactcatgaatggtttcgtgcagtatggcgactccctctaggatatttcgcccacgcatgtatgggcagactacaacatacacattgcatcacgtgttggttcacatgaattgtgcgcgtgcatcacacacaaataaacaccaaatacaataaaattgcactcgggccaagatgaactactacttggtctgggtgcgattttatatcaaaatatactgcccatcttaagctggtatgactgtcttcactctttaaaaatatgtgctcatattaagcccatatgtctgccttggaaattttactatcttaattcattctgaattatctgattctcaattctagttcctcatcaagtacttttgtcactggttatatacgactattttcctttatcttaccccttggtttcacgtgcttcaactaataaatatactgtatattctacacaaataaacaccatatacagctaaaccaaacacaccattattgctccagattccagaatgatattcatactgggcctttagaatgatatgtcctaggatatatattaacctttaatgttctctttttgtttctcttgttgctaccctaccccactccatctggctgctcagggtgggcatgttaaaatcatggatgaactactggagcgtcgaaccaaaggggcttgcggctgtggtggtatatacaaatgggagaagaagaaaaaaaaaatagcaaataaaaggttgtatgcaaggcagattattgggctactccacgtggtacgaagaagatgaagatgagcgtgcggaccatcatggatggatagaaagcgactagactcgaccactaccagaatttgtctctgctttttctaaaaacactcatcaaactcagagtcgcaaaaaattcaattttttttttgtctatttctaaaaaacactctgtttggcactcggtaaagattttctttgccaagtgtcgaaaaaatcactcggcagcaacgaaccgaattctaataatgaacgccgctgggccaattgccaaatgtcattagggcttgtttccatagtggtgttatcaacttgactggtccaggtagcaataccaagcattggatttctt

SEQ ID NO: 42360 - DNA, 2988 bp, Zea Mays
aaggagagtaaattgattttttctcaaaaacaatatcatttcttcttagccaaagagcccaacaagtgcttgccgcccctagcaaaatgatgttcctaagattgtgctcaaacccctctagccagcttccaaacatattagaaacactagaaggtggagatatcccaaaggctaaaaaaattacaccccagaccctacgagcaaatcgatattcaaagaacaagtgcttaattatctctggcttatgacaaaagcaacaagatttgtttccatgccaattgtgtttggcaagattattcttagttaggattactcccctcctaaggtaccaaaggaaaactttgatctttagcggagcttttaatttccatagtcttttgtttagattgggcacctcatttttattaatgcttgataatgtgatttcacagagaactgcccggattgggtcagattccaatgaaaaacatcatcctcttgtgttaactgaatgttagcaatgcgctaacgaagttcattccactccgttagcctagatccaaataaagtacgtctccaagaaaaaatggtttcattatttgttagcacctcaacaatagttttaaattttgctcttgtgatgttatatagcctagggtactgatctttcaacccctgccctccaagccaggtatcttcccagaatctcacatgtgatccattttttattttgaaggttccaaaacatagaaaatcttgttttaccttcattaaactatacaaaaaatgtgagtctccggttttccaatcaacttcgactagaggtttagagcctagatatttgttcctaataagttgttgccaagtgtcgtccgatgttaaaagcttgaataaccatttgcttaggagcgttgtgttcttaatatttagatcatggatcccaaggccaccttggtctttgggctgacataagatagtccatctagcaaggcggtatttcttcttgctcttatctccttgccaaaagaaccgagagcgaaaatagtcaagttttctaagaacacctttaggaatagcgaaaaaagacatcatgtataacggaaggctgttgaacaccgagttaatcaatgtcagtctacctccaattgaaaggtgtttccctttccaactggctagtcttttttccacacgttcctctattatcttccaatctgagtttctaagctttttgaagtgtataggtagccctagatattttagaggaaaatccccatgtttgcagccaaacaattccaaataactctctaaagaatcttgggcatctccaaagcataatacttcactcttatggaaatttattttgagacctgagatttgttcaaaagcgcctaacaacaacttcatattacgagccttctctaagtcgttttccatgaaaatgatcgtatcatctgcatattgcagaatagataagcctccatcaattaagtgaggcactaccccactgacttgcccatgttctttagccctgttaatcaagatcgctagcatatctgctacgatgttgaacaggatgggaggcaggggatcgacttggcgtaatcccttctttgtttggaagaattttcccacgtcgtcgttgacattaaccgcaacactacctcccataatgaaggatctaacccaagaaatccacttgggcgcaaatcctttcatccgaagagtttggaataagaatggccatttgaccttgttgtatgccttctcaaaataaattttaagaataaccccacttagccttttcctatgcaactcatgaatggtttcgtgcagtatggcgactccctctaggatatttcgcccacgcatgtatgggcagactacaacatacacattgcatcacgtgttggttcacatgaattgtgcgcgtgcatcacacacaaataaacaccaaatacaataaaattgcactcgggccaagatgaactactacttggtctgggtgcgattttatatcaaaatatactgcccatcttaagctggtatgactgtcttcactctttaaaaatatgtgctcatattaagcccatatgtctgccttggaaattttactatcttaattcattctgaattatctgattctcaattctagttcctcatcaagtacttttgtcactggttatatacgactattttcctttatcttaccccttggtttcacgtgcttcaactaataaatatactgtatattctacacaaataaacaccatatacagctaaaccaaacacaccattattgctccagattccagaatgatattcatactgggcctttagaatgatatgtcctaggatatatattaacctttaatgttctctttttgtttctcttgttgctaccctaccccactccatctggctgctcagggtgggcatgttaaaatcatggatgaactactggagcgtcgaaccaaaggggcttgcggctatctttcaagcatatgttgactcacttattacaagcatgcgaacaaataagcaggaagctagctagtttgcgcttcggagcaaggaaaggtggtggtatatacaaatgggagaagaagaaaaaaaaaatagcaaataaaaggttgtatgcaaggcagattattgggctactccacgtggtacgaagaagatgaagatgagcgtgcggaccatcatggatggatagaaagcgactagactcgaccactaccagaatttgtctctgctttttctaaaaacactcatcaaactcagagtcgcaaaaaattcaattttttttttgtctatttctaaaaaacactctgtttggcactcggtaaagattttctttgccaagtgtcgaaaaaatcactcggcagcaacgaaccgaattctaataatgaacgccgctgggccaattgccaaatgtcattagggcttgtttccatagtggtgttatcaacttgactggtccaggtagcaataccaagcattggatttctt

SEQ ID NO: 42361 - DNA, 6226 bp, Zea Mays
cttagtttacttttatactacaccgcaacaaataaaaacaaaacggaggtagtatatctcaaaaccttttttttatcagtttcatttttgcaagggcgggattcgaaatttgaagttcccttcccctcctcccgctagagtctggttgtgtgatccaggaaggggaagcgccgcccgctacgcttgatcaatagatccattcacccggggagattcccgaccgtgtgctcgtgtgtggagttgagttgtgatggaggccacctccccgcatcctcccaccaccatccgccggaacccaccccgccgcgcgaggcctcccccgaccccgctcgccggcgacaaatccaaaccctcccccctctcccgcctgctcgagggtgaagcagcgttcgccgcctccgttccctgtccaccgcaggaggagcgcctcaaggtgttcctccgcatccgccccctcccggaccgcgatcgaagccggccactccccgctgccaaggacccgcgccggaagcccaagcaggtcggagcccccggggagctctgcctcgcgcccgacggacccaactccgtcgtcctcaccgtcccgcggtctaagctagtcgaccccaagcgaggccgcaccgaggtcttcgacggcttctctgccgttttcccatccgactccacccagcatgatatcttcgcgcaagtcatgaacccactggtggatgacttcctgggcggaaagagtggccttctggttgcaatgggtcccacaggctctggaaagactcacaccatctttggttccccaaggaatcctggtatactacccctcacgctgaggagaatcttcaacgcacaaggcgaaagcaaggtttccaggaaaccaacgcggtcatttttcttctcgatgtttgagatattttctgagggaaaaggggaacgcattcttgacttactgtctgatactgtggagtgtgttcttcagcagtcagtgattaaaggtcttcaagaggtttccctttcaaatcctgcagatgctgagagcttggtttcacgtggtatgctaaagcgcagcacggctgcaacaaatgctaacagcaactcaagtcgatcacagtgcatcattactatacgtgcagacagtgaacatctacttagtagtgctgttctgaccatagcagaccttgctggcgcagaacgggaaaagagaactagaaatcaaggttcaaggctgttagaaagtaacttcatcaacaacacatccatggttttcagtctctgtttgaggtctctgttagaacatcagaaaaaccagaagaaacccttggaaaagcatttcaagaattccatgttgacaaggtacttaagagactacctagaaggaaggaagaaaatgactttgatcttgaatgtgaagccaggggatgatgattatttggatacatcatttttgcttagacaagcatctccttacatgaaaataaagtacactagtcttgatgattcttttgacctggcttcgcaaaagagaatcaatgtttccttgatttgccaagagaacaagaaaaaaaggaaggttcagaagcctgcagtccttgtggttgaacgaaaggaaaatgttgatacagatgatatttctaaagtttctgaaaaagatggcgtgcatcacgtgtctcttaacccagagatgccaagggtatccagaagcgaagcaataatgacaaactttgcaagggctttattgactgtattaagacaatataagcacaaacttttggagtccgagaatgctgttgaaagcatgaaagaattgattagagataaagatatcgaaatcatggagttgaaaaaggagctgaaggctgtaaggtattgttcatgcaagagttctccaataaatgaagatgactctgtggaccatgatgattcttcatcatttggtcaagctgctcagagtttagttaatatatcaaatcaagctgacctgggatctaatgatgcttcagaagataatttccatagttacaagcgcttcataaggaatcagataaatctgaaagttttactgtgccaacacctgcacccactggtggtgcaatgcctgcatctagttattcagatcaaagcttcacagggcaaagtgatgaagaaacggaagagctgagtaagatcacactagagaataaggatattcagcttgatatcaatataagagaagagaagcaccatgaatcttgtagctcttcacagcaagtgaactttgacacagaaggtacccgctctagtgaggcttccttgcttggaacggttggttctgaaaagaagcttgaggaactgaagcagaaatctggaagatgtgtgtctgctgtagaaaaggctaacgtggaactggagcatggtatagacggtggtcaagctctagacgaaaagtgtgatcatgcctcagcgaaagctgcaaaggctcctccaagcaagggcagggaggcagacgaaactgcggatacagataaggaagcttttggttctaggacagagaaaaccaggaggaggttacagccagctgctgctatgttgctcagggaattcactggcgctgacattgatgcggataacgaaagggaagaaagaggcagatcatcgtccagcgtggcaaccgggagatcagatgcgcttgttcaacttctgatgaaaggccgtccggcgcacggcgacgagtcgcgccagctccagtcgctcatgcagctctgcgagatgcgctccatcggctccgaggacttgctcgccgccttcgtcccaatcctcgtcgggatgctcggccagcctgccaccgctggtgccagcccaggcgtcatgctgctcgctgcgcgggcactagccaacctcgtttatgtgctcccctcctgctccgcgatctctgaggagcacgcacccaaccgcctgtttgcgagctggaatctgccggccgatgcttctgagtttgtcatggaagctgtcccatcgctcacgaatctcctaaaccaccatgattccaaggtactagagcatgcttctgtttgtttgacagtgacacgcattgctgaagcttttgcctattaccccgacgaacttgatgaactctgcaatcatggattagttgctcaagctgctagcttgatagctcttggcaactcctctggccaggaaccactgagtacatctacatatacaggcttaatccgtcttctctcaacatgtgcaagtggatccctgctggcagttaaaacactactacttcttgggatcagcggtactcttaaagatttcctttctggccctgctttgatttctggaacattagtcccccgtgctgtaacaaggcctgccgatcagatatttgagattgtgatccttgctgataatttgcttccgcatatgcctgcgataatcattgagttaccaacatactaccatgcatataaagactcttcaacaaataaatctgcttccatcaaacaagagggggctggttctacaggaaacgaaaagtctggcaatgagaggctattgcgtgaccaacctaagctcctagaacagttcggtatggatttgttacccacaatgacacaggtgtatggttctagtgtaaatgcaccaatacatcgcaagtgtttatcgatcattgggaagttaatgtactacagctccgctgagacagtccagtctctccttggcacaacaaacatatccaggcattcttgcatggaacgatcttcaagtgttgattcctgctcttcagatagcagaaataatgatggaaaagcttccagagacattttccaagttgtttgtgagggaaggtgtcgttcatgctgtggtgtcacttatatgtttggaatcctccaggctccaacacaatggctcgtcaggtgccacctcaggataaaggtaatgattctgccatgccatcacgtccgtcaacactggcgtgggggtgatgtggcagcagaaaatagttcagtagatgaatcgaatagttccaaccttggggttacatactcaacaacaatcgcttcagaagctctgaacaccagccttcatttcgtagttagtgaccatgcaaagtctttcaaagataaatatttcctgacagacactgattcaggtgatattggggttactgatgaccttcttaaactcagggcattctgagctatttttttggacatctcaattgatgtcgaagaacaattagacaaaataatatctgaaatgctctctgagcttagcaaagttaatggtgtttccacatttgagttcattaggagtggtgttaccacagcattgcttgactatttgtcctgtggaacatttgggaaggaaaaggtatctgaaagaaacctacctcagcttcgtcagcaggtccttagatgatacaagtcgttcgtatctgtttccctttctattgatcatgaacgggatgaaactgccatgacactgttggttaagaaactgcaaagtgcattgtgttcgctggaacgtttccctcttgtttcagccagtctagtaggattggtaatggagggtcccgtctgacttcaggtcttagtgctctggctcaacccttcaagcttcgtctgtccccagctcaaggtgaaaaaccacttcgggattattcatcaaatattgtgcttatcaatccatttgccagtttagcagctgttgaaggatttctttggcccagagttcaacacagtgaggttgcgtcaaagcctataattccatctggtaataattctgaatctgtggttcctggcaccatagctggtgcatcattagcaactgcaatggatcaatctggtcggcgtccaacaacaagatcaaagtcatctgctgcatggggtggtacatcaaagaaggattctcatgatgaaagcactactactgccaaaggaaaactaggtgattccaatgagtgtaacattggctcagccagttttagccaggtgcagccatcatctggttccggtgctagaaacacttctagcagaggacccgattctactgaatttcaaagtacgagcacattcgggtcatttgttgctgcgacgatggctgggctagcttctgttggtggtcgcagtgttataggtggttgagatcggtgtggtctgtcacttggaggaagcatgaatgaccacaataaacttgtatgtattcactgctggtggggagcagcttagcaaacatttgactgtatgtcaagctatccaacgtcgtcgacttatgcttgacgaggatgatgaagaagtgtttaatggatcttgtatacaaaacgatggaaaccactactgggatgatgttttcacaataacgtaccagaaggctgataaccaagggacttgcacctcattgaacataaaatcagattcttacaggtctatctctgaagcacaaggggtttctcttcttgatagcatcttgtgtgaaatccgaagtgtttgtcaatagcaattgtgtgaaatgcgggttccttgctcttgtttgtagattcagtcagaattgtcccctgagcagcagcatgcgtttctgccagtttgtaaccggggtttccacttggtggattggctgcccttagtcccaagcttactgtagttaggaaggtactatctactatctatcatggcatttgctattatggtaacttgatgttacttttgattatcgccagcacccttcaagtgctgcgaatacttcaaattcaactggggcaacagagtctgctgctgctgctgctgctgatttgcctagtgtgatgacgtgcgccaattatgtgaagctgcccccgtactccacaaaagtatagcgtgcttgctgtttttggacattccgatgatgatccctgctgatggattattgctattgtttggacaggaaatcatgcgcgagaagctgctttatgcgatcctggaaggccgaggatcgtttcatttttcataagaatatccgaactaacttacaggtggccagttttatgctgttctttaacaggctcagcaaggtcggatgcaggtgctgctgtcgatttctcctttcttttgcatttgttcagctacaagtttctgtttccattgggcaggctaggccatagaggaagagcccccccccctcttccagtacatacatgtaaataaaatggatttttagaactggtgatgttgatccagaattgttaataaatgtggcccagtgtaccatttctacc

SEQ ID NO: 42362 - DNA, 2778 bp, Zea Mays
atttttgcaagggcgggattcgaaatttgaagttcccttcccctcctcccgctagagtctggttgtgtgatccaggaaggggaagcgccgcccgctacgcttgatcaatagatccattcacccggggagattcccgaccgtgtgctcgtgtgtggagttgagttgtgatggaggccacctccccgcatcctcccaccaccatccgccggaacccaccccgccgcgcgaggcctcccccgaccccgctcgccggcgacaaatccaaaccctcccccctctcccgcctgctcgagggtgaagcagcgttcgccgcctccgttccctgtccaccgcaggaggagcgcctcaaggtgttcctccgcatccgccccctcccggaccgcgatcgaagccggccactccccgctgccaaggacccgcgccggaagcccaagcaggtcggagcccccggggagctctgcctcgcgcccgacggacccaactccgtcgtcctcaccgtcccgcggtctaagctagtcgaccccaagcgaggccgcaccgaggtcttcgacggcttctctgccgttttcccatccgactccacccagcatgatatcttcgcgcaagtcatgaacccactggtggatgacttcctgggcggaaagagtggccttctggttgcaatgggtcccacaggctctggaaagactcacaccatctttggttccccaaggaatcctggtatactacccctcacgctgaggagaatcttcaacgcacaaggcgaaagcaaggtttccaggaaaccaacgcggtcatttttcttctcgatgtttgagatattttctgagggaaaaggggaacgcattcttgacttactgtctgatactgtggagtgtgttcttcagcagtcagtgattaaaggtcttcaagaggtttccctttcaaatcctgcagatgctgagagcttggtttcacgtggtatgctaaagcgcagcacggctgcaacaaatgctaacagcaactcaagtcgatcacagtgcatcattactatacgtgcagacagtgaacatctacttagtagtgctgttctgaccatagcagaccttgctggcgcagaacgggaaaagagaactagaaatcaaggttcaaggctgttagaaagtaacttcatcaacaacacatccatggttttcagtctctgtttgaggtctctgttagaacatcagaaaaaccagaagaaacccttggaaaagcatttcaagaattccatgttgacaaggtacttaagagactacctagaaggaaggaagaaaatgactttgatcttgaatgtgaagccaggggatgatgattatttggatacatcatttttgcttagacaagcatctccttacatgaaaataaagtacactagtcttgatgattcttttgacctggcttcgcaaaagagaatcaatgtttccttgatttgccaagagaacaagaaaaaaaggaaggttcagaagcctgcagtccttgtggttgaacgaaaggaaaatgttgatacagatgatatttctaaagtttctgaaaaagatggcgtgcatcacgtgtctcttaacccagagatgccaagggagtccgagaatgctgttgaaagcatgaaagaattgattagagataaagatatcgaaatcatggagttgaaaaaggagctgaaggctgtaaggtattgttcatgcaagagttctccaataaatgaagatgactctgtggaccatgatgattcttcatcatttggtcaagctgctcagagtttagttaatatatcaaatcaagctgacctgggatctaatgatgcttcagaagataatttccatgtagagttacaagcgcttcataaggaatcagataaatctgaaagttttactgtgccaacacctgcacccactggtggtgcaatgcctgcatctagttattcagatcaaagcttcacagaagatgatgcacttctgtgcctgaacactgaacaaacatctaccgtagggcaaagtgatgaagaaacggaagagctgagtaagatcacactagagaataaggatattcagcttgatatcaatataagagaagagaagcaccatgaatcttgtagctcttcacagcaagtgaactttgacacagaaggtacccgctctagtgaggcttccttgcttggaacggttggttctgaaaagaagcttgaggaactgaagcagaaatctggaagatgtgtgtctgctgtagaaaaggctaacgtggaactggagcatggtatagacggtggtcaagctctagacgaaaagtgtgatcatgcctcagcgaaagctgcaaaggctcctccaagcaagggcagggaggcagacgaaactgcggatacagataaggaagcttttggttctaggacagagaaaaccaggaggaggttacagccagctgctgctatgttgctcagggaattcactggcgctgacattgatgcggataacgaaagggaagaaagaggcagatcatcgtccagcgtggcaaccgggagatcagatgcgcttgttcaacttctgatgaaaggccgtccggtccgtggattagcttcatgatagccggcaccgcatgacgtgacacatattatactgtttggttcagctttttttacctgcttttctgagagaatctagcgtagagaatctgagtatcattaagattacgtgtgtagaaagataaatgtgtccatatgactcaagatgtagaaattgacggatttctgctatttaatgactcaac

SEQ ID NO: 42363 - DNA, 2679 bp, Zea Mays
atttttgcaagggcgggattcgaaatttgaagttcccttcccctcctcccgctagagtctggttgtgtgatccaggaaggggaagcgccgcccgctacgcttgatcaatagatccattcacccggggagattcccgaccgtgtgctcgtgtgtggagttgagttgtgatggaggccacctccccgcatcctcccaccaccatccgccggaacccaccccgccgcgcgaggcctcccccgaccccgctcgccggcgacaaatccaaaccctcccccctctcccgcctgctcgagggtgaagcagcgttcgccgcctccgttccctgtccaccgcaggaggagcgcctcaaggtgttcctccgcatccgccccctcccggaccgcgatcgaagccggccactccccgctgccaaggacccgcgccggaagcccaagcaggtcggagcccccggggagctctgcctcgcgcccgacggacccaactccgtcgtcctcaccgtcccgcggtctaagctagtcgaccccaagcgaggccgcaccgaggtcttcgacggcttctctgccgttttcccatccgactccacccagcatgatatcttcgcgcaagtcatgaacccactggtggatgacttcctgggcggaaagagtggccttctggttgcaatgggtcccacaggctctggaaagactcacaccatctttggttccccaaggaatcctggtatactacccctcacgctgaggagaatcttcaacgcacaaggcgaaagcaaggtttccaggaaaccaacgcggtcatttttcttctcgatgtttgagatattttctgagggaaaaggggaacgcattcttgacttactgtctgatactgtggagtgtgttcttcagcagtcagtgattaaaggtcttcaagaggtttccctttcaaatcctgcagatgctgagagcttggtttcacgtggtatgctaaagcgcagcacggctgcaacaaatgctaacagcaactcaagtcgatcacagtgcatcattactatacgtgcagacagtgaacatctacttagtagtgctgttctgaccatagcagaccttgctggcgcagaacgggaaaagagaactagaaatcaaggttcaaggctgttagaaagtaacttcatcaacaacacatccatggttttcagtctctgtttgaggtctctgttagaacatcagaaaaaccagaagaaacccttggaaaagcatttcaagaattccatgttgacaaggtacttaagagactacctagaaggaaggaagaaaatgactttgatcttgaatgtgaagccaggggatgatgattatttggatacatcatttttgcttagacaagcatctccttacatgaaaataaagtacactagtcttgatgattcttttgacctggcttcgcaaaagagaatcaatgtttccttgatttgccaagagaacaagaaaaaaaggaaggttcagaagcctgcagtccttgtggttgaacgaaaggaaaatgttgatacagatgatatttctaaagtttctgaaaaagatggcgtgcatcacgtgtctcttaacccagagatgccaagggagtccgagaatgctgttgaaagcatgaaagaattgattagagataaagatatcgaaatcatggagttgaaaaaggagctgaaggctgtaaggtattgttcatgcaagagttctccaataaatgaagatgactctgtggaccatgatgattcttcatcatttggtcaagctgctcagagtttagttaatatatcaaatcaagctgacctgggatctaatgatgcttcagaagataatttccatgtagagttacaagcgcttcataaggaatcagataaatctgaaagttttactgtgccaacacctgcacccactggtggtgcaatgcctgcatctagttattcagatcaaagcttcacagaagatgatgcacttctgtgcctgaacactgaacaaacatctaccgtagggcaaagtgatgaagaaacggaagagctgagtaagatcacactagagaataaggatattcagcttgatatcaatataagagaagagaagcaccatgaatcttgtagctcttcacagcaagtgaactttgacacagaagaaaaggctaacgtggaactggagcatggtatagacggtggtcaagctctagacgaaaagtgtgatcatgcctcagcgaaagctgcaaaggctcctccaagcaagggcagggaggcagacgaaactgcggatacagataaggaagcttttggttctaggacagagaaaaccaggaggaggttacagccagctgctgctatgttgctcagggaattcactggcgctgacattgatgcggataacgaaagggaagaaagaggcagatcatcgtccagcgtggcaaccgggagatcagatgcgcttgttcaacttctgatgaaaggccgtccggtccgtggattagcttcatgatagccggcaccgcatgacgtgacacatattatactgtttggttcagctttttttacctgcttttctgagagaatctagcgtagagaatctgagtatcattaagattacgtgtgtagaaagataaatgtgtccatatgactcaagatgtagaaattgacggatttctgctatttaatgactcaac

SEQ ID NO: 42364 - DNA, 3002 bp, Zea Mays
atttttgcaagggcgggattcgaaatttgaagttcccttcccctcctcccgctagagtctggttgtgtgatccaggaaggggaagcgccgcccgctacgcttgatcaatagatccattcacccggggagattcccgaccgtgtgctcgtgtgtggagttgagttgtgatggaggccacctccccgcatcctcccaccaccatccgccggaacccaccccgccgcgcgaggcctcccccgaccccgctcgccggcgacaaatccaaaccctcccccctctcccgcctgctcgagggtgaagcagcgttcgccgcctccgttccctgtccaccgcaggaggagcgcctcaaggtgttcctccgcatccgccccctcccggaccgcgatcgaagccggccactccccgctgccaaggacccgcgccggaagcccaagcaggtcggagcccccggggagctctgcctcgcgcccgacggacccaactccgtcgtcctcaccgtcccgcggtctaagctagtcgaccccaagcgaggccgcaccgaggtcttcgacggcttctctgccgttttcccatccgactccacccagcatgatatcttcgcgcaagtcatgaacccactggtggatgacttcctgggcggaaagagtggccttctggttgcaatgggtcccacaggctctggaaagactcacaccatctttggttccccaaggaatcctggtatactacccctcacgctgaggagaatcttcaacgcacaaggcgaaagcaaggtttccaggaaaccaacgcggtcatttttcttctcgatgtttgagatattttctgagggaaaaggggaacgcattcttgacttactgtctgatactgtggagtgtgttcttcagcagtcagtgattaaaggtcttcaagaggtttccctttcaaatcctgcagatgctgagagcttggtttcacgtggtatgctaaagcgcagcacggctgcaacaaatgctaacagcaactcaagtcgatcacagtgcatcattactatacgtgcagacagtgaacatctacttagtagtgctgttctgaccatagcagaccttgctggcgcagaacgggaaaagagaactagaaatcaaggttcaaggctgttagaaagtaacttcatcaacaacacatccatggttttcagtctctgtttgaggtctctgttagaacatcagaaaaaccagaagaaacccttggaaaagcatttcaagaattccatgttgacaaggtacttaagagactacctagaaggaaggaagaaaatgactttgatcttgaatgtgaagccaggggatgatgattatttggatacatcatttttgcttagacaagcatctccttacatgaaaataaagtacactagtcttgatgattcttttgacctggcttcgcaaaagagaatcaatgtttccttgatttgccaagagaacaagaaaaaaaggaaggttcagaagcctgcagtccttgtggttgaacgaaaggaaaatgttgatacagatgatatttctaaagtttctgaaaaaggttctgtttactagcacttatgatgtatttcaatgtggcatgctttatttttggtacaagttatatgtggtactggtgaaccttttatttacgttcaatgttgcaataatatttgaaatgggtacagatggcgtgcatcacgtgtctcttaacccagagatgccaagggagtccgagaatgctgttgaaagcatgaaagaattgattagagataaagatatcgaaatcatggagttgaaaaaggagctgaaggctgtaaggtattgttcatgcaagagttctccaataaatgaagatgactctgtggaccatgatgattcttcatcatttggtcaagctgctcagagtttagttaatatatcaaatcaagctgacctgggatctaatgatgcttcagaagataatttccatgtagagttacaagcgcttcataaggaatcagataaatctgaaagttttactgtgccaacacctgcacccactggtggtgcaatgcctgcatctagttattcagatcaaagcttcacagggcaaagtgatgaagaaacggaagagctgagtaagatcacactagagaataaggatattcagcttgatatcaatataagagaagagaagcaccatgaatcttgtagctcttcacagcaagtgaactttgacacagaaggtacccgctctagtgaggcttccttgcttggaacggttggttctgaaaagaagcttgaggaactgaagcagaaatctggaagatgtgtgtctgctgtagaaaaggctaacgtggaactggagcatggtatagacggtggtcaagctctagacgaaaagtgtgatcatgcctcagcgaaagctgcaaaggctcctccaagcaagggcagggaggcagacgaaactgcggatacagataaggaagcttttggttctaggacagagaaaaccaggaggaggttacagccagctgctgctatgttgctcagggaattcactggcgctgacattgatgcggataacgaaagggaagaaagaggcagatcatcgtccagcgtggcaaccgggagatcagatgcgcttgttcaacttctgatgaaaggccgtccggcgcacggcgacgagtcgcgccagctccagtcgctcatgcagctctgcgagatgcgctccatcggctccgaggacttgctcgccgccttcgtcccaatcctcgtcgggatgctcggccagcctgccaccgctggtgccagcccaggcgtcatgctgctcgctgcgcgggcactagccaacctcgtttatgtgctcccctcctgctccgcggtcgtgcactacggggccatactgttgtgctcgactgctcaccgttgacaacatggagctcgccaagcagagtaataaaaaagatgatcagtcatcctctctgcctgcatgcccttagctccctgccagttaccaaggtg

SEQ ID NO: 42365 - DNA, 6190 bp, Zea Mays
atttttgcaagggcgggattcgaaatttgaagttcccttcccctcctcccgctagagtctggttgtgtgatccaggaaggggaagcgccgcccgctacgcttgatcaatagatccattcacccggggagattcccgaccgtgtgctcgtgtgtggagttgagttgtgatggaggccacctccccgcatcctcccaccaccatccgccggaacccaccccgccgcgcgaggcctcccccgaccccgctcgccggcgacaaatccaaaccctcccccctctcccgcctgctcgagggtgaagcagcgttcgccgcctccgttccctgtccaccgcaggaggagcgcctcaaggtgttcctccgcatccgccccctcccggaccgcgatcgaagccggccactccccgctgccaaggacccgcgccggaagcccaagcaggtcggagcccccggggagctctgcctcgcgcccgacggacccaactccgtcgtcctcaccgtcccgcggtctaagctagtcgaccccaagcgaggccgcaccgaggtcttcgacggcttctctgccgttttcccatccgactccacccagcatgatatcttcgcgcaagtcatgaacccactggtggatgacttcctgggcggaaagagtggccttctggttgcaatgggtcccacaggctctggaaagactcacaccatctttggttccccaaggaatcctggtatactacccctcacgctgaggagaatcttcaacgcacaaggcgaaagcaaggtttccaggaaaccaacgcggtcatttttcttctcgatgtttgagatattttctgagggaaaaggggaacgcattcttgacttactgtctgatactgtggagtgtgttcttcagcagtcagtgattaaaggtcttcaagaggtttccctttcaaatcctgcagatgctgagagcttggtttcacgtggtatgctaaagcgcagcacggctgcaacaaatgctaacagcaactcaagtcgatcacagtgcatcattactatacgtgcagacagtgaacatctacttagtagtgctgttctgaccatagcagaccttgctggcgcagaacgggaaaagagaactagaaatcaaggttcaaggctgttagaaagtaacttcatcaacaacacatccatggttttcagtctctgtttgaggtctctgttagaacatcagaaaaaccagaagaaacccttggaaaagcatttcaagaattccatgttgacaaggtacttaagagactacctagaaggaaggaagaaaatgactttgatcttgaatgtgaagccaggggatgatgattatttggatacatcatttttgcttagacaagcatctccttacatgaaaataaagtacactagtcttgatgattcttttgacctggcttcgcaaaagagaatcaatgtttccttgatttgccaagagaacaagaaaaaaaggaaggttcagaagcctgcagtccttgtggttgaacgaaaggaaaatgttgatacagatgatatttctaaagtttctgaaaaagatggcgtgcatcacgtgtctcttaacccagagatgccaagggtatccagaagcgaagcaataatgacaaactttgcaagggctttattgactgtattaagacaatataagcacaaacttttggagtccgagaatgctgttgaaagcatgaaagaattgattagagataaagatatcgaaatcatggagttgaaaaaggagctgaaggctgtaaggtattgttcatgcaagagttctccaataaatgaagatgactctgtggaccatgatgattcttcatcatttggtcaagctgctcagagtttagttaatatatcaaatcaagctgacctgggatctaatgatgcttcagaagataatttccatgtagagttacaagcgcttcataaggaatcagataaatctgaaagttttactgtgccaacacctgcacccactggtggtgcaatgcctgcatctagttattcagatcaaagcttcacagggcaaagtgatgaagaaacggaagagctgagtaagatcacactagagaataaggatattcagcttgatatcaatataagagaagagaagcaccatgaatcttgtagctcttcacagcaagtgaactttgacacagaaggtacccgctctagtgaggcttccttgcttggaacggttggttctgaaaagaagcttgaggaactgaagcagaaatctggaagatgtgtgtctgctgtagaaaaggctaacgtggaactggagcatggtatagacggtggtcaagctctagacgaaaagtgtgatcatgcctcagcgaaagctgcaaaggctcctccaagcaagggcagggaggcagacgaaactgcggatacagataaggaagcttttggttctaggacagagaaaaccaggaggaggttacagccagctgctgctatgttgctcagggaattcactggcgctgacattgatgcggataacgaaagggaagaaagaggcagatcatcgtccagcgtggcaaccgggagatcagatgcgcttgttcaacttctgatgaaaggccgtccggcgcacggcgacgagtcgcgccagctccagtcgctcatgcagctctgcgagatgcgctccatcggctccgaggacttgctcgccgccttcgtcccaatcctcgtcgggatgctcggccagcctgccaccgctggtgccagcccaggcgtcatgctgctcgctgcgcgggcactagccaacctcgtttatgtgctcccctcctgctccgcggtcgtgcactacggggccatactgttgtgctcgactgctcaccgttgacaacatggagctcgccaagcagagtaataaaaaagatgatcagtcatcctctctgcctgcatgcccttagctccctgccagttaccaaggtgctgctaatataatacatatactttactctctggaagatctctgaggagcacgcacccaaccgcctgtttgcgagctggtgcgctaatggctgttctaaagcaacttgacttcttctccactgaggttcagagggtagccttgtctacggccgcaaatatttgcaggaatctgccggccgatgcttctgagtttgtcatggaagctgtcccatcgctcacgaatctcctaaaccaccatgattccaaggtacttctcaagtgcagacagtcacacctctgcgttatgatatgcttatcgagtgacacgcattgctgaagcttttgcctattaccccgacgaacttgatgaactctgcaatcatggattagttgctcaagctgctagcttgatagctcttggcaactcctctggccaggaaccactgagtacatctacatatacaggcttaatccgtcttctctcaacatgtgcaagtggatccctgctggcagttaaaacactactacttcttgggatcagcggtactcttaaagatttcctttctggccctgctttgatttctggaacattagtcccccgtgctgtaacaaggcctgccgatcagatatttgagattgtgatccttgctgataatttgcttccgcatatgcctgcgataatcattgagttaccaacatactaccatgcatataaagactcttcaacaaataaatctgcttccatcaaacaagagggggctggttctacaggaaacgaaaagtctggcaatgagaggctattgcgtgaccaacctaagctcctagaacagttcggtatggatttgttacccacaatgacacaggtgtatggttctagtgtaaatgcaccaatacatcgcaagtgtttatcgatcattgggaagttaatgtactacagctccgctgagacagtccagtctctccttggcacaacaaacatatccagcttccttgcaggcattcttgcatggaacgatcttcaagtgttgattcctgctcttcagatagcagaaataatgatggaaaagcttccagagacattttccaagttgtttgtgagggaaggtgtcgttcatgctgtggtgtcacttatatgtttggaatcctccaggctccaacacaatggctcgtcaggtgccacctcaggataaaggtaatgattctgccatgccatcacgtccgtcaacactggcgtgggggtgatgtggcagcagaaaatagttcagtagatgaatcgaatagttccaaccttggggttacatactcaacaacaatcgcttcagaagctctgaacaccagccttcatttcgtagttagtgaccatgcaaagtctttcaaagataaatatttcctgacagacactgattcaggtgatattggggttactgatgaccttcttaaactcagggcattctgagctatttttttggacatctcaattgatgtcgaagaacaattagacaaaataatatctgaaatgctctctgagcttagcaaagttaatggtgtttccacatttgagttcattaggagtggtgttaccacagcattgcttgactatttgtcctgtggaacatttgggaaggaaaaggtatctgaaagaaacctacctcagcttcgtcagcaggtccttagatgatacaagtcgttcgtatctgtttccctttctattgatcatgaacgggatgaaactgccatgacactgttggttaagaaactgcaaagtgcattgtgttcgctggaacgtttccctcttgtttcagccagtctagtaggattggtaatggagggtcccgtctgacttcaggtcttagtgctctggctcaacccttcaagcttcgtctgtccccagctcaaggtgaaaaaccacttcgggattattcatcaaatattgtgcttatcaatccatttgccagtttagcagctgttgaaggatttctttggcccagagttcaacacagtgaggttgcgtcaaagcctataattccatctggtaataattctgaatctgtggttcctggcaccatagctggtgcatcattagcaactgcaatggatcaatctggtcggcgtccaacaacaagatcaaagtcatctgctgcatggggtggtacatcaaagaaggattctcatgatgaaagcactactactgccaaaggaaaactaggtgattccaatgagtgtaacattggctcagccagttttagccaggtgcagccatcatctggttccggtgctagaaacacttctagcagaggacccgattctactgaatttcaaagtacgagcacattcgggtcatttgttgctgcgacgatggctgggctagcttctgttggtggtcgcagtgttataggtggttgagatcggtgtggtctgtcacttggaggaagcatgaatgaccacaataaacttgtatgtattcactgctggtggggagcagcttagcaaacatttgactgtatgtcaagctatccaacgtcgtcgacttatgcttgacgaggatgatgaagaagtgtttaatggatcttgtatacaaaacgatggaaaccactactgggatgatgttttcacaataacgtaccagaaggctgataaccaagggacttgcacctcattgaacataaaatcagattcttacagattcagtcagaattgtcccctgagcagcagcatgcgtttctgccagtttgtaaccggggtttccacttggtggattggctgcccttagtcccaagcttactgtagttaggaagcacccttcaagtgctgcgaatacttcaaattcaactggggcaacagagtctgctgctgctgctgctgctgatttgcctagtgtgatgacgtgcgccaattatgtgaagctgcccccgtactccacaaaagaaatcatgcgcgagaagctgctttatgcgatcctggaaggccgaggatcgtttcatttttcataagaatatccgaactaacttacaggtggccagttttatgctgttctttaacaggctcagcaaggtcggatgcaggtgctgctgtcgatttctcctttcttttgcatttgttcagctacaagtttctgtttccattgggcaggctaggccatagaggaagagcccccccccctcttccagtacatacatgtaaataaaatggatttttagaactggtgatgttgatccagaattgttaataaatgtggcccagtgtaccatttctacc

SEQ ID NO: 42366 - DNA, 6104 bp, Zea Mays
atttttgcaagggcgggattcgaaatttgaagttcccttcccctcctcccgctagagtctggttgtgtgatccaggaaggggaagcgccgcccgctacgcttgatcaatagatccattcacccggggagattcccgaccgtgtgctcgtgtgtggagttgagttgtgatggaggccacctccccgcatcctcccaccaccatccgccggaacccaccccgccgcgcgaggcctcccccgaccccgctcgccggcgacaaatccaaaccctcccccctctcccgcctgctcgagggtgaagcagcgttcgccgcctccgttccctgtccaccgcaggaggagcgcctcaaggtgttcctccgcatccgccccctcccggaccgcgatcgaagccggccactccccgctgccaaggacccgcgccggaagcccaagcaggtcggagcccccggggagctctgcctcgcgcccgacggacccaactccgtcgtcctcaccgtcccgcggtctaagctagtcgaccccaagcgaggccgcaccgaggtcttcgacggcttctctgccgttttcccatccgactccacccagcatgatatcttcgcgcaagtcatgaacccactggtggatgacttcctgggcggaaagagtggccttctggttgcaatgggtcccacaggctctggaaagactcacaccatctttggttccccaaggaatcctggtatactacccctcacgctgaggagaatcttcaacgcacaaggcgaaagcaaggtttccaggaaaccaacgcggtcatttttcttctcgatgtttgagatattttctgagggaaaaggggaacgcattcttgacttactgtctgatactgtggagtgtgttcttcagcagtcagtgattaaaggtcttcaagaggtttccctttcaaatcctgcagatgctgagagcttggtttcacgtggtatgctaaagcgcagcacggctgcaacaaatgctaacagcaactcaagtcgatcacagtgcatcattactatacgtgcagacagtgaacatctacttagtagtgctgttctgaccatagcagaccttgctggcgcagaacgggaaaagagaactagaaatcaaggttcaaggctgttagaaagtaacttcatcaacaacacatccatggttttcagtctctgtttgaggtctctgttagaacatcagaaaaaccagaagaaacccttggaaaagcatttcaagaattccatgttgacaaggtacttaagagactacctagaaggaaggaagaaaatgactttgatcttgaatgtgaagccaggggatgatgattatttggatacatcatttttgcttagacaagcatctccttacatgaaaataaagtacactagtcttgatgattcttttgacctggcttcgcaaaagagaatcaatgtttccttgatttgccaagagaacaagaaaaaaaggaaggttcagaagcctgcagtccttgtggttgaacgaaaggaaaatgttgatacagatgatatttctaaagtttctgaaaaagatggcgtgcatcacgtgtctcttaacccagagatgccaagggtatccagaagcgaagcaataatgacaaactttgcaagggctttattgactgtattaagacaatataagcacaaacttttggagtccgagaatgctgttgaaagcatgaaagaattgattagagataaagatatcgaaatcatggagttgaaaaaggagctgaaggctgtaaggtattgttcatgcaagagttctccaataaatgaagatgactctgtggaccatgatgattcttcatcatttggtcaagctgctcagagtttagttaatatatcaaatcaagctgacctgggatctaatgatgcttcagaagataatttccatgtagagttacaagcgcttcataaggaatcagataaatctgaaagttttactgtgccaacacctgcacccactggtggtgcaatgcctgcatctagttattcagatcaaagcttcacagggcaaagtgatgaagaaacggaagagctgagtaagatcacactagagaataaggatattcagcttgatatcaatataagagaagagaagcaccatgaatcttgtagctcttcacagcaagtgaactttgacacagaaggtacccgctctagtgaggcttccttgcttggaacggttggttctgaaaagaagcttgaggaactgaagcagaaatctggaagatgtgtgtctgctgtagaaaaggctaacgtggaactggagcatggtatagacggtggtcaagctctagacgaaaagtgtgatcatgcctcagcgaaagctgcaaaggctcctccaagcaagggcagggaggcagacgaaactgcggatacagataaggaagcttttggttctaggacagagaaaaccaggaggaggttacagccagctgctgctatgttgctcagggaattcactggcgctgacattgatgcggataacgaaagggaagaaagaggcagatcatcgtccagcgtggcaaccgggagatcagatgcgcttgttcaacttctgatgaaaggccgtccggcgcacggcgacgagtcgcgccagctccagtcgctcatgcagctctgcgagatgcgctccatcggctccgaggacttgctcgccgccttcgtcccaatcctcgtcgggatgctcggccagcctgccaccgctggtgccagcccaggcgtcatgctgctcgctgcgcgggcactagccaacctcgtttatgtgctcccctcctgctccgcgatctctgaggagcacgcacccaaccgcctgtttgcgagctggtgcgctaatggctgttctaaagcaacttgacttcttctccactgaggttcagagggtagccttgtctacggccgcaaatatttgcaggaatctgccggccgatgcttctgagtttgtcatggaagctgtcccatcgctcacgaatctcctaaaccaccatgattccaaggtactagagcatgcttctgtttgtttgacagtgacacgcattgctgaagcttttgcctattaccccgacgaacttgatgaactctgcaatcatggattagttgctcaagctgctagcttgatagctcttggcaactcctctggccaggaaccactgagtacatctacatatacaggcttaatccgtcttctctcaacatgtgcaagtggatccctgctggcagttaaaacactactacttcttgggatcagcggtactcttaaagatttcctttctggccctgctttgatttctggaacattagtcccccgtgctgtaacaaggcctgccgatcagatatttgagattgtgatccttgctgataatttgcttccgcatatgcctgcgataatcattgagttaccaacatactaccatgcatataaagactcttcaacaaataaatctgcttccatcaaacaagagggggctggttctacaggaaacgaaaagtctggcaatgagaggctattgcgtgaccaacctaagctcctagaacagttcggtatggatttgttacccacaatgacacaggtgtatggttctagtgtaaatgcaccaatacatcgcaagtgtttatcgatcattgggaagttaatgtactacagctccgctgagacagtccagtctctccttggcacaacaaacatatccagcttccttgcaggcattcttgcatggaacgatcttcaagtgttgattcctgctcttcagatagcagaaataatgatggaaaagcttccagagacattttccaagttgtttgtgagggaaggtgtcgttcatgctgtggtgtcacttatatgtttggaatcctccaggctccaacacaatggctcgtcaggtgccacctcaggataaaggtaatgattctgccatgccatcacgtccgtcaacactggcgtgggggtgatgtggcagcagaaaatagttcagtagatgaatcgaatagttccaaccttggggttacatactcaacaacaatcgcttcagaagctctgaacaccagccttcatttcgtagttagtgaccatgcaaagtctttcaaagataaatatttcctgacagacactgattcaggtgatattggggttactgatgaccttcttaaactcagggcattctgagctatttttttggacatctcaattgatgtcgaagaacaattagacaaaataatatctgaaatgctctctgagcttagcaaagttaatggtgtttccacatttgagttcattaggagtggtgttaccacagcattgcttgactatttgtcctgtggaacatttgggaaggaaaaggtatctgaaagaaacctacctcagcttcgtcagcaggtccttagatgatacaagtcgttcgtatctgtttccctttctattgatcatgaacgggatgaaactgccatgacactgttggttaagaaactgcaaagtgcattgtgttcgctggaacgtttccctcttgtttcagccagtctagtaggattggtaatggagggtcccgtctgacttcaggtcttagtgctctggctcaacccttcaagcttcgtctgtccccagctcaaggtgaaaaaccacttcgggattattcatcaaatattgtgcttatcaatccatttgccagtttagcagctgttgaaggatttctttggcccagagttcaacacagtgaggttgcgtcaaagcctataattccatctggtaataattctgaatctgtggttcctggcaccatagctggtgcatcattagcaactgcaatggatcaatctggtcggcgtccaacaacaagatcaaagtcatctgctgcatggggtggtacatcaaagaaggattctcatgatgaaagcactactactgccaaaggaaaactaggtgattccaatgagtgtaacattggctcagccagttttagccaggtgcagccatcatctggttccggtgctagaaacacttctagcagaggacccgattctactgaatttcaaagtacgagcacattcgggtcatttgttgctgcgacgatggctgggctagcttctgttggtggtcgcagtgttataggtggttgagatcggtgtggtctgtcacttggaggaagcatgaatgaccacaataaacttgtatgtattcactgctggtggggagcagcttagcaaacatttgactgtatgtcaagctatccaacgtcgtcgacttatgcttgacgaggatgatgaagaagtgtttaatggatcttgtatacaaaacgatggaaaccactactgggatgatgttttcacaataacgtaccagaaggctgataaccaagggacttgcacctcattgaacataaaatcagattcttacaggtctatctctgaagcacaaggggtttctcttcttgatagcatcttgtgtgaaatccgaagtgtttgtcaatagcaattgtgtgaaatgcgggttccttgctcttgtttgtagattcagtcagaattgtcccctgagcagcagcatgcgtttctgccagtttgtaaccggggtttccacttggtggattggctgcccttagtcccaagcttactgtagttaggaagcacccttcaagtgctgcgaatacttcaaattcaactggggcaacagagtctgctgctgctgctgctgctgatttgcctagtgtgatgacgtgcgccaattatgtgaagctgcccccgtactccacaaaagaaatcatgcgcgagaagctgctttatgcgatcctggaaggccgaggatcgtttcatttttcataagaatatccgaactaacttacaggtggccagttttatgctgttctttaacaggctcagcaaggtcggatgcaggtgctgctgtcgatttctcctttcttttgcatttgttcagctacaagtttctgtttccattgggcaggctaggccatagaggaagagcccccccccctcttccagtacatacatgtaaataaaatggatttttagaactggtgatgttgatccagaattgttaataaatgtggcccagtgtaccatttctacc

SEQ ID NO: 42367 - DNA, 4991 bp, Zea Mays
gggagattcccgaccgtgtgctcgtgtgtggagttgagttgtgatggaggccacctccccgcatcctcccaccaccatccgccggaacccaccccgccgcgcgaggcctcccccgaccccgctcgccggcgacaaatccaaaccctcccccctctcccgcctgctcgagggtgaagcagcgttcgccgcctccgttccctgtccaccgcaggaggagcgcctcaaggtgttcctccgcatccgccccctcccggaccgcgatcgaagccggccactccccgctgccaaggacccgcgccggaagcccaagcaggtcggagcccccggggagctctgcctcgcgcccgacggacccaactccgtcgtcctcaccgtcccgcggtctaagctagtcgaccccaagcgaggccgcaccgaggtcttcgacggcttctctgccgttttcccatccgactccacccagcatgatatcttcgcgcaagtcatgaacccactggtggatgacttcctgggcggaaagagtggccttctggttgcaatgggtcccacaggctctggaaagactcacaccatctttggttccccaaggaatcctggtatactacccctcacgctgaggagaatcttcaacgcacaaggcgaaagcaaggtttccaggaaaccaacgcggtcatttttcttctcgatgtttgagatattttctgagggaaaaggggaacgcattcttgacttactgtctgatactgtggagtgtgttcttcagcagtcagtgattaaaggtcttcaagaggtttccctttcaaatcctgcagatgctgagagcttggtttcacgtggtatgctaaagcgcagcacggctgcaacaaatgctaacagcaactcaagtcgatcacagtgcatcattactatacgtgcagacagtgaacatctacttagtagtgctgttctgaccatagcagaccttgctggcgcagaacgggaaaagagaactagaaatcaaggttcaaggctgttagaaagtaacttcatcaacaacacatccatggttttcagtctctgtttgaggtctctgttagaacatcagaaaaaccagaagaaacccttggaaaagcatttcaagaattccatgttgacaaggtacttaagagactacctagaaggaaggaagaaaatgactttgatcttgaatgtgaagccaggggatgatgattatttggatacatcatttttgcttagacaagcatctccttacatgaaaataaagtacgtacactagtcttgatgattcttttgacctggcttcgcaaaagagaatcaatgtttccttgatttgccaagagaacaagaaaaaaaggaaggttcagaagcctgcagtccttgtggttgaacgaaaggaaaatgttgatacagatgatatttctaaagtttctgaaaaagatggcgtgcatcacgtgtctcttaacccagagatgccaagggtatccagaagcgaagcaataatgacaaactttgcaagggctttattgactgtattaagacaatataagcacaaacttttggagtccgagaatgctgttgaaagcatgaaagaattgattagagataaagatatcgaaatcatggagttgaaaaaggagctgaaggctgtaaggtattgttcatgcaagagttctccaataaatgaagatgactctgtggaccatgatgattcttcatcatttggtcaagctgctcagagtttagttaatatatcaaatcaagctgacctgggatctaatgatgcttcagaagataatttccatgtagagttacaagcgcttcataaggaatcagataaatctgaaagttttactgtgccaacacctgcacccactggtggtgcaatgcctgcatctagttattcagatcaaagcttcacagggcaaagtgatgaagaaacggaagagctgagtaagatcacactagagaataaggatattcagcttgatatcaatataagagaagagaagcaccatgaatcttgtagctcttcacagcaagtgaactttgacacagaaggtacccgctctagtgaggcttccttgcttggaacggttggttctgaaaagaagcttgaggaactgaagcagaaatctggaagatgtgtgtctgctgtagaaaaggctaacgtggaactggagcatggtatagacggtggtcaagctctagacgaaaagtgtgatcatgcctcagcgaaagctgcaaaggctcctccaagcaagggcagggaggcagacgaaactgcggatacagataaggaagcttttggttctaggacagagaaaaccaggaggaggttacagccagctgctgctatgttgctcagggaattcactggcgctgacattgatgcggataacgaaagggaagaaagaggcagatcatcgtccagcgtggcaaccgggagatcagatgcgcttgttcaacttctgatgaaaggccgtccggcgcacggcgacgagtcgcgccagctccagtcgctcatgcagctctgcgagatgcgctccatcggctccgaggacttgctcgccgccttcgtcccaatcctcgtcgggatgctcggccagcctgccaccgctggtgccagcccaggcgtcatgctgctcgctgcgcgggcactagccaacctcgtttatgtgctcccctcctgctccgcgatctctgaggagcacgcacccaaccgcctgtttgcgagctggaatctgccggccgatgcttctgagtttgtcatggaagctgtcccatcgctcacgaatctcctaaaccaccatgattccaagtgacacgcattgctgaagcttttgcctattaccccgacgaacttgatgaactctgcaatcatggattagttgctcaagctgctagcttgatagctcttggcaactcctctggccaggaaccactgagtacatctacatatacaggcttaatccgtcttctctcaacatgtgcaagtggatccctgctggcagttaaaacactactacttcttgggatcagcggtactcttaaagatttcctttctggccctgctttgatttctggaacattagtcccccgtgctgtaacaaggcctgccgatcagatatttgagattgtgatccttgctgataatttgcttccgcatatgcctgcgataatcattgagttaccaacatactaccatgcatataaagactcttcaacaaataaatctgcttccatcaaacaagagggggctggttctacaggaaacgaaaagtctggcaatgagaggctattgcgtgaccaacctaagctcctagaacagttcggtatggatttgttacccacaatgacacaggtgtatggttctagtgtaaatgcaccaatacatcgcaagtgtttatcgatcattgggaagttaatgtactacagctccgctgagacagtccagtctctccttggcacaacaaacatatccagcttccttgcaggcattcttgcatggaacgatcttcaagtgttgattcctgctcttcagatagcagaaataatgatggaaaagcttccagagacattttccaagttgtttgtgagggaaggctccaacacaatggctcgtcaggtgccacctcaggataaagaacaattagacaaaataatatctgaaatgctctctgagcttagcaaagttaatggtgtttccacatttgagttcattaggagtggtgttaccacagcattgcttgactatttgtcctgtggaacatttgggaaggaaaagtctagtaggattggtaatggagggtcccgtctgacttcaggtcttagtgctctggctcaacccttcaagcttcgtctgtccccagctcaaggtgaaaaaccacttcgggattattcatcaaatattgtgcttatcaatccatttgccagtttagcagctgttgaaggatttctttggcccagagttcaacacagtgaggttgcgtcaaagcctataattccatctggtaataattctgaatctgtggttcctggcaccatagctggtgcatcattagcaactgcaatggatcaatctggtcggcgtccaacaacaagatcaaagtcatctgctgcatggggtggtacatcaaagaaggattctcatgatgaaagcactactactgccaaaggaaaactaggtgattccaatgagtgtaacattggctcagccagttttagccaggtgcagccatcatctggttccggtgctagaaacacttctagcagaggacccgattctactgaatttcaaagtacgagcacattcgggtcatttgttgctgcgacgatggctgggctagcttctgttggtggtcgcagtgttataggtggttgagatcggtgtggtctgtcacttggaggaagcatgaatgaccacaataaacttgtatgtattcactgctggtggggagcagcttagcaaacatttgactgtatgtcaagctatccaacgtcgtcgacttatgcttgacgaggatgatgaagaagtgtttaatggatcttgtatacaaaacgatggaaaccactactgggatgatgttttcacaataacgtaccagaaggctgataaccaagggacttgcacctcattgaacataaaatcagattcttacaggaaatcatgcgcgagaagctgctttatgcgatcctggaaggccgaggatcgtttcatttttcataagaatatccgaactaacttacaggtggccagttttatgctgttctttaacaggctcagcaaggtcggatgcaggtgctgctgtcgatttctcctttcttttgcatttgttcagctacaagtttctgtttccattgggcaggctaggccatagaggaagagcccccccccctcttccagtacatacatgtaaataaaatggatttttagaactggtgatgttgatccagaattgttaataaatgtggcccagtgtaccatttctacc

SEQ ID NO: 42368 - DNA, 5888 bp, Zea Mays
atggaggccacctccccgcatcctcccaccaccatccgccggaacccaccccgccgcgcgaggcctcccccgaccccgctcgccggcgacaaatccaaaccctcccccctctcccgcctgctcgagggtgaagcagcgttcgccgcctccgttccctgtccaccgcaggaggagcgcctcaaggtgttcctccgcatccgccccctcccggaccgcgatcgaagccggccactccccgctgccaaggacccgcgccggaagcccaagcaggtcggagcccccggggagctctgcctcgcgcccgacggacccaactccgtcgtcctcaccgtcccgcggtctaagctagtcgaccccaagcgaggccgcaccgaggtcttcgacggcttctctgccgttttcccatccgactccacccagcatgatatcttcgcgcaagtcatgaacccactggtggatgacttcctgggcggaaagagtggccttctggttgcaatgggtcccacaggctctggaaagactcacaccatctttggttccccaaggaatcctggtatactacccctcacgctgaggagaatcttcaacgcacaaggcgaaagcaaggtttccaggaaaccaacgcggtcatttttcttctcgatgtttgagatattttctgagggaaaaggggaacgcattcttgacttactgtctgatactgtggagtgtgttcttcagcagtcagtgattaaaggtcttcaagaggtttccctttcaaatcctgcagatgctgagagcttggtttcacgtggtatgctaaagcgcagcacggctgcaacaaatgctaacagcaactcaagtcgatcacagtgcatcattactatacgtgcagacagtgaacatctacttagtagtgctgttctgaccatagcagaccttgctggcgcagaacgggaaaagagaactagaaatcaaggttcaaggctgttagaaagtaacttcatcaacaacacatccatggttttcagtctctgtttgaggtctctgttagaacatcagaaaaaccagaagaaacccttggaaaagcatttcaagaattccatgttgacaaggtacttaagagactacctagaaggaaggaagaaaatgactttgatcttgaatgtgaagccaggggatgatgattatttggatacatcatttttgcttagacaagcatctccttacatgaaaataaagtacactagtcttgatgattcttttgacctggcttcgcaaaagagaatcaatgtttccttgatttgccaagagaacaagaaaaaaaggaaggttcagaagcctgcagtccttgtggttgaacgaaaggaaaatgttgatacagatgatatttctaaagtttctgaaaaagatggcgtgcatcacgtgtctcttaacccagagatgccaagggtatccagaagcgaagcaataatgacaaactttgcaagggctttattgactgtattaagacaatataagcacaaacttttggagtccgagaatgctgttgaaagcatgaaagaattgattagagataaagatatcgaaatcatggagttgaaaaaggagctgaaggctgtaaggtattgttcatgcaagagttctccaataaatgaagatgactctgtggaccatgatgattcttcatcatttggtcaagctgctcagagtttagttaatatatcaaatcaagctgacctgggatctaatgatgcttcagaagataatttccatgtagagttacaagcgcttcataaggaatcagataaatctgaaagttttactgtgccaacacctgcacccactggtggtgcaatgcctgcatctagttattcagatcaaagcttcacagaagatgatgcacttctgtgcctgaacactgaacaaacatctaccgtagggcaaagtgatgaagaaacggaagagctgagtaagatcacactagagaataaggatattcagcttgatatcaatataagagaagagaagcaccatgaatcttgtagctcttcacagcaagtgaactttgacacagaagaaaaggctaacgtggaactggagcatggtatagacggtggtcaagctctagacgaaaagtgtgatcatgcctcagcgaaagctgcaaaggctcctccaagcaagggcagggaggcagacgaaactgcggatacagataaggaagcttttggttctaggacagagaaaaccaggaggaggttacagccagctgctgctatgttgctcagggaattcactggcgctgacattgatgcggataacgaaagggaagaaagaggcagatcatcgtccagcgtggcaaccgggagatcagatgcgcttgttcaacttctgatgaaaggccgtccggcgcacggcgacgagtcgcgccagctccagtcgctcatgcagctctgcgagatgcgctccatcggctccgaggacttgctcgccgccttcgtcccaatcctcgtcgggatgctcggccagcctgccaccgctggtgccagcccaggcgtcatgctgctcgctgcgcgggcactagccaacctcgtttatgtgctcccctcctgctccgcgatctctgaggagcacgcacccaaccgcctgtttgcgagctggaatctgccggccgatgcttctgagtttgtcatggaagctgtcccatcgctcacgaatctcctaaaccaccatgattccaaggtacttctcaagtgcagacagtcacacctctgcgttatgatatgcttatcgagtgacacgcattgctgaagcttttgcctattaccccgacgaacttgatgaactctgcaatcatggattagttgctcaagctgctagcttgatagctcttggcaactcctctggccaggaaccactgagtacatctacatatacaggcttaatccgtcttctctcaacatgtgcaagtggatccctgctggcagttaaaacactactacttcttgggatcagcggtactcttaaagatttcctttctggccctgctttgatttctggaacattagtcccccgtgctgtaacaaggcctgccgatcagatatttgagattgtgatccttgctgataatttgcttccgcatatgcctgcgataatcattgagttaccaacatactaccatgcatataaagactcttcaacaaataaatctgcttccatcaaacaagagggggctggttctacaggaaacgaaaagtctggcaatgagaggctattgcgtgaccaacctaagctcctagaacagttcggtactttaacagcctgtgtgcttgttcaggtgtatggttctagtgtaaatgcaccaatacatcgcaagtgtttatcgatcattgggaagttaatgtactacagctccgctgagacagtccagtctctccttggcacaacaaacatatccagcttccttgcaggcattcttgcatggaacgatcttcaagtgttgattcctgctcttcagatagcagaaataatgatggaaaagcttccagagacattttccaagttgtttgtgagggaaggtgtcgttcatgctgtggtgtcacttatatgtttggaatcctccaggctccaacacaatggctcgtcaggtgccacctcaggataaaggtaatgattctgccatgccatcacgtccgtcaacactggcgtgggggtgatgtggcagcagaaaatagttcagtagatgaatcgaatagttccaaccttggggttacatactcaacaacaatcgcttcagaagctctgaacaccagccttcatttcgtagttagtgaccatgcaaagtctttcaaagataaatatttcctgacagacactgattcaggtgatattggggttactgatgaccttcttaaactcagggcattctgagctatttttttggacatctcaattgatgtcgaagaacaattagacaaaataatatctgaaatgctctctgagcttagcaaagttaatggtgtttccacatttgagttcattaggagtggtgttaccacagcattgcttgactatttgtcctgtggaacatttgggaaggaaaaggtatctgaaagaaacctacctcagcttcgtcagcaggtccttagatgatacaagtcgttcgtatctgtttccctttctattgatcatgaacgggatgaaactgccatgacactgttggttaagaaactgcaaagtgcattgtgttcgctggaacgtttccctcttgtttcagccagtctagtaggattggtaatggagggtcccgtctgacttcaggtcttagtgctctggctcaacccttcaagcttcgtctgtccccagctcaaggtgaaaaaccacttcgggattattcatcaaatattgtgcttatcaatccatttgccagtttagcagctgttgaaggatttctttggcccagagttcaacacagtgaggttgcgtcaaagcctataattccatctggtaataattctgaatctgtggttcctggcaccatagctggtgcatcattagcaactgcaatggatcaatctggtcggcgtccaacaacaagatcaaagtcatctgctgcatggggtggtacatcaaagaaggattctcatgatgaaagcactactactgccaaaggaaaactaggtgattccaatgagtgtaacattggctcagccagttttagccaggtgcagccatcatctggttccggtgctagaaacacttctagcagaggacccgattctactgaatttcaaagtacgagcacattcgggtcatttgttgctgcgacgatggctgggctagcttctgttggtggtcgcagtgttataggtggttgagatcggtgtggtctgtcacttggaggaagcatgaatgaccacaataaacttgtatgtattcactgctggtggggagcagcttagcaaacatttgactgtatgtcaagctatccaacgtcgtcgacttatgcttgacgaggatgatgaagaagtgtttaatggatcttgtatacaaaacgatggaaaccactactgggatgatgttttcacaataacgtaccagaaggctgataaccaagggacttgcacctcattgaacataaaatcagattcttacaggtctatctctgaagcacaaggggtttctcttcttgatagcatcttgtgtgaaatccgaagtgtttgtcaatagcaattgtgtgaaatgcgggttccttgctcttgtttgtagattcagtcagaattgtcccctgagcagcagcatgcgtttctgccagtttgtaaccggggtttccacttggtggattggctgcccttagtcccaagcttactgtagttaggaaggtactatctactatctatcatggcatttgctattatggtaacttgatgttacttttgattatcgccagcacccttcaagtgctgcgaatacttcaaattcaactggggcaacagagtctgctgctgctgctgctgctgatttgcctagtgtgatgacgtgcgccaattatgtgaagctgcccccgtactccacaaaagaaatcatgcgcgagaagctgctttatgcgatcctggaaggccgaggatcgtttcatttttcataagaatatccgaactaacttacaggtggccagttttatgctgttctttaacaggctcagcaaggtcggatgcaggtgctgctgtcgatttctcctttcttttgcatttgttcagctacaagtttctgtttccattgggcaggctaggccatagaggaagagcccccccccctcttccagtacatacatgtaaataaaatggatttttagaactggtgatgttgatccagaattgttaataaatgtggcccagtgtaccatttctacc

SEQ ID NO: 42369 - DNA, 3635 bp, Zea Mays
caacttctgatatgattgaggttggttctgaaaagaagcttgaggaactgaagcagaaatctggaagatgtgtgtctgctgtagaaaaggctaacgtggaactggagcatggtatagacggtggtcaagctctagacgaaaagtgtgatcatgcctcagcgaaagctgcaaaggctcctccaagcaagggcagggaggcagacgaaactgcggatacagataaggaagcttttggttctaggacagagaaaaccaggaggaggttacagccagctgctgctatgttgctcagggaattcactggcgctgacattgatgcggataacgaaagggaagaaagaggcagatcatcgtccagcgtggcaaccgggagatcagatgcgcttgttcaacttctgatgaaaggccgtccggcgcacggcgacgagtcgcgccagctccagtcgctcatgcagctctgcgagatgcgctccatcggctccgaggacttgctcgccgccttcgtcccaatcctcgtcgggatgctcggccagcctgccaccgctggtgccagcccaggcgtcatgctgctcgctgcgcgggcactagccaacctcgtttatgtgctcccctcctgctccgcggtcgtgcactacggggccatactgttgtgctcgactgctcaccgttgacaacatggagctcgccaagcagagtaataaaaaagatgatcagtcatcctctctgcctgcatgcccttagctccctgccagttaccaaggtgctgctaatataatacatatactttactctctggaagatctctgaggagcacgcacccaaccgcctgtttgcgagctggtgcgctaatggctgttctaaagcaacttgacttcttctccactgaggttcagagggtagccttgtctacggccgcaaatatttgcaggaatctgccggccgatgcttctgagtttgtcatggaagctgtcccatcgctcacgaatctcctaaaccaccatgattccaaggtactagagcatgcttctgtttgtttgacagtgacacgcattgctgaagcttttgcctattaccccgacgaacttgatgaactctgcaatcatggattagttgctcaagctgctagcttgatagctcttggcaactcctctggccaggaaccactgagtacatctacatatacaggcttaatccgtcttctctcaacatgtgcaagtggatccctgctggcagttaaaacactactacttcttgggatcagcggtactcttaaagatttcctttctggccctgctttgatttctggaacattagtcccccgtgctgtaacaaggcctgccgatcagatatttgagattgtgatccttgctgataatttgcttccgcatatgcctgcgataatcattgagttaccaacatactaccatgcatataaagactcttcaacaaataaatctgcttccatcaaacaagagggggctggttctacaggaaacgaaaagtctggcaatgagaggctattgcgtgaccaacctaagctcctagaacagttcggtatggatttgttacccacaatgacacaggtgtatggttctagtgtaaatgcaccaatacatcgcaagtgtttatcgatcattgggaagttaatgtactacagctccgctgagacagtccagtctctccttggcacaacaaacatatccagcttccttgcaggcattcttgcatggaacgatcttcaagtgttgattcctgctcttcagatagcagaaataatgatggaaaagcttccagagacattttccaagttgtttgtgagggaaggctccaacacaatggctcgtcaggtgccacctcaggataaagaacaattagacaaaataatatctgaaatgctctctgagcttagcaaagttaatggtgtttccacatttgagttcattaggagtggtgttaccacagcattgcttgactatttgtcctgtggaacatttgggaaggaaaagtctagtaggattggtaatggagggtcccgtctgacttcaggtcttagtgctctggctcaacccttcaagcttcgtctgtccccagctcaaggtgaaaaaccacttcgggattattcatcaaatattgtgcttatcaatccatttgccagtttagcagctgttgaaggatttctttggcccagagttcaacacagtgaggttgcgtcaaagcctataattccatctggtaataattctgaatctgtggttcctggcaccatagctggtgcatcattagcaactgcaatggatcaatctggtcggcgtccaacaacaagatcaaagtcatctgctgcatggggtggtacatcaaagaaggattctcatgatgaaagcactactactgccaaaggaaaactaggtgattccaatgagtgtaacattggctcagccagttttagccaggtgcagccatcatctggttccggtgctagaaacacttctagcagaggacccgattctactgaatttcaaagtacgagcacattcgggtcatttgttgctgcgacgatggctgggctagcttctgttggtggtcgcagtgttataggtggttgagatcggtgtggtctgtcacttggaggaagcatgaatgaccacaataaacttgtatgtattcactgctggtggggagcagcttagcaaacatttgactgtatgtcaagctatccaacgtcgtcgacttatgcttgacgaggatgatgaagaagtgtttaatggatcttgtatacaaaacgatggaaaccactactgggatgatgttttcacaataacgtaccagaaggctgataaccaagggacttgcacctcattgaacataaaatcagattcttacaggtctatctctgaagcacaaggggtttctcttcttgatagcatcttgtgtgaaatccgaagtgtttgtcaatagcaattgtgtgaaatgcgggttccttgctcttgtttgtagattcagtcagaattgtcccctgagcagcagcatgcgtttctgccagtttgtaaccggggtttccacttggtggattggctgcccttagtcccaagcttactgtagttaggaaggtactatctactatctatcatggcatttgctattatggtaacttgatgttacttttgattatcgccagcacccttcaagtgctgcgaatacttcaaattcaactggggcaacagagtctgctgctgctgctgctgctgatttgcctagtgtgatgacgtgcgccaattatgtgaagctgcccccgtactccacaaaagaaatcatgcgcgagaagctgctttatgcgatcctggaaggccgaggatcgtttcatttttcataagaatatccgaactaacttacaggtggccagttttatgctgttctttaacaggctcagcaaggtcggatgcaggtgctgctgtcgatttctcctttcttttgcatttgttcagctacaagtttctgtttccattgggcaggctaggccatagaggaagagcccccccccctcttccagtacatacatgtaaataaaatggatttttagaactggtgatgttgatccagaattgttaataaatgtggcccagtgtaccatttctacc

SEQ ID NO: 42370 - DNA, 3854 bp, Zea Mays
gccatactgttgtgctcgactgctcaccgttgacaacatggagctcgccaagcagatctctgaggagcacgcacccaaccgcctgtttgcgagctggtgcgctaatggctgttctaaagcaacttgacttcttctccactgaggttcagagggtagccttgtctacggccgcaaatatttgcaggaatctgccggccgatgcttctgagtttgtcatggaagctgtcccatcgctcacgaatctcctaaaccaccatgattccaaggtacttctcaagtgcagacagtcacacctctgcgttatgatatgcttatcgagtgacacgcattgctgaagcttttgcctattaccccgacgaacttgatgaactctgcaatcatggattagttgctcaagctgctagcttgatagctcttggcaactcctctggccaggaaccactgagtacatctacatatacaggcttaatccgtcttctctcaacatgtgcaagtggatccctgctggcagttaaaacactactacttcttgggatcagcggtactcttaaagatttcctttctggccctgctttgatttctggaacattagtcccccgtgctgtaacaaggcctgccgatcaggtgaatatttctatcactgacgtaggacttttctgccagtgctgtttccaaactagccctaaataaacaattcagccatgatttctctctgtggttcgatccagtaacattctgatttatcggtgaaaaagtaggctttaacatctcacgctttcatctaccacacatattcataattatatgtaccatcgagtaattgtttgtgtgattttcttgagcattgaacatagatgctaatgctgggaattgtgcttgccttgttaaaccatacaaacaatcattgaaaagagtagtgaactagtatgttcgaagacttgcatacgtaacccgggaatgggcaagacacaaccaggggatttttttaccaagcccgaaattcgtcccctcaggattgaacccaggacctgaagccttaaccattacgctagaggccctttcgtgaagcccacactgtttgacccatcagtttcttaaacatgtatgtttcatgttgtccaaatatttttcatatatttacccctaatatttcagatatttgagattgtgatccttgctgataatttgcttccgcatatgcctgcgataatcattgagttaccaacatactaccatgcatataaagactcttcaacaaataaatctgcttccatcaaacaagagggggctggttctacaggaaacgaaaagtctggcaatgagaggctattgcgtgaccaacctaagctcctagaacagttcggtatggatttgttacccacaatgacacaggtgtatggttctagtgtaaatgcaccaatacatcgcaagtgtttatcgatcattgggaagttaatgtactacagctccgctgagacagtccagtctctccttggcacaacaaacatatccaggttttaacacaagtttattcaaagccttattccttttgtctagagaatggtttctctctctctctccctctcctggaacacacaaaagagttgcccattttttcattaaaggaacaaatgcttcttagctcatttctagagaataatttcagaaaaatggatgctaaagacgaatagaaagtctcaatagagtaatagacatacttcttttccaatccattataagttattttgtttccatcacagcttccttgcaggcattcttgcatggaacgatcttcaagtgttgattcctgctcttcagatagcagaaataatgatggaaaagcttccagagacattttccaagttgtttgtgagggaaggtgtcgttcatgctgtggtgtcacttatatgtttggaatcctccaggctccaacacaatggctcgtcaggtgccacctcaggataaaggtaatgattctgccatgccatcacgtccgtcaacactggcgtgggggtgatgtggcagcagaaaatagttcagtagatgaatcgaatagttccaaccttggggttacatactcaacaacaatcgcttcagaagctctgaacaccagccttcatttcgtagttagtgaccatgcaaagtctttcaaagataaatatttcctgacagacactgattcaggtgatattggggttactgatgaccttcttaaactcagggcattctgagctatttttttggacatctcaattgatgtcgaagaacaattagacaaaataatatctgaaatgctctctgagcttagcaaagttaatggtgtttccacatttgagttcattaggagtggtgttaccacagcattgcttgactatttgtcctgtggaacatttgggaaggaaaagtctagtaggattggtaatggagggtcccgtctgacttcaggtcttagtgctctggctcaacccttcaagcttcgtctgtccccagctcaaggtgaaaaaccacttcgggattattcatcaaatattgtgcttatcaatccatttgccagtttagcagctgttgaaggatttctttggcccagagttcaacacagtgaggttgcgtcaaagcctataattccatctggtaataattctgaatctgtggttcctggcaccatagctggtgcatcattagcaactgcaatggatcaatctggtcggcgtccaacaacaagatcaaagtcatctgctgcatggggtggtacatcaaagaaggattctcatgatgaaagcactactactgccaaaggaaaactaggtgattccaatgagtgtaacattggctcagccagttttagccaggtgcagccatcatctggttccggtgctagaaacacttctagcagaggacccgattctactgaatttcaaagtacgagcacattcgggtcatttgttgctgcgacgatggctgggctagcttctgttggtggtcgcagtgttataggtggttgagatcggtgtggtctgtcacttggaggaagcatgaatgaccacaataaacttgtatgtattcactgctggtggggagcagcttagcaaacatttgactgtatgtcaagctatccaacgtcgtcgacttatgcttgacgaggatgatgaagaagtgtttaatggatcttgtatacaaaacgatggaaaccactactgggatgatgttttcacaataacgtaccagaaggctgataaccaagggacttgcacctcattgaacataaaatcagattcttacagattcagtcagaattgtcccctgagcagcagcatgcgtttctgccagtttgtaaccggggtttccacttggtggattggctgcccttagtcccaagcttactgtagttaggaagcacccttcaagtgctgcgaatacttcaaattcaactggggcaacagagtctgctgctgctgctgctgctgatttgcctagtgtgatgacgtgcgccaattatgtgaagctgcccccgtactccacaaaagaaatcatgcgcgagaagctgctttatgcgatcctggaaggccgaggatcgtttcatttttcataagaatatccgaactaacttacaggtggccagttttatgctgttctttaacaggctcagcaaggtcggatgcaggtgctgctgtcgatttctcctttcttttgcatttgttcagctacaagtttctgtttccattgggcaggctaggccatagaggaagagcccccccccctcttccagtacatacatgtaaataaaatggatttttagaactggtgatgttgatccagaattgttaataaatgtggcccagtgtaccatttctacc

SEQ ID NO: 42371 - DNA, 3354 bp, Zea Mays
agcaacttgacttcttctccactgagagggtagccttgtctacggccgcaaatatttgcaggaatctgccggccgatgcttctgagtttgtcatggaagctgtcccatcgctcacgaatctcctaaaccaccatgattccaaggtactagagcatgcttctgtttgtttgacagtgacacgcattgctgaagcttttgcctattaccccgacgaacttgatgaactctgcaatcatggattagttgctcaagctgctagcttgatagctcttggcaactcctctggccaggaaccactgagtacatctacatatacaggcttaatccgtcttctctcaacatgtgcaagtggatccctgctggcagttaaaacactactacttcttgggatcagcggtactcttaaagatttcctttctggccctgctttgatttctggaacattagtcccccgtgctgtaacaaggcctgccgatcagatatttgagattgtgatccttgctgataatttgcttccgcatatgcctgcgataatcattgagttaccaacatactaccatgcatataaagactcttcaacaaataaatctgcttccatcaaacaagagggggctggttctacaggaaacgaaaagtctggcaatgagaggctattgcgtgaccaacctaagctcctagaacagttcggtatggatttgttacccacaatgacacaggtgtatggttctagtgtaaatgcaccaatacatcgcaagtgtttatcgatcattgggaagttaatgtactacagctccgctgagacagtccagtctctccttggcacaacaaacatatccaggttttaacacaagtttattcaaagccttattccttttgtctagagaatggtttctctctctctctccctctcctggaacacacaaaagagttgcccattttttcattaaaggaacaaatgcttcttagctcatttctagagaataatttcagaaaaatggatgctaaagacgaatagaaagtctcaatagagtaatagacatacttcttttccaatccattataagttattttgtttccatcacagcttccttgcaggcattcttgcatggaacgatcttcaagtgttgattcctgctcttcagatagcagaaataatgatggaaaagcttccagagacattttccaagttgtttgtgagggaaggtgtcgttcatgctgtggtgtcacttatatgtttggaatcctccaggctccaacacaatggctcgtcaggtgccacctcaggataaaggtaatgattctgccatgccatcacgtccgtcaacactggcgtgggggtgatgtggcagcagaaaatagttcagtagatgaatcgaatagttccaaccttggggttacatactcaacaacaatcgcttcagaagctctgaacaccagccttcatttcgtagttagtgaccatgcaaagtctttcaaagataaatatttcctgacagacactgattcaggtgatattggggttactgatgaccttcttaaactcagggcattctgagctatttttttggacatctcaattgatgtcgaagaacaattagacaaaataatatctgaaatgctctctgagcttagcaaagttaatggtgtttccacatttgagttcattaggagtggtgttaccacagcattgcttgactatttgtcctgtggaacatttgggaaggaaaaggtatctgaaagaaacctacctcagcttcgtcagcaggtccttagatgatacaagtcgttcgtatctgtttccctttctattgatcatgaacgggatgaaactgccatgacactgttggttaagaaactgcaaagtgcattgtgttcgctggaacgtttccctcttgtttcagccagtctagtaggattggtaatggagggtcccgtctgacttcaggtcttagtgctctggctcaacccttcaagcttcgtctgtccccagctcaaggtgaaaaaccacttcgggattattcatcaaatattgtgcttatcaatccatttgccagtttagcagctgttgaaggatttctttggcccagagttcaacacagtgaggttgcgtcaaagcctataattccatctggtaataattctgaatctgtggttcctggcaccatagctggtgcatcattagcaactgcaatggatcaatctggtcggcgtccaacaacaagatcaaagtcatctgctgcatggggtggtacatcaaagaaggattctcatgatgaaagcactactactgccaaaggaaaactaggtgattccaatgagtgtaacattggctcagccagttttagccaggtgcagccatcatctggttccggtgctagaaacacttctagcagaggacccgattctactgaatttcaaagtacgagcacattcgggtcatttgttgctgcgacgatggctgggctagcttctgttggtggtcgcagtgttataggtggttgagatcggtgtggtctgtcacttggaggaagcatgaatgaccacaataaacttgtatgtattcactgctggtggggagcagcttagcaaacatttgactgtatgtcaagctatccaacgtcgtcgacttatgcttgacgaggatgatgaagaagtgtttaatggatcttgtatacaaaacgatggaaaccactactgggatgatgttttcacaataacgtaccagaaggctgataaccaagggacttgcacctcattgaacataaaatcagattcttacagattcagtcagaattgtcccctgagcagcagcatgcgtttctgccagtttgtaaccggggtttccacttggtggattggctgcccttagtcccaagcttactgtagttaggaagcacccttcaagtgctgcgaatacttcaaattcaactggggcaacagagtctgctgctgctgctgctgctgatttgcctagtgtgatgacgtgcgccaattatgtgaagctgcccccgtactccacaaaagaaatcatgcgcgagaagctgctttatgcgatcctggaaggccgaggatcgtttcatttttcataagaatatccgaactaacttacaggtggccagttttatgctgttctttaacaggctcagcaaggtcggatgcaggtgctgctgtcgatttctcctttcttttgcatttgttcagctacaagtttctgtttccattgggcaggctaggccatagaggaagagcccccccccctcttccagtacatacatgtaaataaaatggatttttagaactggtgatgttgatccagaattgttaataaatgtggcccagtgtaccatttctacc

SEQ ID NO: 42372 - DNA, 2035 bp, Zea Mays
cttctcaacaagaaagcaaattccctgtccgaatcctcattttccacgaaccaaaatcactatttcttatatattctattccctctcctctctgcaccgcccgccgcgccgagcacgcctctccctccctcgatccagatccaccccatacctccgcggcgccaccccttcccgctccttctagccggcgtcggcgcgggccggagatctgttttctccggtaggaaaaatcctattgcgatctaaatatgggttcgaaatcggtagacgaggtgctcgacgccgccgccgccggagtccattactccgcactccgtctggacggccaggcttccgcaacgacgtctggcctggagaacggccaccaggagccctttgtcattggtgttgctgggggtgcatcgtcaggcaagagtaccgtgtgcaagatgatcattgatcagctccgtgaccagcgtgtcgtggttgttacgcaggagtccttttattatggattgacggatgaagaattagtacatgtccataattataactttgatcatccagacgcatttcatacagagctacttctctcttgtatgcaaaacttgaaatgtggcaaagctgttgacatccctaactacaacttcaagacatacaaaagtgtcccaaatgcaaggaaggttaatccttcggatgttattattttggaaggaattctagtttttcatgattcacgcctcagggatttgatgaacatgaagattttcgttgatacagacgctgacgtacggttaacaaggaggatccatcgtgataccattgacaagggtagagatctcaaagctgtgttagaacagttctcaaaatttgttaagcctgcttttgaagacttcatcctcccaacgaagaagtatgctgatgttatcatcccacgcggaggagacaatgatgtggcaattgacctaatcgttcagcatattcggactaaacttggacaacatgatcttcgtaaaatacaccctaatctgtatgtaattcagactacttatcagatacgaggcatgcacacaataataagggatgctgccacagcaacacatgatttcatattttatgctgatcggttgattcgattggttgtcgaacatggtcttggtcatcttcctttccaggaaaagcaggtcatcactccgactgggtctgtttacactggtgtggagttctccaaaaggttgtgtggtatctcagtgatcaggagtggcgaaagtatggagaatgcactacgtgcatgctgtaaaggtataaagattgggaagattcttattcatcgggaagctcatctatcaaaatttaccaaaagatattgcaaataggcatgttctgctgttggaccccatattgggaacaggaaactcagcagttcaagccatctcccttctattaaagaagggtgtacaggaagcaaatatcatatttcttaatcttatttcagcgccccaaggagtgcatgtggtgtgcaagagattccctagaatgaagatcgttacttcggagattgagtccggtctaaatgatgatttccgtgtcgtacctgggatgggcgaatttggagacagatacttcggaacagatgaatatcagtcatcgacgccatttttctgtgacgataaaaatcgtgtcaggctcttgtgagaagacaacataagccatggacgcggcatattctccaattttttagaaacttatatctgcatttcgaactctagaatgcacatataatgatgctttctttaccatacagacagcacagaacacctcttggtataattggacccattccatttttgtctgtttggaaagcagtgtcatgttcagtagcctctagaaggaacattttttttctttcatgtaataaattagggtaaaaaggatgttttggatcggaacttaattcacataaaaagtgtgaagcttaaatacgaactcctgtcgacttttgattttttttttgaagtatcaataagtgtgtaatctttttcttattcagctattc

SEQ ID NO: 42373 - DNA, 2380 bp, Zea Mays
cttctcaacaagaaagcaaattccctgtccgaatcctcattttccacgaaccaaaatcactatttcttatatattctattccctctcctctctgcaccgcccgccgcgccgagcacgcctctccctccctcgatccagatccaccccatacctccgcggcgccaccccttcccgctccttctagccggcgtcggcgcgggccggagatctgttttctccggtaggaaaaatcctattgcgatctaaatatgggttcgaaatcggtagacgaggtgctcgacgccgccgccgccggagtccattactccgcactccgtctggacggccaggcttccgcaacgacgtctggcctggagaacggccaccaggagccctttgtcattggtgttgctgggggtgcatcgtcaggcaagagtaccgtgtgcaagatgatcattgatcagctccgtgaccagcgtgtcgtggttgttacgcaggagtccttttattatggattgacggatgaagaattagtacatgtccataattataactttgatcatccagacgcatttcatacagagctacttctctcttgtatgcaaaacttgaaatgtggcaaagctgttgacatccctaactacaacttcaagacatacaaaagtgtcccaaatgcaaggaaggttaatccttcggatgttattattttggaaggaattctagtttttcatgattcacgcctcagggatttgatgaacatgaagattttcgttgatacagacgctgacgtacggttaacaaggaggatccatcgtgataccattgacaagggtagagatctcaaagctgtgttagaacagttctcaaaatttgttaagcctgcttttgaagacttcatcctcccaacgaagaagtatgctgatgttatcatcccacgcggaggagacaatgatgtggcaattgacctaatcgttcagcatattcggactaaacttggacaacatgatcttcgtaaaatacaccctaatctgtatgtaattcagactacttatcagatacgaggcatgcacacaataataagggatgctgccacagcaacacatgatttcatattttatgctgatcggttgattcgattggttgtcgaacatggtcttggtcatcttcctttccaggaaaagcaggtcatcactccgactgggtctgtttacactggtgtggagttctccaaaaggttgtgtggtatctcagtgatcaggaggcactcacataaggagggggaaatgagctttgtacaagtataacagtgatatcattatgttgatactatgccttagatagcctgtgaattattttttgccgcattggcacttcacaaatgctcgacacttggccatattgaaaacttcatcccagtctcagttatctttgctatatatatgtactgttcattgttcctacaaatacagtatggttgttttagctataaaacatgcacaattgacccctcatgcactagaattcaattcatcagtcatcacaagaacatctatgtactctacaaatgatttgctacaactggtttccagtggcgaaagtatggagaatgcactacgtgcatgctgtaaaggtataaagattgggaagattcttattcatcgggaaggtgacaatggacaacagctcatctatcaaaatttaccaaaagatattgcaaataggcatgttctgctgttggaccccatattgggaacaggaaactcagcagttcaagccatctcccttctattaaagaagggtgtacaggaagcaaatatcatatttcttaatcttatttcagcgccccaaggagtgcatgtggtgtgcaagagattccctagaatgaagatcgttacttcggagattgagtccggtctaaatgatgatttccgtgtcgtacctgggatgggcgaatttggagacagatacttcggaacagatgaatatcagtcatcgacgccatttttctgtgacgataaaaatcgtgtcaggctcttgtgagaagacaacataagccatggacgcggcatattctccaattttttagaaacttatatctgcatttcgaactctagaatgcacatataatgatgctttctttaccatacagacagcacagaacacctcttggtataattggacccattccatttttgtctgtttggaaagcagtgtcatgttcagtagcctctagaaggaacattttttttctttcatgtaataaattagggtaaaaaggatgttttggatcggaacttaattcacataaaaagtgtgaagcttaaatacgaactcctgtcgacttttgattttttttttgaagtatcaataagtgtgtaatctttttcttattcagctattc

SEQ ID NO: 42374 - DNA, 1263 bp, Zea Mays
agccgccaccgccagcgaatcacgtgacttcccctccccttctcccctctccactccatcgtcaaggaaggaacacggccctaactaaaccctagctaagggaagggaaacaagaccatggatgcctccaagctccgcgagcttcgcgacttcgtcgaggcgtgcaagaagaatccttcgctcctcgccgaccccaacctctccttcttccgggattacctccagagtttgggtgccaaaattcccgccgccgccccctctttcgaaagtcccaaggtaacattacccatccatcttctcctctatccaccccgcagatcttccatggacgacattgatgacgacggtgatgacgacgacgatttggatatgagggatcccactcctgagcgagacgagctcgatgaagagattgttgagtctgatcttgagctcgaaggagaaattgtacagtctgaccatgatgacccaccacagaagatgggaaatccttcagtggaggtgactgaggaaaaccgtgatgcttcccaagaagcaaaaggcaaggctatggaagcaatttctgaaggaaaacttgaagatgctattgaacaccttaccaacgcaatagtgctgaatccactctcagcaatcatgtatggtactagagcatctgtgtttataaaaatgaagaaaccagctgctgccattcgtgatgccaatgctgctctagagatcaacccagactctgcaaaaggctataaaactcgtggaatggcatatgccatgcttggcaaatgggaggaagctgctcatgatctgcacacagcatctaacatggattacgacgaggagatcaatgctgtgctcaagaaggtggagcctaatgctcacaagatagtggaacatcgcaggaagtatgagaggttgagaaaagagagggaggaaaagagagcgcagcgtgatcggcttcgtcaacgtgcagaggcgcaggctgcttacgacaaggccaagaggaaggagcaatcgtcaagtcgctcatcaggaggtgcatctcccagaggctttcctggagggatgcctggtggtggtttccctagagggatgcccggtggaggtttccccgggggtggcatgcctgggggtttccctgggggtggcatgcctggaggtttccctggtggtgttcccggtaatgttgatatgagtaaaatcctgaatgaccctgacctgatggcagcattcagtgacccagaggtcatggcggctttacaagatggtatg

SEQ ID NO: 42375 - DNA, 1073 bp, Zea Mays
gaatatgccttggtgcccatgggtgagttggagaaggagtgaagctaatctgttgctgactgtgctgtgtgtctgtttgtgtgttggcacacatgcagtgaactaagccatgtgtttccctgtgtttgtagcctttgtggagctggggaaggctgtccacgtgcttttgtgcatgtagtactggtcttcaagctcacttttcctatggacatgtggagatcaaaagggtttatctccttgttctttttctttgcaaactaggtccagagaagtgtatctcggttttctctatgctcttcgaccaaaacttggtagtctagcgtctgctaatgcttttgtaaccgaagcaagccaactaaaactgtcccaccgcccagagcacacccttgcactccctgcatccagatcgtggtgaccacgcccattccttttcggtctcatcgtggccagccgttctcaaggttaaccggaacatcgccacgccgccagtaaacaccgccgagggagtgtcttcgcgtcgaccgactaaattgttgtctctccgagccaaccaatagcacctagaagatgaagttgaagtggaagtagaaggagaacaaattccccaaccagaagcttctacatctgaagttcctcctgaaggtccttctgaagaacctcctcctgagaacagggcttattttgatatctgtggtgaggtggtagtgtctcctccacatcaaggttatgctcgaagcgtgtggtagtgggtctgatcccacagcagggactggatttgttgactccctcttcgcgttcccttctcctggtggtggtggcggcagcggtcaaagctctaaccacccaagtggtggttatctctaaacacttgaactcgtgcacgctatgtttcttaactcgttgactctatgttttttgcgaactaaacacttgaacttatgtcgtactttctatttgaaatgtttgtgtaaactatgttggtgaatgttatgtttgtaattcgtgaattgattatgaatgcatgtgtttgtaatgtgtctgttctgtgtgatatatatgttatgtgtgcaatt

SEQ ID NO: 42376 - DNA, 1313 bp, Zea Mays
gaatatgccttggtgcccatgggtgagttggagaaggagtgaagctaatctgttgctgactgtgctgtgtgtctgtttgtgtgttggcacacatgcagtgaactaagccatgtgtttccctgtgtttgtagcctttgtggagctggggaaggctgtccacgtgcttttgtgcatgtagtactggtcttcaagctcacttttcctatggacatgtggagatcaaaagggtttatctccttgttctttttctttgcaaactaggtccagagaagtgtatctcggttttctctatgctcttcgaccaaaacttggtagtctagcgtctgctaatgcttttgtaaccgaagcaagccaactaaaactgtcccaccgcccagagcacacccttgcactccctgcatccagatcgtggtgaccacgcccattccttttcggtctcatcgtggccagccgttctcaaggttaaccggaacatcgccacgccgccagtaaacaccgccgagggagtgtcttcgcgtcgaccgactaaattgttgtctctccgagccaaccaatagcacctagaagatgaagttgaagtggaagtagaaggagaacaaattccccaaccagaagcttctacatctgaagttcctcctgaaggtccttctgaagaacctcctcctgagaacagggcttattttgatatctgtggtgaggtggtagtgtctcctccacatcaagggtgataggagttgaatgattaaacacttgttgcataaatcattccttggaatattccaccgccaccacaatggagccagtttgcatccacactagctctgccaccacagttcaacacccctccgacacatataccgacacctagagatagggtacgtttgataactctcgatgaatttatacacttgtatactttttgatatttgcatttaacgtgttgatatttgctaacttgcataggttatgctcgaagcgtgtggtagtgggtctgatcccacagcagggactggatttgttgactccctcttcgcgttcccttctcctggtggtggtggcggcagcggtcaaagctctaaccacccaagtggtggttatctctaaacacttgaactcgtgcacgctatgtttcttaactcgttgactctatgttttttgcgaactaaacacttgaacttatgtcgtactttctatttgaaatgtttgtgtaaactatgttggtgaatgttatgtttgtaattcgtgaattgattatgaatgcatgtgtttgtaatgtgtctgttctgtgtgatatatatgttatgtgtgcaatt

SEQ ID NO: 42377 - DNA, 1312 bp, Zea Mays
gaatatgccttggtgcccatgggtgagttggagaaggagtgaagctaatctgttgctgactgtgctgtgtgtctgtttgtgtgttggcacacatgcagtgaactaagccatgtgtttccctgtgtttgtagcctttgtggagctggggaaggctgtccacgtgcttttgtgcatgtagtactggtcttcaagctcacttttcctatggacatgtggagatcaaaagggtttatctccttgttctttttctttgcaaactaggtccagagaagtgtatctcggttttctctatgctcttcgaccaaaacttggtagtctagcgtctgctaatgcttttgtaaccgaagcaagccaactaaaactgtcccaccgcccagagcacacccttgcactccctgcatccagatcgtggtgaccacgcccattccttttcggtctcatcgtggccagccgttctcaaggttaaccggaacatcgccacgccgccagtaaacaccgccgagggagtgtcttcgcgtcgaccgactaaattgttgtctctccgagccaaccaatagcacctagaagatgaagttgaagtggaagtagaaggagaacaaattccccaaccagaagcttctacatctgaagttcctcctgaaggtccttctgaagaacctcctcctgagaacagggcttattttgatatctgtggtgaggtggtagtgtctcctccacatcaaggtgataggagttgaatgattaaacacttgttgcataaatcattccttggaatattccaccgccaccacaatggagccagtttgcatccacactagctctgccaccacagttcaacacccctccgacacatataccgacacctagagatagggtacgtttgataactctcgatgaatttatacacttgtatactttttgatatttgcatttaacgtgttgatatttgctaacttgcataggttatgctcgaagcgtgtggtagtgggtctgatcccacagcagggactggatttgttgactccctcttcgcgttcccttctcctggtggtggtggcggcagcggtcaaagctctaaccacccaagtggtggttatctctaaacacttgaactcgtgcacgctatgtttcttaactcgttgactctatgttttttgcgaactaaacacttgaacttatgtcgtactttctatttgaaatgtttgtgtaaactatgttggtgaatgttatgtttgtaattcgtgaattgattatgaatgcatgtgtttgtaatgtgtctgttctgtgtgatatatatgttatgtgtgcaatt

SEQ ID NO: 42378 - DNA, 1305 bp, Zea Mays
gaatatgccttggtgcccatgggtgagttggagaaggagtgaagctaatctgttgctgactgtgctgtgtgtctgtttgtgtgttggcacacatgcagtgaactaagccatgtgtttccctgtgtttgtagcctttgtggagctggggaaggctgtccacgtgcttttgtgcatgtagtactggtcttcaagctcacttttcctatggacatgtggagatcaaaagggtttatctccttgttctttttctttgcaaactaggtccagagaagtgtatctcggttttctctatgctcttcgaccaaaacttggtagtctagcgtctgctaatgcttttgtaaccgaagcaagccaactaaaactgtcccaccgcccagagcacacccttgcactccctgcatccagatcgtggtgaccacgcccattccttttcggtctcatcgtggccagccgttctcaaggttaaccggaacatcgccacgccgccagtaaacaccgccgagggagtgtcttcgcgtcgaccgactaaattgttgtctctccgagccaaccaatagcacctagaagatgaagttgaagtggaagtagaaggagaacaaattccccaaccagaagcttctacatctgaagttcctcctgaaggtccttctgaagaacctcctcctgagaacagggcttattttgatatctgtggtgaggtggtagtgtctcctccacatcaaggagttgaatgattaaacacttgttgcataaatcattccttggaatattccaccgccaccacaatggagccagtttgcatccacactagctctgccaccacagttcaacacccctccgacacatataccgacacctagagatagggtacgtttgataactctcgatgaatttatacacttgtatactttttgatatttgcatttaacgtgttgatatttgctaacttgcataggttatgctcgaagcgtgtggtagtgggtctgatcccacagcagggactggatttgttgactccctcttcgcgttcccttctcctggtggtggtggcggcagcggtcaaagctctaaccacccaagtggtggttatctctaaacacttgaactcgtgcacgctatgtttcttaactcgttgactctatgttttttgcgaactaaacacttgaacttatgtcgtactttctatttgaaatgtttgtgtaaactatgttggtgaatgttatgtttgtaattcgtgaattgattatgaatgcatgtgtttgtaatgtgtctgttctgtgtgatatatatgttatgtgtgcaatt

SEQ ID NO: 42379 - DNA, 1220 bp, Zea Mays
ggacataggagttgccttttgtgccctagcatggtgcaactaatatatggtctggggccctttggcattttacaaaggcttcctgccaaactttgcaagactgggatcttggaatgtgattatgttcttgacattggagcaggttcaaaagctgtttgtgaggaaagcgacaagctgaagatagagtttttgcagtcaggtggcgtacaattgacgcacagggtttttcttctatagacaaaaggggagaaatgacacctcccccctcgagaattggggaacaaggacagatctgacacctcaattgcgagaaataaaaataacagccgacagttgcatgatccctgaacgaataaattcagaactagaaaacagatgtcagtaaacaacatgtggtgaatgttggaacttgaactgctctagttcagtgggcatctgttgttgcatgcttgggatggatttaatgtttcgttttttttcttccttgtactgaagtgctctgatcggtaacgatcactgtgtgtgaagtgcttgattgttatgtggtatcatgagaatgaataaacataataatggagctgtttttttattttttactgaagaagcaagctgctgccattacattcctgacaaggagtcgagaagcagagcacacgacaacaaacacagcactgtgtgcacacatgctccaattcagatgttgctcctgatcttcatcttgccgaagagcgagtgcctcccctcggcgaccaccagccccgtggcggcgttggcgacgatgacgtgcgtgccggagtaggcgcccttgtggccgagcgccctggcggtgatgcggagggcgtccccgggcgcggcggcgtcgaggtcaacgaagttgacggacatgtcgacggagaccttgaggtggtggccgtcggacacggaggcggcggagccgatctcgtccaccagggccaccacggcgccgggggctatgtgatcgctgccggaggtgaggcgtgcggggaccgtgaaggagcagaggatgtggcctgggcggatgctctccacgcggatcccgtggagcgcgaacccctcgaagaagctgggggcggcggcagaaacagcagctcgacggttgagcgcgtccaccagcgcaccatcctcatcgctcacccttacctgcagcagcgccttcgggtcatggtcatcagaagcggccatggtggttggggagaggg

SEQ ID NO: 42380 - DNA, 3206 bp, Zea Mays
ctggaaccttccccctcctcagcaggcagcagcagctccttcaaattccccagtcaaagctgcggccgccatcctcacttgcctctcctcagcccgcacgagcacgaaacatcgcgccctagtaagctaagcagcaggctgattccccacgaaaagctccgactttgaccgccggcgagccatgtccgccgcgccggatgagttcctggcacaggggacctacctcgccgcccccgagcccttctccccctccatcttcctcgacctgcccccgacgccacgccccaacggcgacgacccgacctccgacgacccagcctcctccgacgatctcgtcctccccttcatctcgcggatgctcatggaggaggacatcgacgacaagttcttctaccagttccccgaccaccccgcgctcctcagcgcccagcagccgtacgcacagatcctctccgacgccaccgcctcctcctcctccgactccgccaccgccatcagctcagggaccgtcgggaactccaccctctcgtcctcctcccttgccgccgcatctgccgaacccacctggccctacgacccaatcgaactctcccagctgctgcgctctcctccgtacccggacatgggggtggggctcgatgatttcaccaccgaagaggtcaacgccgtcttcttgccgggacaagacgccgcgttccagccgagtccggcgttctttgttaccggcggtagcggccaacggctgagcgcttccctcaccgcccagaacgttggcggtgttggagctcaacagcagcgtgtttccctcgttgcccaggacgccggtgatagcgtggccatccagaggtcggcgttcttgaatggcgcggaggagacgaagacagaggccaccaccttgcctgctggtgatggtgaccatgccgcgctgttgtcggccttcttgggtgcgcagaatggggaaaacatggacatgctcaacgtggccttcctcaaaggcatggaagaggccaagaagttcttgcccaccaataatagccttcttgtcgaccttgacgacacctatggccaatccttgcctacagacagagacaccaagccgtgcactgcctttgctgctacccaagtgaaggaggaggaggtggtggtggatgtaatatcaatgtttggaggaagtagcaatggcaggggccggaagaacagtcacacccaagaggacttggagtcggagatgggcagaaacagcaagctgatgatgcctgaacaagaagaaactggtgctagtgagctattcgacgaattaatgtcctgcaaatatgatggattcttgaaacacatgcaggatctgcgcatcgccatggatagcgagtctgagaagagtgtgaggagggtgagtgggaagggggcacgagggaagcagcatgggaatgagtttgttgacctgcacaccatgcttatccattgcgcacaggcaatggccaccggtgatcgccgaagtgcaaccgagatgctgaaacagatcaagcagcactcctctctcagaggggatgccacacagaggttggcctattgttttgcagaaggactggaggtgcgacttgctggcacagggagccaggtgtaccagtccctcatggcaaaacgcacatccgttgtggagttcctcaaggcatacaagctatttttggcggccatcagcctcaataaggtagagaaggtgggcctccagaggtgagattcaccggcattgaccttccacagccagggttccgcccagcctaccagattgaagaaacaggccgccggcttagcaactgtgcccgtgaattcggtgtgccattcaagttccatgctatagcagcaaagtgggagatggtctctgccgaggacctgaacattgatccagatgaggtgcttgttgtgaacagcgattgccacttgagcaacttgatggatgagggtgttgacgctgacaccccaagcccccgagatttggtgctcaacaacattcggaagatgcgacccaatattttcatccagattgtcaatagtggcacatatggtgctccattcttcctcacacggttccgggaggcactgttctactactcagcactatttgacatgctggatgcaaccattccccgggataatgatgaacggctgctgatcgagcgggatattgttgggcgatctgccctgaatgttattgcttgtgagggtgcagacaggttggatcgccctgagacttataagcaatggcaggtgcggaaccaccgggctgggctcaagcagctaccgttgaatccagaggttgtaaagcttgccagggataaggtcaagaaatattaccacaaagactttctcatcgatgaggatcgccaatggttgttgcagggatggaaagggcgggtcctctttgccatgtcaacttgggttgctgaggataataactccaccttttagctgcttcactttgtcttgttttggattatgagtgatattgatgtttgatggatggtctgtgtctttattttaccaccaaactacgacccagcatctgtggcccgctggacttctgtttctagagggttttagtgctgaaactttgtaagctagtagaaaaataagtagatgcttagaggtacataggatgctgatatatttctggatatgttgcagaattgtgatgtgtacatcatctgtaactgataaaagcaattttattgattacttaatcgaccttttatccgtctcttgcagttctgtttattctgtatcattggactgttggcatttcccttgtgtctaggcgtgattatcaaagttgctctgtttaataaaagtattctatttggctcgatatcttccatcattttctcatccagacagacaagtacagctaaaagtgttcactggattcaggattatgtgatgtttctgcaatgtgtgaagaatcaggcttgtatctgcttgattgaggatgcattcaaatgattggataacttacagtttgcttcgcctgtccatgtgtggaacatgagagaacaccggaagtagtagaagcccgtacgaactggagaacaccagaagaagcagtagacgccggtacaaattaaagtcaaacgaatagacctaagagtattatattcccagctgaccatagtcatatgattcaggtttattgttgtccactaaaagaaagaaat

SEQ ID NO: 42381 - DNA, 1578 bp, Zea Mays
ccaaaccctcctctcctccctgtactggtcgtctccgtctccggccgccttccccgaaccttccctatctcggccttcataaaaatcaaaatcaccccacccaacaccatcatcgccggcccatcccacatcaagccaagtccgactccgattctcccacgccaagcaaaaaacctccgattcctatctgtctcgcccaccgccgccggtgggacgagccaacatgtccgccacgccggaggacttcctgggggcgccgtacctggccgcgccggagcccttctcgccctccgtcttcctcgacctgcccccgacgccggagcgcccggataactccgacgacctcgtcctcccctacatcgcccagatgctcatggaggaggacatcgacgacaagttcttctaccagttccccgaccacccggcgctcctcaccgcccagcagccctacgcgcagatcctatccgactccgccaccgccaccgccacctcctcttcgtccgactccgccaacgccaccagcagcagtagcgcctcggggaccggcggcaactccaccctctcgccctcttccgacgcccccgccgaacgggggggacacggacatgcttaacatggccttcctcaaaggcatggaggaggccaagaagttcttgcccaccaacaacagcctactcatcggccttgatgaaacctcctgcaaatccttgcctaaagacagatacatcaagccctacactgcctttgccgctacccaagtgaaggaggaggaggagcatgtggtggtgcatggaaatggaatgccaatgtttgggggaagcagaagcaccaatggcagggtccgcaagaaccaccgtgctgagggggatgatctggaggctgagacaggcaggagcagcaagctgatgatgccggaacaggaggaaaccggtgccaacgagctttacgatgaaatcatgaattgtacctatgagggattcatgaagcgcatggaggacctgcgcatcgccatggacagcgagtctgagaagagcgccaggaaggtcagcaggaagggggcgcgggggaggcagcagctcgtgaacgaggtcgttgacctgcgcaccatgctcatccattgcgcacagtcggtggccaccggcgaccgccgaagcgcggccgaggtcctgaagcagatcaagcaccactcctcacccaaaggggatgccacacagaggctggctcattgtttcgccatgggactggaggcacggcttgcaggcacggggagccaggcgtaccagtcgctcatggcacaacacacttcggtcgtggaatttctcaaggcatatagcctttacatggcagccagctgcttcatgaaggattggataacttacagtttgcttcgcctgtccatgtgtggaacatgagagaacaccggaagtagtagaagcccgtacgaactggagaacaccagaagaagcagtagacgccggtacaaattaaagtcaaacgaatagacctaagagtattatattcccagctgaccatagtcatatgattcaggtttattgttgtccactaaaagaaagaaat

SEQ ID NO: 42382 - DNA, 3015 bp, Zea Mays
gtaggttcttgcccattaacatacccgtggcggctggagatatcatcccgtatccgtctttgtatgggggtaaaaccgtcggttattcgggtttccgttatgtattgccatcgtctatgcactgcatttcccttcctcacctccggcgcaaaaccgcagcagtaggatcccagccggtcggccgcccaggatgccggagcctgcgtccccgccctcagcggcgggagccggccgccacatatccactccacatcaacaagggagtggagaatgctcccggcgcctcttcgatctcgacctccggccggcctcatgtgggagacgagggacgatgggctcccttccctcagcgtcagcgggttgtgaccccatatagccggatgtcagtcaattcatccatggcgatcaatccattcctcgagcaggccaaggttcttctctgggttttgaggaaggacccatctgcgatgctcatctaattaaggttacctggtcatcttgctactcggtcgcctacaggatcggatagcttactctatctataatcacaccgagcaaactgtccatcctagctacaatgggtagcacgcacaaggaagaagtaggtgtcctggaggaaatacttgacgggagaaaagagccgaggaagctatctttatcagttctaaaacacatcacaaatgacttctcgcacgagcgaataatcggttatggtgggtgcggagaggtttacaagatgaacagggcatcctgcaaaacggaagcgtcgctgtgaagaaaatcttcagcaacctaaatgttgaagataaggaatttgatcgagagattcagagcatgatgcaggtgaagcatccaaacgtagtgcggtttattggctactgttctaacacagagcatgaactgatgagaaaagaaggcaagtatattaaggtcgaggtgcgagaaaggctgctctgtttcgagcatatcagcaacggaagcctccgcagccacattacaggtgtcataatgctggagctggtgaccgggagcaaggaggagccggacattactaatgtacttcgacggtggagccataggtggaaaaaatcaggacagcgtacaccatcatttcaacgccatcaagtgagtaaatgcataggtttggctaagagatgcaaagaagtagaaccaacaagaaggccttctatatgtgatatacttgctgccctaggcaaaatggaagatatgaattgcagtgatcaacaagtggacgaggaagtcacttatctggaggacatgctaggaatcgagcctcttgatctgcatttcctagtcgaacctaccaagcagatatcctgctcagtccatctgaccaacgctacgaatgactgtttcgccttcattgttcagacgacgaacccgaagcagtactgcatacagccggacagaggcgtcgttccaccacgatctgagtgtagtgttgccatcgtattatcgcaagaaccgacgcataataagcgatgcagcatggaggacgagctaagcgtgcagagcaccagagtggatgagggtgtgacagctgcggatgtgagtgaagcgttgttcactggaaaggaagatagaacggtcgatcacgtgagcctgatggtcggtttcgacatgtcgccatcgccacctgaggaacaaacggaggacttcacgtttgcaccactggcgtcgttgtacgacgaggagccacagttaagcgcggcgaaggtatcagtatggacatccaatcagttggggcgttctggtcgcttctctaagaagaagctagtgtctattctgaaatcctggcgagcaagattaaaggtatcatcccataagaaactcgagactccaaagcatgactgtgagattcctgaagctgtagagcatgaagaagttgccgcgcccaggtgtcccaaaggaccactgccacagcgcgatctttctccactgggcgaagcatgttctaggatgaacatgacggcgatccatgagatcctagtgaacagacattacagagatgatgacctagacccaaacgtgccgtcgctcgaggaatggacacagcagagcagggatatgttggatgataggaaacgtggggacttcacttttcgtgataaagatttccgagcagccatagactggtataccaagtgtatggatgtggggccaaagaaggcgtcaccaacagttctcgttcgacgcagttgctgccacctcatgtgcggcaacctggacgccgccctccgcgatgcaatgcaagcgcagcgtcagtatcccgactgcccaacctcactgtacatgcaagcagtggcactttcaaagctagggatgcatagtcaagccatgggcatgctgattgaggcgtcggagatggaagcgaatcagaaaaagacccgaaaagcagcttaagaagactcaacatgggcgaaacctatataccttcgttttgtttctgtaagctattcttgattgttgtatctgcttgccaaattgtctaggttggagtggaattgggaagctttacctcttggggataatgcatttcttgttgtattcccctctgaggatgaaatgctccgtatggctgatattgagtataagctcaagagtggaatttctattcatatggattaggcctggagatgctaatccggcctattttttttggatgagatttgggtgcatgtttctggtgttccgcatgaatggctgacacttcttggcattctgggcactactcttgacatacaggaaggggattattcgcctgctggttactcttgacatacaggaaggggatctatgattggcactactattgacaaagtggggtatgagattacaatcactcccgagccgtcggattttgaaccagcaatgcctcccaaatttgacaaggaggatggggattcaggcgggggagagagaatctggtacgtcgagaaagaagcaaaaaagtgcgacaagctcctttcaaatttgtaagatagctcccatgag

SEQ ID NO: 42383 - DNA, 3083 bp, Zea Mays
gtaggttcttgcccattaacatacccgtggcggctggagatatcatcccgtatccgtctttgtatgggggtaaaaccgtcggttattcgggtttccgttatgtattgccatcgtctatgcactgcatttcccttcctcacctccggcgcaaaaccgcagcagtaggatcccagccggtcggccgcccaggatgccggagcctgcgtccccgccctcagcggcgggagccggccgccacatatccactccacatcaacaagggagtggagaatgctcccggcgcctcttcgatctcgacctccggccggcctcatgtgggagacgagggacgatgggctcccttccctcagcgtcagcgggttgtgaccccatatagccggatgtcagtcaattcatccatggcgatcaatccattcctcgagcaggccaaggttcttctctgggttttgaggaaggacccatctgcgatgctcatctaattaaggttacctggtcatcttgctactcggtcgcctacaggatcggatagcttactctatctataatcacaccgagcaaactgtccatcctagctacaatgggtagcacgcacaaggaagaagtaggtgtcctggaggaaatacttgacgggagaaaagagccgaggaagctatctttatcagttctaaaacacatcacaaatgacttctcgcacgagcgaataatcggttatggtgggtgcggagaggtttacaagatgaacagggcatcctgcaaaacggaagcgtcgctgtgaagaaaatcttcagcaacctaaatgttgaagataaggaatttgatcgagagattcagagcatgatgcaggtgaagcatccaaacgtagtgcggtttattggctactgttctaacacagagcatgaactgatgagaaaagaaggcaagtatattaaggtcgaggtgcgagaaaggctgctctgtttcgagcatatcagcaacggaagcctccgcagccacattacagaggatactgcgctccagaataccaataccatggcaaaatgtcccttaagtctgacatctatagtttaggtgtcataatgctggagctggtgaccgggagcaaggaggagccggacattactaatgtacttcgacggtggagccataggtggaaaaaatcaggacagcgtacaccatcatttcaacgccatcaagtgagtaaatgcataggtttggctaagagatgcaaagaagtagaaccaacaagaaggccttctatatgtgatatacttgctgccctaggcaaaatggaagatatgaattgcagtgatcaacaagtggacgaggaagtcacttatctggaggacatgctaggaatcgagcctcttgatctgcatttcctagtcgaacctaccaagcagatatcctgctcagtccatctgaccaacgctacgaatgactgtttcgccttcattgttcagacgacgaacccgaagcagtactgcatacagccggacagaggcgtcgttccaccacgatctgagtgtagtgttgccatcgtattatcgcaagaaccgacgcataataagcgatgcagcatggaggacgagctaagcgtgcagagcaccagagtggatgagggtgtgacagctgcggatgtgagtgaagcgttgttcactggaaaggaagatagaacggtcgatcacgtgagcctgatggtcggtttcgacatgtcgccatcgccacctgaggaacaaacggaggacttcacgtttgcaccactggcgtcgttgtacgacgaggagccacagttaagcgcggcgaaggtatcagtatggacatccaatcagttggggcgttctggtcgcttctctaagaagaagctagtgtctattctgaaatcctggcgagcaagattaaaggtatcatcccataagaaactcgagactccaaagcatgactgtgagattcctgaagctgtagagcatgaagaagttgccgcgcccaggtgtcccaaaggaccactgccacagcgcgatctttctccactgggcgaagcatgttctaggatgaacatgacggcgatccatgagatcctagtgaacagacattacagagatgatgacctagacccaaacgtgccgtcgctcgaggaatggacacagcagagcagggatatgttggatgataggaaacgtggggacttcacttttcgtgataaagatttccgagcagccatagactggtataccaagtgtatggatgtggggccaaagaaggcgtcaccaacagttctcgttcgacgcagttgctgccacctcatgtgcggcaacctggacgccgccctccgcgatgcaatgcaagcgcagcgtcagtatcccgactgcccaacctcactgtacatgcaagcagtggcactttcaaagctagggatgcatagtcaagccatgggcatgctgattgaggcgtcggagatggaagcgaatcagaaaaagacccgaaaagcagcttaagaagactcaacatgggcgaaacctatataccttcgttttgtttctgtaagctattcttgattgttgtatctgcttgccaaattgtctaggttggagtggaattgggaagctttacctcttggggataatgcatttcttgttgtattcccctctgaggatgaaatgctccgtatggctgatattgagtataagctcaagagtggaatttctattcatatggattaggcctggagatgctaatccggcctattttttttggatgagatttgggtgcatgtttctggtgttccgcatgaatggctgacacttcttggcattctgggcactactcttgacatacaggaaggggattattcgcctgctggttactcttgacatacaggaaggggatctatgattggcactactattgacaaagtggggtatgagattacaatcactcccgagccgtcggattttgaaccagcaatgcctcccaaatttgacaaggaggatggggattcaggcgggggagagagaatctggtacgtcgagaaagaagcaaaaaagtgcgacaagctcctttcaaatttgtaagatagctcccatgag

SEQ ID NO: 42384 - DNA, 3552 bp, Zea Mays
gtaggttcttgcccattaacatacccgtggcggctggagatatcatcccgtatccgtctttgtatgggggtaaaaccgtcggttattcgggtttccgttatgtattgccatcgtctatgcactgcatttcccttcctcacctccggcgcaaaaccgcagcagtaggatcccagccggtcggccgcccaggatgccggagcctgcgtccccgccctcagcggcgggagccggccgccacatatccactccacatcaacaagggagtggagaatgctcccggcgcctcttcgatctcgacctccggccggcctcatgtgggagacgagggacgatgggctcccttccctcagcgtcagcggtgagttctaagcccaaaaggtatttcagagttgggctttggacgatatgcagcagaaagggaacctaggtcgtcccgactctcttcttcctacttcctcaaaacaattagtgcgagaatcctactaagtcaagtcctcgagtattttagtatcgactaacactcaattttttttcacgaatcaacggaagacaaatttttttagaaaagggaagctttattcagaagtctaggatataaaaacaaactctcaaaaacggccacccatgtttgggtggatctccactgctgataccgatgctgatggttctttttctagtttattagcatggtgatagcccaatcgattatcgttcattccttttgtagtttattactattattattgatgacgcctgtttctgaccactcctttcggccggccaaattaactctggaatttattccatgccttcctcggccctgtttgttctgcatgtcttcaaagggttgtgaccccatatagccggatgtcagtcaattcatccatggcgatcaatccattcctcgagcaggccaaggttcttctctgggttttgaggaaggacccatctgcgatgctcatctaattaaggttacctggtcatcttgctactcggtcgcctacaggatcggatagcttactctatctataatcacaccgagcaaactgtccatcctagctacaatgggtagcacgcacaaggaagaagtaggtgtcctggaggaaatacttgacgggagaaaagagccgaggaagctatctttatcagttctaaaacacatcacaaatgacttctcgcacgagcgaataatcggttatggtgggtgcggagaggtttacaagggcatcctgcaaaacggaagcgtcgctgtgaagaaaatcttcagcaacctaaatgttgaagataaggaatttgatcgagagattcagagcatgatgcaggtgaagcatccaaacgtagtgcggtttattggctactgttctaacacagagcatgaactgatgagaaaagaaggcaagtatattaaggtcgaggtgcgagaaaggctgctctgtttcgagcatatcagcaacggaagcctccgcagccacattacagaggatactgcgctccagaataccaataccatggcaaaatgtcccttaagtctgacatctatagtttaggtgtcataatgctggagctggtgaccgggagcaaggaggagccggacattactaatgtacttcgacggtggagccataggtggaaaaaatcaggacagcgtacaccatcatttcaacgccatcaagtgagtaaatgcataggtttggctaagagatgcaaagaagtagaaccaacaagaaggccttctatatgtgatatacttgctgccctaggcaaaatggaagatatgaattgcagtgatcaacaagtggacgaggaagtcacttatctggaggacatgctaggaatcgagcctcttgatctgcatttcctagtcgaacctaccaagcagatatcctgctcagtccatctgaccaacgctacgaatgactgtttcgccttcattgttcagacgacgaacccgaagcagtactgcatacagccggacagaggcgtcgttccaccacgatctgagtgtagtgttgccatcgtattatcgcaagaaccgacgcataataagcgatgcagcatggaggacgagctaagcgtgcagagcaccagagtggatgagggtgtgacagctgcggatgtgagtgaagcgttgttcactggaaaggaagatagaacggtcgatcacgtgagcctgatggtcggtttcgacatgtcgccatcgccacctgaggaacaaacggaggacttcacgtttgcaccactggcgtcgttgtacgacgaggagccacagttaagcgcggcgaaggtatcagtatggacatccaatcagttggggcgttctggtcgcttctctaagaagaagctagtgtctattctgaaatcctggcgagcaagattaaaggtatcatcccataagaaactcgagactccaaagcatgactgtgagattcctgaagctgtagagcatgaagaagttgccgcgcccaggtgtcccaaaggaccactgccacagcgcgatctttctccactgggcgaagcatgttctaggatgaacatgacggcgatccatgagatcctagtgaacagacattacagagatgatgacctagacccaaacgtgccgtcgctcgaggaatggacacagcagagcagggatatgttggatgataggaaacgtggggacttcacttttcgtgataaagatttccgagcagccatagactgtgtatggatgtggggccaaagaaggcgtcaccaacagttctcgttcgacgcagttgctgccacctcatgtgcggcaacctggacgccgccctccgcgatgcaatgcaagcgcagcgtcagtatcccgactgcccaacctcactgtacatgcaagcagtggcactttcaaagctagggatgcatagtcaagccatgggcatgctgattgaggcgtcggagatggaagcgaatcagaaaaagacccgaaaagcagcttaagaagactcaacatgggcgaaacctatataccttcgttttgtttctgtaagctattcttgattgttgtatctgcttgccaaattgtctaggttggagtggaattgggaagctttacctcttggggataatgcatttcttgttgtattcccctctgaggatgaaatgctccgtatggctgatattgagtataagctcaagagtggaatttctattcatatggattaggcctggagatgctaatccggcctattttttttggatgagatttgggtgcatgtttctggtgttccgcatgaatggctgacacttcttggcattctgggcactactcttgacatacaggaaggggattattcgcctgctggttactcttgacatacaggaaggggatctatgattggcactactattgacaaagtggggtatgagattacaatcactcccgagccgtcggattttgaaccagcaatgcctcccaaatttgacaaggaggatggggattcaggcgggggagagagaatctggtacgtcgagaaagaagcaaaaaagtgcgacaagctcctttcaaatttgtaagatagctcccatgag

SEQ ID NO: 42385 - DNA, 3718 bp, Zea Mays
gtaggttcttgcccattaacatacccgtggcggctggagatatcatcccgtatccgtctttgtatgggggtaaaaccgtcggttattcgggtttccgttatgtattgccatcgtctatgcactgcatttcccttcctcacctccggcgcaaaaccgcagcagtaggatcccagccggtcggccgcccaggatgccggagcctgcgtccccgccctcagcggcgggagccggccgccacatatccactccacatcaacaagggagtggagaatgctcccggcgcctcttcgatctcgacctccggccggcctcatgtgggagacgagggacgatgggctcccttccctcagcgtcagcggtgagttctaagcccaaaaggtatttcagagttgggctttggacgatatgcagcagaaagggaacctaggtcgtcccgactctcttcttcctacttcctcaaaacaattagtgcgagaatcctactaagtcaagtcctcgagtattttagtatcgactaacactcaattttttttcacgaatcaacggaagacaaatttttttagaaaagggaagctttattcagaagtctaggatataaaaacaaactctcaaaaacggccacccatgtttgggtggatctccactgctgataccgatgctgatggttctttttctagtttattagcatggtgatagcccaatcgattatcgttcattccttttgtagtttattactattattattgatgacgcctgtttctgaccactcctttcggccggccaaattaactctggaatttattccatgccttcctcggccctgtttgttctgcatgtcttcaaagggttgtgaccccatatagccggatgtcagtcaattcatccatggcgatcaatccattcctcgagcaggccaaggttcttctctgggttttgaggtgaaatattgatcagttgcattctgtaacctgcaagaaggtttaatcggtgaaccattgtaatgtttggcttcaggaaggacccatctgcgatgctcatctaattaaggttacctggtcatcttgctactcggtcgcctacaggatcggatagcttactctatctataatcacaccgagcaaactgtccatcctagctacaatgggtagcacgcacaaggaagaagtaggtgtcctggaggaaatacttgacgggagaaaagagccgaggaagctatctttatcagttctaaaacacatcacaaatgacttctcgcacgagcgaataatcggttatggtgggtgcggagaggtttacaagatgaacagggcatcctgcaaaacggaagcgtcgctgtgaagaaaatcttcagcaacctaaatgttgaagataaggaatttgatcgagagattcagagcatgatgcaggtgaagcatccaaacgtagtgcggtttattggctactgttctaacacagagcatgaactgatgagaaaagaaggcaagtatattaaggtcgaggtgcgagaaaggctgctctgtttcgagcatatcagcaacggaagcctccgcagccacattacagaggatactgcgctccagaataccaataccatggcaaaatgtcccttaagtctgacatctatagtttaggtgtcataatgctggagctggtgaccgggagcaaggaggagccggacattactaatgtacttcgacggtggagccataggtggaaaaaatcaggacagcgtacaccatcatttcaacgccatcaagtgagtaaatgcataggtttggctaagagatgcaaagaagtagaaccaacaagaaggccttctatatgtgatatacttgctgccctaggcaaaatggaagatatgaattgcagtgatcaacaagtggacgaggaagtcacttatctggaggacatgctaggaatcgagcctcttgatctgcatttcctagtcgaacctaccaagcagatatcctgctcagtccatctgaccaacgctacgaatgactgtttcgccttcattgttcagacgacgaacccgaagcagtactgcatacagccggacagaggcgtcgttccaccacgatctgagtgtagtgttgccatcgtattatcgcaagaaccgacgcataataagcgatgcagcatggaggacgagctaagcgtgcagagcaccagagtggatgagggtgtgacagctgcggatgtgagtgaagcgttgttcactggaaaggaagatagaacggtcgatcacgtgagcctgatggtcggtttcgacatgtcgccatcgccacctgaggaacaaacggaggacttcacgtttgcaccactggcgtcgttgtacgacgaggagccacagttaagcgcggcgaaggtatcagtatggacatccaatcaggtgcgtgtgtgtgctttctcgctctggattccttcgcctgattggatcatgcatgactcgctctcagagtgcgcgtttacagttggggcgttctggtcgcttctctaagaagaagctagtgtctattctgaaatcctggcgagcaagattaaaggtatcatcccataagaaactcgagactccaaagcatgactgtgagattcctgaagctgtagagcatgaagaagttgccgcgcccaggtgtcccaaaggaccactgccacagcgcgatctttctccactgggcgaagcatgttctaggatgaacatgacggcgatccatgagatcctagtgaacagacattacagagatgatgacctagacccaaacgtgccgtcgctcgaggaatggacacagcagagcagggatatgttggatgataggaaacgtggggacttcacttttcgtgataaagatttccgagcagccatagactgtgtatggatgtggggccaaagaaggcgtcaccaacagttctcgttcgacgcagttgctgccacctcatgtgcggcaacctggacgccgccctccgcgatgcaatgcaagcgcagcgtcagtatcccgactgcccaacctcactgtacatgcaagcagtggcactttcaaagctagggatgcatagtcaagccatgggcatgctgattgaggcgtcggagatggaagcgaatcagaaaaagacccgaaaagcagcttaagaagactcaacatgggcgaaacctatataccttcgttttgtttctgtaagctattcttgattgttgtatctgcttgccaaattgtctaggttggagtggaattgggaagctttacctcttggggataatgcatttcttgttgtattcccctctgaggatgaaatgctccgtatggctgatattgagtataagctcaagagtggaatttctattcatatggattaggcctggagatgctaatccggcctattttttttggatgagatttgggtgcatgtttctggtgttccgcatgaatggctgacacttcttggcattctgggcactactcttgacatacaggaaggggattattcgcctgctggttactcttgacatacaggaaggggatctatgattggcactactattgacaaagtggggtatgagattacaatcactcccgagccgtcggattttgaaccagcaatgcctcccaaatttgacaaggaggatggggattcaggcgggggagagagaatctggtacgtcgagaaagaagcaaaaaagtgcgacaagctcctttcaaatttgtaagatagctcccatgag

SEQ ID NO: 42386 - DNA, 3303 bp, Zea Mays
gtaggttcttgcccattaacatacccgtggcggctggagatatcatcccgtatccgtctttgtatgggggtaaaaccgtcggttattcgggtttccgttatgtattgccatcgtctatgcactgcatttcccttcctcacctccggcgcaaaaccgcagcagtaggatcccagccggtcggccgcccaggatgccggagcctgcgtccccgccctcagcggcgggagccggccgccacatatccactccacatcaacaagggagtggagaatgctcccggcgcctcttcgatctcgacctccggccggcctcatgtgggagacgagggacgatgggctcccttccctcagcgtcagcgggttgtgaccccatatagccggatgtcagtcaattcatccatggcgatcaatccattcctcgagcaggccaaggttcttctctgggttttgaggaaggacccatctgcgatgctcatctaattaaggttacctggtcatcttgctactcggtcgcctacaggatcggatagcttactctatctataatcacaccgagcaaactgtccatcctagctacaatgggtagcacgcacaaggaagaagtaggtgtcctggaggaaatacttgacgggagaaaagagccgaggaagctatctttatcagttctaaaacacatcacaaatgacttctcgcacgagcgaataatcggttatggtgggtgcggagaggtttacaagatgaacagggcatcctgcaaaacggaagcgtcgctgtgaagaaaatcttcagcaacctaaatgttgaagataaggaatttgatcgagagattcagagcatgatgcaggtgaagcatccaaacgtagtgcggtttattggctactgttctaacacagagcatgaactgatgagaaaagaaggcaagtatattaaggtcgaggtgcgagaaaggctgctctgtttcgagcatatcagcaacggaagcctccgcagccacattacagatggactaagagggcttgaatggcacgcacggtataaaataattaagggaatttgtgagggcctacatcatcttcacatggaaaaaaacatcattcacatggatcttaaacctgccaacatactagtacatgatcaaatggtaccaaagattgcagactttggtctatcaaggctggctgaagtatcacgtactatgagcaatgaacggcttttatccctaggatactgcgctccagaataccaataccatggcaaaatgtcccttaagtctgacatctatagtttaggtgtcataatgctggagctggtgaccgggagcaaggaggagccggacattactaatgtacttcgacggtggagccataggtggaaaaaatcaggacagcgtacaccatcatttcaacgccatcaagtgagtaaatgcataggtttggctaagagatgcaaagaagtagaaccaacaagaaggccttctatatgtgatatacttgctgccctaggcaaaatggaagatatgaattgcagtgatcaacaagtggacgaggaagtcacttatctggaggacatgctaggaatcgagcctcttgatctgcatttcctagtcgaacctaccaagcagatatcctgctcagtccatctgaccaacgctacgaatgactgtttcgccttcattgttcagacgacgaacccgaagcagtactgcatacagccggacagaggcgtcgttccaccacgatctgagtgtagtgttgccatcgtattatcgcaagaaccgacgcataataagcgatgcagcatggaggacgagctaagcgtgcagagcaccagagtggatgagggtgtgacagctgcggatgtgagtgaagcgttgttcactggaaaggaagatagaacggtcgatcacgtgagcctgatggtcggtttcgacatgtcgccatcgccacctgaggaacaaacggaggacttcacgtttgcaccactggcgtcgttgtacgacgaggagccacagttaagcgcggcgaaggtatcagtatggacatccaatcagttggggcgttctggtcgcttctctaagaagaagctagtgtctattctgaaatcctggcgagcaagattaaaggtatcatcccataagaaactcgagactccaaagcatgactgtgagattcctgaagctgtagagcatgaagaagttgccgcgcccaggtgtcccaaaggaccactgccacagcgcgatctttctccactgggcgaagcatgttctaggatgaacatgacggcgatccatgagatcctagtgaacagacattacagagatgatgacctagacccaaacgtgccgtcgctcgaggaatggacacagcagagcagggatatgttggatgataggaaacgtggggacttcacttttcgtgataaagatttccgagcagccatagactggtataccaagtgtatggatgtggggccaaagaaggcgtcaccaacagttctcgttcgacgcagttgctgccacctcatgtgcggcaacctggacgccgccctccgcgatgcaatgcaagcgcagcgtcagtatcccgactgcccaacctcactgtacatgcaagcagtggcactttcaaagctagggatgcatagtcaagccatgggcatgctgattgaggcgtcggagatggaagcgaatcagaaaaagacccgaaaagcagcttaagaagactcaacatgggcgaaacctatataccttcgttttgtttctgtaagctattcttgattgttgtatctgcttgccaaattgtctaggttggagtggaattgggaagctttacctcttggggataatgcatttcttgttgtattcccctctgaggatgaaatgctccgtatggctgatattgagtataagctcaagagtggaatttctattcatatggattaggcctggagatgctaatccggcctattttttttggatgagatttgggtgcatgtttctggtgttccgcatgaatggctgacacttcttggcattctgggcactactcttgacatacaggaaggggattattcgcctgctggttactcttgacatacaggaaggggatctatgattggcactactattgacaaagtggggtatgagattacaatcactcccgagccgtcggattttgaaccagcaatgcctcccaaatttgacaaggaggatggggattcaggcgggggagagagaatctggtacgtcgagaaagaagcaaaaaagtgcgacaagctcctttcaaatttgtaagatagctcccatgag

SEQ ID NO: 42387 - DNA, 3562 bp, Zea Mays
gtaggttcttgcccattaacatacccgtggcggctggagatatcatcccgtatccgtctttgtatgggggtaaaaccgtcggttattcgggtttccgttatgtattgccatcgtctatgcactgcatttcccttcctcacctccggcgcaaaaccgcagcagtaggatcccagccggtcggccgcccaggatgccggagcctgcgtccccgccctcagcggcgggagccggccgccacatatccactccacatcaacaagggagtggagaatgctcccggcgcctcttcgatctcgacctccggccggcctcatgtgggagacgagggacgatgggctcccttccctcagcgtcagcggtgagttctaagcccaaaaggtatttcagagttgggctttggacgatatgcagcagaaagggaacctaggtcgtcccgactctcttcttcctacttcctcaaaacaattagtgcgagaatcctactaagtcaagtcctcgagtattttagtatcgactaacactcaattttttttcacgaatcaacggaagacaaatttttttagaaaagggaagctttattcagaagtctaggatataaaaacaaactctcaaaaacggccacccatgtttgggtggatctccactgctgataccgatgctgatggttctttttctagtttattagcatggtgatagcccaatcgattatcgttcattccttttgtagtttattactattattattgatgacgcctgtttctgaccactcctttcggccggccaaattaactctggaatttattccatgccttcctcggccctgtttgttctgcatgtcttcaaagggttgtgaccccatatagccggatgtcagtcaattcatccatggcgatcaatccattcctcgagcaggccaaggttcttctctgggttttgaggaaggacccatctgcgatgctcatctaattaaggttacctggtcatcttgctactcggtcgcctacaggatcggatagcttactctatctataatcacaccgagcaaactgtccatcctagctacaatgggtagcacgcacaaggaagaagtaggtgtcctggaggaaatacttgacgggagaaaagagccgaggaagctatctttatcagttctaaaacacatcacaaatgacttctcgcacgagcgaataatcggttatggtgggtgcggagaggtttacaagggcatcctgcaaaacggaagcgtcgctgtgaagaaaatcttcagcaacctaaatgttgaagataaggaatttgatcgagagattcagagcatgatgcaggtgaagcatccaaacgtagtgcggtttattggctactgttctaacacagagcatgaactgatgagaaaagaaggcaagtatattaaggtcgaggtgcgagaaaggctgctctgtttcgagcatatcagcaacggaagcctccgcagccacattacagaggatactgcgctccagaataccaataccatggcaaaatgtcccttaagtctgacatctatagtttaggtgtcataatgctggagctggtgaccgggagcaaggaggagccggacattactaatgtacttcgacggtggagccataggtggaaaaaatcaggacagcgtacaccatcatttcaacgccatcaagtgagtaaatgcataggtttggctaagagatgcaaagaagtagaaccaacaagaaggccttctatatgtgatatacttgctgccctaggcaaaatggaagatatgaattgcagtgatcaacaagtggacgaggaagtcacttatctggaggacatgctaggaatcgagcctcttgatctgcatttcctagtcgaacctaccaagcagatatcctgctcagtccatctgaccaacgctacgaatgactgtttcgccttcattgttcagacgacgaacccgaagcagtactgcatacagccggacagaggcgtcgttccaccacgatctgagtgtagtgttgccatcgtattatcgcaagaaccgacgcataataagcgatgcagcatggaggacgagctaagcgtgcagagcaccagagtggatgagggtgtgacagctgcggatgtgagtgaagcgttgttcactggaaaggaagatagaacggtcgatcacgtgagcctgatggtcggtttcgacatgtcgccatcgccacctgaggaacaaacggaggacttcacgtttgcaccactggcgtcgttgtacgacgaggagccacagttaagcgcggcgaaggtatcagtatggacatccaatcagttggggcgttctggtcgcttctctaagaagaagctagtgtctattctgaaatcctggcgagcaagattaaaggtatcatcccataagaaactcgagactccaaagcatgactgtgagattcctgaagctgtagagcatgaagaagttgccgcgcccaggtgtcccaaaggaccactgccacagcgcgatctttctccactgggcgaagcatgttctaggatgaacatgacggcgatccatgagatcctagtgaacagacattacagagatgatgacctagacccaaacgtgccgtcgctcgaggaatggacacagcagagcagggatatgttggatgataggaaacgtggggacttcacttttcgtgataaagatttccgagcagccatagactggtataccaagtgtatggatgtggggccaaagaaggcgtcaccaacagttctcgttcgacgcagttgctgccacctcatgtgcggcaacctggacgccgccctccgcgatgcaatgcaagcgcagcgtcagtatcccgactgcccaacctcactgtacatgcaagcagtggcactttcaaagctagggatgcatagtcaagccatgggcatgctgattgaggcgtcggagatggaagcgaatcagaaaaagacccgaaaagcagcttaagaagactcaacatgggcgaaacctatataccttcgttttgtttctgtaagctattcttgattgttgtatctgcttgccaaattgtctaggttggagtggaattgggaagctttacctcttggggataatgcatttcttgttgtattcccctctgaggatgaaatgctccgtatggctgatattgagtataagctcaagagtggaatttctattcatatggattaggcctggagatgctaatccggcctattttttttggatgagatttgggtgcatgtttctggtgttccgcatgaatggctgacacttcttggcattctgggcactactcttgacatacaggaaggggattattcgcctgctggttactcttgacatacaggaaggggatctatgattggcactactattgacaaagtggggtatgagattacaatcactcccgagccgtcggattttgaaccagcaatgcctcccaaatttgacaaggaggatggggattcaggcgggggagagagaatctggtacgtcgagaaagaagcaaaaaagtgcgacaagctcctttcaaatttgtaagatagctcccatgag

SEQ ID NO: 42388 - DNA, 2806 bp, Zea Mays
gtaggttcttgcccattaacatacccgtggcggctggagatatcatcccgtatccgtctttgtatgggggtaaaaccgtcggttattcgggtttccgttatgtattgccatcgtctatgcactgcatttcccttcctcacctccggcgcaaaaccgcagcagtaggatcccagccggtcggccgcccaggatgccggagcctgcgtccccgccctcagcggcgggagccggccgccacatatccactccacatcaacaagggagtggagaatgctcccggcgcctcttcgatctcgacctccggccggcctcatgtgggagacgagggacgatgggctcccttccctcagcgtcagcgggttgtgaccccatatagccggatgtcagtcaattcatccatggcgatcaatccattcctcgagcaggccaaggttcttctctgggttttgaggaaggacccatctgcgatgctcatctaattaaggttacctggtcatcttgctactcggtcgcctacaggatcggatagcttactctatctataatcacaccgagcaaactgtccatcctagctacaatgggtagcacgcacaaggaagaagtaggtgtcctggaggaaatacttgacgggagaaaagagccgaggaagctatctttatcagttctaaaacacatcacaaatgacttctcgcacgagcgaataatcggttatggtgggtgcggagaggtttacaagggcatcctgcaaaacggaagcgtcgctgtgaagaaaatcttcagcaacctaaatgttgaagataaggaatttgatcgagagattcagagcatgatgcaggtgaagcatccaaacgtagtgcggtttattggctactgttctaacacagagcatgaactgatgagaaaagaaggcaagtatattaaggtcgaggtgcgagaaaggctgctctgtttcgagcatatcagcaacggaagcctccgcagccacattacaggtgtcataatgctggagctggtgaccgggagcaaggaggagccggacattactaatgaagtcacttatctggaggacatgctaggaatcgagcctcttgatctgcatttcctagtcgaacctaccaagcagatatcctgctcagtccatctgaccaacgctacgaatgactgtttcgccttcattgttcagacgacgaacccgaagcagtactgcatacagccggacagaggcgtcgttccaccacgatctgagtgtagtgttgccatcgtattatcgcaagaaccgacgcataataagcgatgcagcatggaggacgagctaagcgtgcagagcaccagagtggatgagggtgtgacagctgcggatgtgagtgaagcgttgttcactggaaaggaagatagaacggtcgatcacgtgagcctgatggtcggtttcgacatgtcgccatcgccacctgaggaacaaacggaggacttcacgtttgcaccactggcgtcgttgtacgacgaggagccacagttaagcgcggcgaaggtatcagtatggacatccaatcagttggggcgttctggtcgcttctctaagaagaagctagtgtctattctgaaatcctggcgagcaagattaaaggtatcatcccataagaaactcgagactccaaagcatgactgtgagattcctgaagctgtagagcatgaagaagttgccgcgcccaggtgtcccaaaggaccactgccacagcgcgatctttctccactgggcgaagcatgttctaggatgaacatgacggcgatccatgagatcctagtgaacagacattacagagatgatgacctagacccaaacgtgccgtcgctcgaggaatggacacagcagagcagggatatgttggatgataggaaacgtggggacttcacttttcgtgataaagatttccgagcagccatagactggtataccaagtgtatggatgtggggccaaagaaggcgtcaccaacagttctcgttcgacgcagttgctgccacctcatgtgcggcaacctggacgccgccctccgcgatgcaatgcaagcgcagcgtcagtatcccgactgcccaacctcactgtacatgcaagcagtggcactttcaaagctagggatgcatagtcaagccatgggcatgctgattgaggcgtcggagatggaagcgaatcagaaaaagacccgaaaagcagcttaagaagactcaacatgggcgaaacctatataccttcgttttgtttctgtaagctattcttgattgttgtatctgcttgccaaattgtctaggttggagtggaattgggaagctttacctcttggggataatgcatttcttgttgtattcccctctgaggatgaaatgctccgtatggctgatattgagtataagctcaagagtggaatttctattcatatggattaggcctggagatgctaatccggcctattttttttggatgagatttgggtgcatgtttctggtgttccgcatgaatggctgacacttcttggcattctgggcactactcttgacatacaggaaggggattattcgcctgctggttactcttgacatacaggaaggggatctatgattggcactactattgacaaagtggggtatgagattacaatcactcccgagccgtcggattttgaaccagcaatgcctcccaaatttgacaaggaggatggggattcaggcgggggagagagaatctggtacgtcgagaaagaagcaaaaaagtgcgacaagctcctttcaaatttgtaagatagctcccatgag

SEQ ID NO: 42389 - DNA, 3306 bp, Zea Mays
gtaggttcttgcccattaacatacccgtggcggctggagatatcatcccgtatccgtctttgtatgggggtaaaaccgtcggttattcgggtttccgttatgtattgccatcgtctatgcactgcatttcccttcctcacctccggcgcaaaaccgcagcagtaggatcccagccggtcggccgcccaggatgccggagcctgcgtccccgccctcagcggcgggagccggccgccacatatccactccacatcaacaagggagtggagaatgctcccggcgcctcttcgatctcgacctccggccggcctcatgtgggagacgagggacgatgggctcccttccctcagcgtcagcgggttgtgaccccatatagccggatgtcagtcaattcatccatggcgatcaatccattcctcgagcaggccaaggttcttctctgggttttgaggaaggacccatctgcgatgctcatctaattaaggttacctggtcatcttgctactcggtcgcctacaggatcggatagcttactctatctataatcacaccgagcaaactgtccatcctagctacaatgggtagcacgcacaaggaagaagtaggtgtcctggaggaaatacttgacgggagaaaagagccgaggaagctatctttatcagttctaaaacacatcacaaatgacttctcgcacgagcgaataatcggttatggtgggtgcggagaggtttacaagggcatcctgcaaaacggaagcgtcgctgtgaagaaaatcttcagcaacctaaatgttgaagataaggaatttgatcgagagattcagagcatgatgcaggtgaagcatccaaacgtagtgcggtttattggctactgttctaacacagagcatgaactgatgagaaaagaaggcaagtatattaaggtcgaggtgcgagaaaggctgctctgtttcgagcatatcagcaacggaagcctccgcagccacattacagatggactaagagggcttgaatggcacgcacggtataaaataattaagggaatttgtgagggcctacatcatcttcacatggaaaaaaacatcattcacatggatcttaaacctgccaacatactagtacatgatcaaatggtaccaaagattgcagactttggtctatcaaggctggctgaagtatcacgtactatgagcaatgaacggcttttatccctaggatactgcgctccagaataccaataccatggcaaaatgtcccttaagtctgacatctatagtttaggtgtcataatgctggagctggtgaccgggagcaaggaggagccggacattactaatgtacttcgacggtggagccataggtggaaaaaatcaggacagcgtacaccatcatttcaacgccatcaagtgagtaaatgcataggtttggctaagagatgcaaagaagtagaaccaacaagaaggccttctatatgtgatatacttgctgccctaggcaaaatggaagatatgaattgcagtgatcaacaagtggacgaggaagtcacttatctggaggacatgctaggaatcgagcctcttgatctgcatttcctagtcgaacctaccaagcagatatcctgctcagtccatctgaccaacgctacgaatgactgtttcgccttcattgttcagacgacgaacccgaagcagtactgcatacagccggacagaggcgtcgttccaccacgatctgagtgtagtgttgccatcgtattatcgcaagaaccgacgcataataagcgatgcagcatggaggacgagctaagcgtgcagagcaccagagtggatgagggtgtgacagctgcggatgtgagtgaagcgttgttcactggaaaggaagatagaacggtcgatcacgtgagcctgatggtcggtttcgacatgtcgccatcgccacctgaggaacaaacggaggacttcacgtttgcaccactggcgtcgttgtacgacgaggagccacagttaagcgcggcgaaggtatcagtatggacatccaatcagttggggcgttctggtcgcttctctaagaagaagctagtgtctattctgaaatcctggcgagcaagattaaaggtaaccctgacgtatcatcccataagaaactcgagactccaaagcatgactgtgagattcctgaagctgtagagcatgaagaagttgccgcgcccaggtgtcccaaaggaccactgccacagcgcgatctttctccactgggcgaagcatgttctaggatgaacatgacggcgatccatgagatcctagtgaacagacattacagagatgatgacctagacccaaacgtgccgtcgctcgaggaatggacacagcagagcagggatatgttggatgataggaaacgtggggacttcacttttcgtgataaagatttccgagcagccatagactggtataccaagtgtatggatgtggggccaaagaaggcgtcaccaacagttctcgttcgacgcagttgctgccacctcatgtgcggcaacctggacgccgccctccgcgatgcaatgcaagcgcagcgtcagtatcccgactgcccaacctcactgtacatgcaagcagtggcactttcaaagctagggatgcatagtcaagccatgggcatgctgattgaggcgtcggagatggaagcgaatcagaaaaagacccgaaaagcagcttaagaagactcaacatgggcgaaacctatataccttcgttttgtttctgtaagctattcttgattgttgtatctgcttgccaaattgtctaggttggagtggaattgggaagctttacctcttggggataatgcatttcttgttgtattcccctctgaggatgaaatgctccgtatggctgatattgagtataagctcaagagtggaatttctattcatatggattaggcctggagatgctaatccggcctattttttttggatgagatttgggtgcatgtttctggtgttccgcatgaatggctgacacttcttggcattctgggcactactcttgacatacaggaaggggattattcgcctgctggttactcttgacatacaggaaggggatctatgattggcactactattgacaaagtggggtatgagattacaatcactcccgagccgtcggattttgaaccagcaatgcctcccaaatttgacaaggaggatggggattcaggcgggggagagagaatctggtacgtcgagaaagaagcaaaaaagtgcgacaagctcctttcaaatttgtaagatagctcccatgag

SEQ ID NO: 42390 - DNA, 2997 bp, Zea Mays
gtaggttcttgcccattaacatacccgtggcggctggagatatcatcccgtatccgtctttgtatgggggtaaaaccgtcggttattcgggtttccgttatgtattgccatcgtctatgcactgcatttcccttcctcacctccggcgcaaaaccgcagcagtaggatcccagccggtcggccgcccaggatgccggagcctgcgtccccgccctcagcggcgggagccggccgccacatatccactccacatcaacaagggagtggagaatgctcccggcgcctcttcgatctcgacctccggccggcctcatgtgggagacgagggacgatgggctcccttccctcagcgtcagcgggttgtgaccccatatagccggatgtcagtcaattcatccatggcgatcaatccattcctcgagcaggccaaggttcttctctgggttttgaggaaggacccatctgcgatgctcatctaattaaggttacctggtcatcttgctactcggtcgcctacaggatcggatagcttactctatctataatcacaccgagcaaactgtccatcctagctacaatgggtagcacgcacaaggaagaagtaggtgtcctggaggaaatacttgacgggagaaaagagccgaggaagctatctttatcagttctaaaacacatcacaaatgacttctcgcacgagcgaataatcggttatggtgggtgcggagaggtttacaagggcatcctgcaaaacggaagcgtcgctgtgaagaaaatcttcagcaacctaaatgttgaagataaggaatttgatcgagagattcagagcatgatgcaggtgaagcatccaaacgtagtgcggtttattggctactgttctaacacagagcatgaactgatgagaaaagaaggcaagtatattaaggtcgaggtgcgagaaaggctgctctgtttcgagcatatcagcaacggaagcctccgcagccacattacaggtgtcataatgctggagctggtgaccgggagcaaggaggagccggacattactaatgtacttcgacggtggagccataggtggaaaaaatcaggacagcgtacaccatcatttcaacgccatcaagtgagtaaatgcataggtttggctaagagatgcaaagaagtagaaccaacaagaaggccttctatatgtgatatacttgctgccctaggcaaaatggaagatatgaattgcagtgatcaacaagtggacgaggaagtcacttatctggaggacatgctaggaatcgagcctcttgatctgcatttcctagtcgaacctaccaagcagatatcctgctcagtccatctgaccaacgctacgaatgactgtttcgccttcattgttcagacgacgaacccgaagcagtactgcatacagccggacagaggcgtcgttccaccacgatctgagtgtagtgttgccatcgtattatcgcaagaaccgacgcataataagcgatgcagcatggaggacgagctaagcgtgcagagcaccagagtggatgagggtgtgacagctgcggatgtgagtgaagcgttgttcactggaaaggaagatagaacggtcgatcacgtgagcctgatggtcggtttcgacatgtcgccatcgccacctgaggaacaaacggaggacttcacgtttgcaccactggcgtcgttgtacgacgaggagccacagttaagcgcggcgaaggtatcagtatggacatccaatcagttggggcgttctggtcgcttctctaagaagaagctagtgtctattctgaaatcctggcgagcaagattaaaggtatcatcccataagaaactcgagactccaaagcatgactgtgagattcctgaagctgtagagcatgaagaagttgccgcgcccaggtgtcccaaaggaccactgccacagcgcgatctttctccactgggcgaagcatgttctaggatgaacatgacggcgatccatgagatcctagtgaacagacattacagagatgatgacctagacccaaacgtgccgtcgctcgaggaatggacacagcagagcagggatatgttggatgataggaaacgtggggacttcacttttcgtgataaagatttccgagcagccatagactgtgtatggatgtggggccaaagaaggcgtcaccaacagttctcgttcgacgcagttgctgccacctcatgtgcggcaacctggacgccgccctccgcgatgcaatgcaagcgcagcgtcagtatcccgactgcccaacctcactgtacatgcaagcagtggcactttcaaagctagggatgcatagtcaagccatgggcatgctgattgaggcgtcggagatggaagcgaatcagaaaaagacccgaaaagcagcttaagaagactcaacatgggcgaaacctatataccttcgttttgtttctgtaagctattcttgattgttgtatctgcttgccaaattgtctaggttggagtggaattgggaagctttacctcttggggataatgcatttcttgttgtattcccctctgaggatgaaatgctccgtatggctgatattgagtataagctcaagagtggaatttctattcatatggattaggcctggagatgctaatccggcctattttttttggatgagatttgggtgcatgtttctggtgttccgcatgaatggctgacacttcttggcattctgggcactactcttgacatacaggaaggggattattcgcctgctggttactcttgacatacaggaaggggatctatgattggcactactattgacaaagtggggtatgagattacaatcactcccgagccgtcggattttgaaccagcaatgcctcccaaatttgacaaggaggatggggattcaggcgggggagagagaatctggtacgtcgagaaagaagcaaaaaagtgcgacaagctcctttcaaatttgtaagatagctcccatgag

SEQ ID NO: 42391 - DNA, 3204 bp, Zea Mays
gtaggttcttgcccattaacatacccgtggcggctggagatatcatcccgtatccgtctttgtatgggggtaaaaccgtcggttattcgggtttccgttatgtattgccatcgtctatgcactgcatttcccttcctcacctccggcgcaaaaccgcagcagtaggatcccagccggtcggccgcccaggatgccggagcctgcgtccccgccctcagcggcgggagccggccgccacatatccactccacatcaacaagggagtggagaatgctcccggcgcctcttcgatctcgacctccggccggcctcatgtgggagacgagggacgatgggctcccttccctcagcgtcagcgggttgtgaccccatatagccggatgtcagtcaattcatccatggcgatcaatccattcctcgagcaggccaaggttcttctctgggttttgaggaaggacccatctgcgatgctcatctaattaaggttacctggtcatcttgctactcggtcgcctacaggatcggatagcttactctatctataatcacaccgagcaaactgtccatcctagctacaatgggtagcacgcacaaggaagaagtaggtgtcctggaggaaatacttgacgggagaaaagagccgaggaagctatctttatcagttctaaaacacatcacaaatgacttctcgcacgagcgaataatcggttatggtgggtgcggagaggtttacaagggcatcctgcaaaacggaagcgtcgctgtgaagaaaatcttcagcaacctaaatgttgaagataaggaatttgatcgagagattcagagcatgatgcaggtgaagcatccaaacgtagtgcggtttattggctactgttctaacacagagcatgaactgatgagaaaagaaggcaagtatattaaggtcgaggtgcgagaaaggctgctctgtttcgagcatatcagcaacggaagcctccgcagccacattacaggtatgtttattgcctgtctccatttgatgatacatacgtataccattagcacactcgagtgaaagaagagttcatattttttattccactattagatggactaagagggcttgaatggcacgcacggtataaaataattaagggaatttgtgagggcctacatcatcttcacatggaaaaaaacatcattcacatggatcttaaacctgccaacatactagtacatgatcaaatggtaccaaagattgcagactttggtctatcaaggctggctgaagtatcacgtactatgagcaatgaacggcttttatccctaggatactgcgctccagaataccaataccatggcaaaatgtcccttaagtctgacatctatagtttaggtgtcataatgctggagctggtgaccgggagcaaggaggagccggacattactaatgaagtcacttatctggaggacatgctaggaatcgagcctcttgatctgcatttcctagtcgaacctaccaagcagatatcctgctcagtccatctgaccaacgctacgaatgactgtttcgccttcattgttcagacgacgaacccgaagcagtactgcatacagccggacagaggcgtcgttccaccacgatctgagtgtagtgttgccatcgtattatcgcaagaaccgacgcataataagcgatgcagcatggaggacgagctaagcgtgcagagcaccagagtggatgagggtgtgacagctgcggatgtgagtgaagcgttgttcactggaaaggaagatagaacggtcgatcacgtgagcctgatggtcggtttcgacatgtcgccatcgccacctgaggaacaaacggaggacttcacgtttgcaccactggcgtcgttgtacgacgaggagccacagttaagcgcggcgaaggtatcagtatggacatccaatcagagtgcgcgtttacagttggggcgttctggtcgcttctctaagaagaagctagtgtctattctgaaatcctggcgagcaagattaaaggtatcatcccataagaaactcgagactccaaagcatgactgtgagattcctgaagctgtagagcatgaagaagttgccgcgcccaggtgtcccaaaggaccactgccacagcgcgatctttctccactgggcgaagcatgttctaggatgaacatgacggcgatccatgagatcctagtgaacagacattacagagatgatgacctagacccaaacgtgccgtcgctcgaggaatggacacagcagagcagggatatgttggatgataggaaacgtggggacttcacttttcgtgataaagatttccgagcagccatagactggtataccaagtgtatggatgtggggccaaagaaggcgtcaccaacagttctcgttcgacgcagttgctgccacctcatgtgcggcaacctggacgccgccctccgcgatgcaatgcaagcgcagcgtcagtatcccgactgcccaacctcactgtacatgcaagcagtggcactttcaaagctagggatgcatagtcaagccatgggcatgctgattgaggcgtcggagatggaagcgaatcagaaaaagacccgaaaagcagcttaagaagactcaacatgggcgaaacctatataccttcgttttgtttctgtaagctattcttgattgttgtatctgcttgccaaattgtctaggttggagtggaattgggaagctttacctcttggggataatgcatttcttgttgtattcccctctgaggatgaaatgctccgtatggctgatattgagtataagctcaagagtggaatttctattcatatggattaggcctggagatgctaatccggcctattttttttggatgagatttgggtgcatgtttctggtgttccgcatgaatggctgacacttcttggcattctgggcactactcttgacatacaggaaggggattattcgcctgctggttactcttgacatacaggaaggggatctatgattggcactactattgacaaagtggggtatgagattacaatcactcccgagccgtcggattttgaaccagcaatgcctcccaaatttgacaaggaggatggggattcaggcgggggagagagaatctggtacgtcgagaaagaagcaaaaaagtgcgacaagctcctttcaaatttgtaagatagctcccatgag

SEQ ID NO: 42392 - DNA, 3570 bp, Zea Mays
gtaggttcttgcccattaacatacccgtggcggctggagatatcatcccgtatccgtctttgtatgggggtaaaaccgtcggttattcgggtttccgttatgtattgccatcgtctatgcactgcatttcccttcctcacctccggcgcaaaaccgcagcagtaggatcccagccggtcggccgcccaggatgccggagcctgcgtccccgccctcagcggcgggagccggccgccacatatccactccacatcaacaagggagtggagaatgctcccggcgcctcttcgatctcgacctccggccggcctcatgtgggagacgagggacgatgggctcccttccctcagcgtcagcggtgagttctaagcccaaaaggtatttcagagttgggctttggacgatatgcagcagaaagggaacctaggtcgtcccgactctcttcttcctacttcctcaaaacaattagtgcgagaatcctactaagtcaagtcctcgagtattttagtatcgactaacactcaattttttttcacgaatcaacggaagacaaatttttttagaaaagggaagctttattcagaagtctaggatataaaaacaaactctcaaaaacggccacccatgtttgggtggatctccactgctgataccgatgctgatggttctttttctagtttattagcatggtgatagcccaatcgattatcgttcattccttttgtagtttattactattattattgatgacgcctgtttctgaccactcctttcggccggccaaattaactctggaatttattccatgccttcctcggccctgtttgttctgcatgtcttcaaagggttgtgaccccatatagccggatgtcagtcaattcatccatggcgatcaatccattcctcgagcaggccaaggttcttctctgggttttgaggaaggacccatctgcgatgctcatctaattaaggttacctggtcatcttgctactcggtcgcctacaggatcggatagcttactctatctataatcacaccgagcaaactgtccatcctagctacaatgggtagcacgcacaaggaagaagtaggtgtcctggaggaaatacttgacgggagaaaagagccgaggaagctatctttatcagttctaaaacacatcacaaatgacttctcgcacgagcgaataatcggttatggtgggtgcggagaggtttacaagatgaacagggcatcctgcaaaacggaagcgtcgctgtgaagaaaatcttcagcaacctaaatgttgaagataaggaatttgatcgagagattcagagcatgatgcaggtgaagcatccaaacgtagtgcggtttattggctactgttctaacacagagcatgaactgatgagaaaagaaggcaagtatattaaggtcgaggtgcgagaaaggctgctctgtttcgagcatatcagcaacggaagcctccgcagccacattacagaggatactgcgctccagaataccaataccatggcaaaatgtcccttaagtctgacatctatagtttaggtgtcataatgctggagctggtgaccgggagcaaggaggagccggacattactaatgtacttcgacggtggagccataggtggaaaaaatcaggacagcgtacaccatcatttcaacgccatcaagtgagtaaatgcataggtttggctaagagatgcaaagaagtagaaccaacaagaaggccttctatatgtgatatacttgctgccctaggcaaaatggaagatatgaattgcagtgatcaacaagtggacgaggaagtcacttatctggaggacatgctaggaatcgagcctcttgatctgcatttcctagtcgaacctaccaagcagatatcctgctcagtccatctgaccaacgctacgaatgactgtttcgccttcattgttcagacgacgaacccgaagcagtactgcatacagccggacagaggcgtcgttccaccacgatctgagtgtagtgttgccatcgtattatcgcaagaaccgacgcataataagcgatgcagcatggaggacgagctaagcgtgcagagcaccagagtggatgagggtgtgacagctgcggatgtgagtgaagcgttgttcactggaaaggaagatagaacggtcgatcacgtgagcctgatggtcggtttcgacatgtcgccatcgccacctgaggaacaaacggaggacttcacgtttgcaccactggcgtcgttgtacgacgaggagccacagttaagcgcggcgaaggtatcagtatggacatccaatcagttggggcgttctggtcgcttctctaagaagaagctagtgtctattctgaaatcctggcgagcaagattaaaggtatcatcccataagaaactcgagactccaaagcatgactgtgagattcctgaagctgtagagcatgaagaagttgccgcgcccaggtgtcccaaaggaccactgccacagcgcgatctttctccactgggcgaagcatgttctaggatgaacatgacggcgatccatgagatcctagtgaacagacattacagagatgatgacctagacccaaacgtgccgtcgctcgaggaatggacacagcagagcagggatatgttggatgataggaaacgtggggacttcacttttcgtgataaagatttccgagcagccatagactggtataccaagtgtatggatgtggggccaaagaaggcgtcaccaacagttctcgttcgacgcagttgctgccacctcatgtgcggcaacctggacgccgccctccgcgatgcaatgcaagcgcagcgtcagtatcccgactgcccaacctcactgtacatgcaagcagtggcactttcaaagctagggatgcatagtcaagccatgggcatgctgattgaggcgtcggagatggaagcgaatcagaaaaagacccgaaaagcagcttaagaagactcaacatgggcgaaacctatataccttcgttttgtttctgtaagctattcttgattgttgtatctgcttgccaaattgtctaggttggagtggaattgggaagctttacctcttggggataatgcatttcttgttgtattcccctctgaggatgaaatgctccgtatggctgatattgagtataagctcaagagtggaatttctattcatatggattaggcctggagatgctaatccggcctattttttttggatgagatttgggtgcatgtttctggtgttccgcatgaatggctgacacttcttggcattctgggcactactcttgacatacaggaaggggattattcgcctgctggttactcttgacatacaggaaggggatctatgattggcactactattgacaaagtggggtatgagattacaatcactcccgagccgtcggattttgaaccagcaatgcctcccaaatttgacaaggaggatggggattcaggcgggggagagagaatctggtacgtcgagaaagaagcaaaaaagtgcgacaagctcctttcaaatttgtaagatagctcccatgag

SEQ ID NO: 42393 - DNA, 3790 bp, Zea Mays
gtaggttcttgcccattaacatacccgtggcggctggagatatcatcccgtatccgtctttgtatgggggtaaaaccgtcggttattcgggtttccgttatgtattgccatcgtctatgcactgcatttcccttcctcacctccggcgcaaaaccgcagcagtaggatcccagccggtcggccgcccaggatgccggagcctgcgtccccgccctcagcggcgggagccggccgccacatatccactccacatcaacaagggagtggagaatgctcccggcgcctcttcgatctcgacctccggccggcctcatgtgggagacgagggacgatgggctcccttccctcagcgtcagcggtgagttctaagcccaaaaggtatttcagagttgggctttggacgatatgcagcagaaagggaacctaggtcgtcccgactctcttcttcctacttcctcaaaacaattagtgcgagaatcctactaagtcaagtcctcgagtattttagtatcgactaacactcaattttttttcacgaatcaacggaagacaaatttttttagaaaagggaagctttattcagaagtctaggatataaaaacaaactctcaaaaacggccacccatgtttgggtggatctccactgctgataccgatgctgatggttctttttctagtttattagcatggtgatagcccaatcgattatcgttcattccttttgtagtttattactattattattgatgacgcctgtttctgaccactcctttcggccggccaaattaactctggaatttattccatgccttcctcggccctgtttgttctgcatgtcttcaaagggttgtgaccccatatagccggatgtcagtcaattcatccatggcgatcaatccattcctcgagcaggccaaggttcttctctgggttttgaggaaggacccatctgcgatgctcatctaattaaggttacctggtcatcttgctactcggtcgcctacaggatcggatagcttactctatctataatcacaccgagcaaactgtccatcctagctacaatgggtagcacgcacaaggaagaagtaggtgtcctggaggaaatacttgacgggagaaaagagccgaggaagctatctttatcagttctaaaacacatcacaaatgacttctcgcacgagcgaataatcggttatggtgggtgcggagaggtttacaagatgaacagggcatcctgcaaaacggaagcgtcgctgtgaagaaaatcttcagcaacctaaatgttgaagataaggaatttgatcgagagattcagagcatgatgcaggtgaagcatccaaacgtagtgcggtttattggctactgttctaacacagagcatgaactgatgagaaaagaaggcaagtatattaaggtcgaggtgcgagaaaggctgctctgtttcgagcatatcagcaacggaagcctccgcagccacattacagatggactaagagggcttgaatggcacgcacggtataaaataattaagggaatttgtgagggcctacatcatcttcacatggaaaaaaacatcattcacatggatcttaaacctgccaacatactagtacatgatcaaatggtaccaaagattgcagactttggtctatcaaggctggctgaagtatcacgtactatgagcaatgaacggcttttatccctaggatactgcgctccagaataccaataccatggcaaaatgtcccttaagtctgacatctatagtttaggtgtcataatgctggagctggtgaccgggagcaaggaggagccggacattactaatgtacttcgacggtggagccataggtggaaaaaatcaggacagcgtacaccatcatttcaacgccatcaagtgagtaaatgcataggtttggctaagagatgcaaagaagtagaaccaacaagaaggccttctatatgtgatatacttgctgccctaggcaaaatggaagatatgaattgcagtgatcaacaagtggacgaggaagtcacttatctggaggacatgctaggaatcgagcctcttgatctgcatttcctagtcgaacctaccaagcagatatcctgctcagtccatctgaccaacgctacgaatgactgtttcgccttcattgttcagacgacgaacccgaagcagtactgcatacagccggacagaggcgtcgttccaccacgatctgagtgtagtgttgccatcgtattatcgcaagaaccgacgcataataagcgatgcagcatggaggacgagctaagcgtgcagagcaccagagtggatgagggtgtgacagctgcggatgtgagtgaagcgttgttcactggaaaggaagatagaacggtcgatcacgtgagcctgatggtcggtttcgacatgtcgccatcgccacctgaggaacaaacggaggacttcacgtttgcaccactggcgtcgttgtacgacgaggagccacagttaagcgcggcgaaggtatcagtatggacatccaatcagttggggcgttctggtcgcttctctaagaagaagctagtgtctattctgaaatcctggcgagcaagattaaaggtatcatcccataagaaactcgagactccaaagcatgactgtgagattcctgaagctgtagagcatgaagaagttgccgcgcccaggtgtcccaaaggaccactgccacagcgcgatctttctccactgggcgaagcatgttctaggatgaacatgacggcgatccatgagatcctagtgaacagacattacagagatgatgacctagacccaaacgtgccgtcgctcgaggaatggacacagcagagcagggatatgttggatgataggaaacgtggggacttcacttttcgtgataaagatttccgagcagccatagactggtataccaagtgtatggatgtggggccaaagaaggcgtcaccaacagttctcgttcgacgcagttgctgccacctcatgtgcggcaacctggacgccgccctccgcgatgcaatgcaagcgcagcgtcagtatcccgactgcccaacctcactgtacatgcaagcagtggcactttcaaagctagggatgcatagtcaagccatgggcatgctgattgaggcgtcggagatggaagcgaatcagaaaaagacccgaaaagcagcttaagaagactcaacatgggcgaaacctatataccttcgttttgtttctgtaagctattcttgattgttgtatctgcttgccaaattgtctaggttggagtggaattgggaagctttacctcttggggataatgcatttcttgttgtattcccctctgaggatgaaatgctccgtatggctgatattgagtataagctcaagagtggaatttctattcatatggattaggcctggagatgctaatccggcctattttttttggatgagatttgggtgcatgtttctggtgttccgcatgaatggctgacacttcttggcattctgggcactactcttgacatacaggaaggggattattcgcctgctggttactcttgacatacaggaaggggatctatgattggcactactattgacaaagtggggtatgagattacaatcactcccgagccgtcggattttgaaccagcaatgcctcccaaatttgacaaggaggatggggattcaggcgggggagagagaatctggtacgtcgagaaagaagcaaaaaagtgcgacaagctcctttcaaatttgtaagatagctcccatgag

SEQ ID NO: 42394 - DNA, 3007 bp, Zea Mays
gtaggttcttgcccattaacatacccgtggcggctggagatatcatcccgtatccgtctttgtatgggggtaaaaccgtcggttattcgggtttccgttatgtattgccatcgtctatgcactgcatttcccttcctcacctccggcgcaaaaccgcagcagtaggatcccagccggtcggccgcccaggatgccggagcctgcgtccccgccctcagcggcgggagccggccgccacatatccactccacatcaacaagggagtggagaatgctcccggcgcctcttcgatctcgacctccggccggcctcatgtgggagacgagggacgatgggctcccttccctcagcgtcagcgggttgtgaccccatatagccggatgtcagtcaattcatccatggcgatcaatccattcctcgagcaggccaaggttcttctctgggttttgaggaaggacccatctgcgatgctcatctaattaaggttacctggtcatcttgctactcggtcgcctacaggatcggatagcttactctatctataatcacaccgagcaaactgtccatcctagctacaatgggtagcacgcacaaggaagaagtaggtgtcctggaggaaatacttgacgggagaaaagagccgaggaagctatctttatcagttctaaaacacatcacaaatgacttctcgcacgagcgaataatcggttatggtgggtgcggagaggtttacaagggcatcctgcaaaacggaagcgtcgctgtgaagaaaatcttcagcaacctaaatgttgaagataaggaatttgatcgagagattcagagcatgatgcaggtgaagcatccaaacgtagtgcggtttattggctactgttctaacacagagcatgaactgatgagaaaagaaggcaagtatattaaggtcgaggtgcgagaaaggctgctctgtttcgagcatatcagcaacggaagcctccgcagccacattacaggtgtcataatgctggagctggtgaccgggagcaaggaggagccggacattactaatgtacttcgacggtggagccataggtggaaaaaatcaggacagcgtacaccatcatttcaacgccatcaagtgagtaaatgcataggtttggctaagagatgcaaagaagtagaaccaacaagaaggccttctatatgtgatatacttgctgccctaggcaaaatggaagatatgaattgcagtgatcaacaagtggacgaggaagtcacttatctggaggacatgctaggaatcgagcctcttgatctgcatttcctagtcgaacctaccaagcagatatcctgctcagtccatctgaccaacgctacgaatgactgtttcgccttcattgttcagacgacgaacccgaagcagtactgcatacagccggacagaggcgtcgttccaccacgatctgagtgtagtgttgccatcgtattatcgcaagaaccgacgcataataagcgatgcagcatggaggacgagctaagcgtgcagagcaccagagtggatgagggtgtgacagctgcggatgtgagtgaagcgttgttcactggaaaggaagatagaacggtcgatcacgtgagcctgatggtcggtttcgacatgtcgccatcgccacctgaggaacaaacggaggacttcacgtttgcaccactggcgtcgttgtacgacgaggagccacagttaagcgcggcgaaggtatcagtatggacatccaatcagttggggcgttctggtcgcttctctaagaagaagctagtgtctattctgaaatcctggcgagcaagattaaaggtatcatcccataagaaactcgagactccaaagcatgactgtgagattcctgaagctgtagagcatgaagaagttgccgcgcccaggtgtcccaaaggaccactgccacagcgcgatctttctccactgggcgaagcatgttctaggatgaacatgacggcgatccatgagatcctagtgaacagacattacagagatgatgacctagacccaaacgtgccgtcgctcgaggaatggacacagcagagcagggatatgttggatgataggaaacgtggggacttcacttttcgtgataaagatttccgagcagccatagactggtataccaagtgtatggatgtggggccaaagaaggcgtcaccaacagttctcgttcgacgcagttgctgccacctcatgtgcggcaacctggacgccgccctccgcgatgcaatgcaagcgcagcgtcagtatcccgactgcccaacctcactgtacatgcaagcagtggcactttcaaagctagggatgcatagtcaagccatgggcatgctgattgaggcgtcggagatggaagcgaatcagaaaaagacccgaaaagcagcttaagaagactcaacatgggcgaaacctatataccttcgttttgtttctgtaagctattcttgattgttgtatctgcttgccaaattgtctaggttggagtggaattgggaagctttacctcttggggataatgcatttcttgttgtattcccctctgaggatgaaatgctccgtatggctgatattgagtataagctcaagagtggaatttctattcatatggattaggcctggagatgctaatccggcctattttttttggatgagatttgggtgcatgtttctggtgttccgcatgaatggctgacacttcttggcattctgggcactactcttgacatacaggaaggggattattcgcctgctggttactcttgacatacaggaaggggatctatgattggcactactattgacaaagtggggtatgagattacaatcactcccgagccgtcggattttgaaccagcaatgcctcccaaatttgacaaggaggatggggattcaggcgggggagagagaatctggtacgtcgagaaagaagcaaaaaagtgcgacaagctcctttcaaatttgtaagatagctcccatgag

SEQ ID NO: 42395 - DNA, 3470 bp, Zea Mays
gtaggttcttgcccattaacatacccgtggcggctggagatatcatcccgtatccgtctttgtatgggggtaaaaccgtcggttattcgggtttccgttatgtattgccatcgtctatgcactgcatttcccttcctcacctccggcgcaaaaccgcagcagtaggatcccagccggtcggccgcccaggatgccggagcctgcgtccccgccctcagcggcgggagccggccgccacatatccactccacatcaacaagggagtggagaatgctcccggcgcctcttcgatctcgacctccggccggcctcatgtgggagacgagggacgatgggctcccttccctcagcgtcagcggtgagttctaagcccaaaaggtatttcagagttgggctttggacgatatgcagcagaaagggaacctaggtcgtcccgactctcttcttcctacttcctcaaaacaattagtgcgagaatcctactaagtcaagtcctcgagtattttagtatcgactaacactcaattttttttcacgaatcaacggaagacaaatttttttagaaaagggaagctttattcagaagtctaggatataaaaacaaactctcaaaaacggccacccatgtttgggtggatctccactgctgataccgatgctgatggttctttttctagtttattagcatggtgatagcccaatcgattatcgttcattccttttgtagtttattactattattattgatgacgcctgtttctgaccactcctttcggccggccaaattaactctggaatttattccatgccttcctcggccctgtttgttctgcatgtcttcaaagggttgtgaccccatatagccggatgtcagtcaattcatccatggcgatcaatccattcctcgagcaggccaaggttcttctctgggttttgaggaaggacccatctgcgatgctcatctaattaaggttacctggtcatcttgctactcggtcgcctacaggatcggatagcttactctatctataatcacaccgagcaaactgtccatcctagctacaatgggtagcacgcacaaggaagaagtaggtgtcctggaggaaatacttgacgggagaaaagagccgaggaagctatctttatcagttctaaaacacatcacaaatgacttctcgcacgagcgaataatcggttatggtgggtgcggagaggtttacaagggcatcctgcaaaacggaagcgtcgctgtgaagaaaatcttcagcaacctaaatgttgaagataaggaatttgatcgagagattcagagcatgatgcaggtgaagcatccaaacgtagtgcggtttattggctactgttctaacacagagcatgaactgatgagaaaagaaggcaagtatattaaggtcgaggtgcgagaaaggctgctctgtttcgagcatatcagcaacggaagcctccgcagccacattacaggtgtcataatgctggagctggtgaccgggagcaaggaggagccggacattactaatgtacttcgacggtggagccataggtggaaaaaatcaggacagcgtacaccatcatttcaacgccatcaagtgagtaaatgcataggtttggctaagagatgcaaagaagtagaaccaacaagaaggccttctatatgtgatatacttgctgccctaggcaaaatggaagatatgaattgcagtgatcaacaagtggacgaggaagtcacttatctggaggacatgctaggaatcgagcctcttgatctgcatttcctagtcgaacctaccaagcagatatcctgctcagtccatctgaccaacgctacgaatgactgtttcgccttcattgttcagacgacgaacccgaagcagtactgcatacagccggacagaggcgtcgttccaccacgatctgagtgtagtgttgccatcgtattatcgcaagaaccgacgcataataagcgatgcagcatggaggacgagctaagcgtgcagagcaccagagtggatgagggtgtgacagctgcggatgtgagtgaagcgttgttcactggaaaggaagatagaacggtcgatcacgtgagcctgatggtcggtttcgacatgtcgccatcgccacctgaggaacaaacggaggacttcacgtttgcaccactggcgtcgttgtacgacgaggagccacagttaagcgcggcgaagttggggcgttctggtcgcttctctaagaagaagctagtgtctattctgaaatcctggcgagcaagattaaaggtatcatcccataagaaactcgagactccaaagcatgactgtgagattcctgaagctgtagagcatgaagaagttgccgcgcccaggtgtcccaaaggaccactgccacagcgcgatctttctccactgggcgaagcatgttctaggatgaacatgacggcgatccatgagatcctagtgaacagacattacagagatgatgacctagacccaaacgtgccgtcgctcgaggaatggacacagcagagcagggatatgttggatgataggaaacgtggggacttcacttttcgtgataaagatttccgagcagccatagactggtataccaagtgtatggatgtggggccaaagaaggcgtcaccaacagttctcgttcgacgcagttgctgccacctcatgtgcggcaacctggacgccgccctccgcgatgcaatgcaagcgcagcgtcagtatcccgactgcccaacctcactgtacatgcaagcagtggcactttcaaagctagggatgcatagtcaagccatgggcatgctgattgaggcgtcggagatggaagcgaatcagaaaaagacccgaaaagcagcttaagaagactcaacatgggcgaaacctatataccttcgttttgtttctgtaagctattcttgattgttgtatctgcttgccaaattgtctaggttggagtggaattgggaagctttacctcttggggataatgcatttcttgttgtattcccctctgaggatgaaatgctccgtatggctgatattgagtataagctcaagagtggaatttctattcatatggattaggcctggagatgctaatccggcctattttttttggatgagatttgggtgcatgtttctggtgttccgcatgaatggctgacacttcttggcattctgggcactactcttgacatacaggaaggggattattcgcctgctggttactcttgacatacaggaaggggatctatgattggcactactattgacaaagtggggtatgagattacaatcactcccgagccgtcggattttgaaccagcaatgcctcccaaatttgacaaggaggatggggattcaggcgggggagagagaatctggtacgtcgagaaagaagcaaaaaagtgcgacaagctcctttcaaatttgtaagatagctcccatgag

SEQ ID NO: 42396 - DNA, 3258 bp, Zea Mays
gtaggttcttgcccattaacatacccgtggcggctggagatatcatcccgtatccgtctttgtatgggggtaaaaccgtcggttattcgggtttccgttatgtattgccatcgtctatgcactgcatttcccttcctcacctccggcgcaaaaccgcagcagtaggatcccagccggtcggccgcccaggatgccggagcctgcgtccccgccctcagcggcgggagccggccgccacatatccactccacatcaacaagggagtggagaatgctcccggcgcctcttcgatctcgacctccggccggcctcatgtgggagacgagggacgatgggctcccttccctcagcgtcagcggtgagttctaagcccaaaaggtatttcagagttgggctttggacgatatgcagcagaaagggaacctaggtcgtcccgactctcttcttcctacttcctcaaaacaattagtgcgagaatcctactaagtcaagtcctcgagtattttagtatcgactaacactcaattttttttcacgaatcaacggaagacaaatttttttagaaaagggaagctttattcagaagtctaggatataaaaacaaactctcaaaaacggccacccatgtttgggtggatctccactgctgataccgatgctgatggttctttttctagtttattagcatgggttgtgaccccatatagccggatgtcagtcaattcatccatggcgatcaatccattcctcgagcaggccaaggttcttctctgggttttgaggaaggacccatctgcgatgctcatctaattaagctacaatgggtagcacgcacaaggaagaagtaggtgtcctggaggaaatacttgacgggagaaaagagccgaggaagctatctttatcagttctaaaacacatcacaaatgacttctcgcacgagcgaataatcggttatggtgggtgcggagaggtttacaagatgaacagggcatcctgcaaaacggaagcgtcgctgtgaagaaaatcttcagcaacctaaatgttgaagataaggaatttgatcgagagattcagagcatgatgcaggtgaagcatccaaacgtagtgcggtttattggctactgttctaacacagagcatgaactgatgagaaaagaaggcaagtatattaaggtcgaggtgcgagaaaggctgctctgtttcgagcatatcagcaacggaagcctccgcagccacattacaggtgtcataatgctggagctggtgaccgggagcaaggaggagccggacattactaatgtacttcgacggtggagccataggtggaaaaaatcaggacagcgtacaccatcatttcaacgccatcaagtgagtaaatgcataggtttggctaagagatgcaaagaagtagaaccaacaagaaggccttctatatgtgatatacttgctgccctaggcaaaatggaagatatgaattgcagtgatcaacaagtggacgaggaagtcacttatctggaggacatgctaggaatcgagcctcttgatctgcatttcctagtcgaacctaccaagcagatatcctgctcagtccatctgaccaacgctacgaatgactgtttcgccttcattgttcagacgacgaacccgaagcagtactgcatacagccggacagaggcgtcgttccaccacgatctgagtgtagtgttgccatcgtattatcgcaagaaccgacgcataataagcgatgcagcatggaggacgagctaagcgtgcagagcaccagagtggatgagggtgtgacagctgcggatgtgagtgaagcgttgttcactggaaaggaagatagaacggtcgatcacgtgagcctgatggtcggtttcgacatgtcgccatcgccacctgaggaacaaacggaggacttcacgtttgcaccactggcgtcgttgtacgacgaggagccacagttaagcgcggcgaaggtatcagtatggacatccaatcagttggggcgttctggtcgcttctctaagaagaagctagtgtctattctgaaatcctggcgagcaagattaaaggtatcatcccataagaaactcgagactccaaagcatgactgtgagattcctgaagctgtagagcatgaagaagttgccgcgcccaggtgtcccaaaggaccactgccacagcgcgatctttctccactgggcgaagcatgttctaggatgaacatgacggcgatccatgagatcctagtgaacagacattacagagatgatgacctagacccaaacgtgccgtcgctcgaggaatggacacagcagagcagggatatgttggatgataggaaacgtggggacttcacttttcgtgataaagatttccgagcagccatagactggtataccaagtgtatggatgtggggccaaagaaggcgtcaccaacagttctcgttcgacgcagttgctgccacctcatgtgcggcaacctggacgccgccctccgcgatgcaatgcaagcgcagcgtcagtatcccgactgcccaacctcactgtacatgcaagcagtggcactttcaaagctagggatgcatagtcaagccatgggcatgctgattgaggcgtcggagatggaagcgaatcagaaaaagacccgaaaagcagcttaagaagactcaacatgggcgaaacctatataccttcgttttgtttctgtaagctattcttgattgttgtatctgcttgccaaattgtctaggttggagtggaattgggaagctttacctcttggggataatgcatttcttgttgtattcccctctgaggatgaaatgctccgtatggctgatattgagtataagctcaagagtggaatttctattcatatggattaggcctggagatgctaatccggcctattttttttggatgagatttgggtgcatgtttctggtgttccgcatgaatggctgacacttcttggcattctgggcactactcttgacatacaggaaggggattattcgcctgctggttactcttgacatacaggaaggggatctatgattggcactactattgacaaagtggggtatgagattacaatcactcccgagccgtcggattttgaaccagcaatgcctcccaaatttgacaaggaggatggggattcaggcgggggagagagaatctggtacgtcgagaaagaagcaaaaaagtgcgacaagctcctttcaaatttgtaagatagctcccatgag

SEQ ID NO: 42397 - DNA, 3566 bp, Zea Mays
gtaggttcttgcccattaacatacccgtggcggctggagatatcatcccgtatccgtctttgtatgggggtaaaaccgtcggttattcgggtttccgttatgtattgccatcgtctatgcactgcatttcccttcctcacctccggcgcaaaaccgcagcagtaggatcccagccggtcggccgcccaggatgccggagcctgcgtccccgccctcagcggcgggagccggccgccacatatccactccacatcaacaagggagtggagaatgctcccggcgcctcttcgatctcgacctccggccggcctcatgtgggagacgagggacgatgggctcccttccctcagcgtcagcggtgagttctaagcccaaaaggtatttcagagttgggctttggacgatatgcagcagaaagggaacctaggtcgtcccgactctcttcttcctacttcctcaaaacaattagtgcgagaatcctactaagtcaagtcctcgagtattttagtatcgactaacactcaattttttttcacgaatcaacggaagacaaatttttttagaaaagggaagctttattcagaagtctaggatataaaaacaaactctcaaaaacggccacccatgtttgggtggatctccactgctgataccgatgctgatggttctttttctagtttattagcatggtgatagcccaatcgattatcgttcattccttttgtagtttattactattattattgatgacgcctgtttctgaccactcctttcggccggccaaattaactctggaatttattccatgccttcctcggccctgtttgttctgcatgtcttcaaagggttgtgaccccatatagccggatgtcagtcaattcatccatggcgatcaatccattcctcgagcaggccaaggttcttctctgggttttgaggaaggacccatctgcgatgctcatctaattaaggttacctggtcatcttgctactcggtcgcctacaggatcggatagcttactctatctataatcacaccgagcaaactgtccatcctagctacaatgggtagcacgcacaaggaagaagtaggtgtcctggaggaaatacttgacgggagaaaagagccgaggaagctatctttatcagttctaaaacacatcacaaatgacttctcgcacgagcgaataatcggttatggtgggtgcggagaggtttacaagggcatcctgcaaaacggaagcgtcgctgtgaagaaaatcttcagcaacctaaatgttgaagataaggaatttgatcgagagattcagagcatgatgcaggtgaagcatccaaacgtagtgcggtttattggctactgttctaacacagagcatgaactgatgagaaaagaaggcaagtatattaaggtcgaggtgcgagaaaggctgctctgtttcgagcatatcagcaacggaagcctccgcagccacattacaggtgtcataatgctggagctggtgaccgggagcaaggaggagccggacattactaatgtacttcgacggtggagccataggtggaaaaaatcaggacagcgtacaccatcatttcaacgccatcaagtgagtaaatgcataggtttggctaagagatgcaaagaagtagaaccaacaagaaggccttctatatgtgatatacttgctgccctaggcaaaatggaagatatgaattgcagtgatcaacaagtggacgaggaagtcacttatctggaggacatgctaggaatcgagcctcttgatctgcatttcctagtcgaacctaccaagcagatatcctgctcagtccatctgaccaacgctacgaatgactgtttcgccttcattgttcagacgacgaacccgaagcagtactgcatacagccggacagaggcgtcgttccaccacgatctgagtgtagtgttgccatcgtattatcgcaagaaccgacgcataataagcgatgcagcatggaggacgagctaagcgtgcagagcaccagagtggatgagggtgtgacagctgcggatgtgagtgaagcgttgttcactggaaaggaagatagaacggtcgatcacgtgagcctgatggtcggtttcgacatgtcgccatcgccacctgaggaacaaacggaggacttcacgtttgcaccactggcgtcgttgtacgacgaggagccacagttaagcgcggcgaaggtatcagtatggacatccaatcaggtgcgtgtgtgtgctttctcgctctggattccttcgcctgattggatcatgcatgactcgctctcagagtgcgcgtttacagttggggcgttctggtcgcttctctaagaagaagctagtgtctattctgaaatcctggcgagcaagattaaaggtatcatcccataagaaactcgagactccaaagcatgactgtgagattcctgaagctgtagagcatgaagaagttgccgcgcccaggtgtcccaaaggaccactgccacagcgcgatctttctccactgggcgaagcatgttctaggatgaacatgacggcgatccatgagatcctagtgaacagacattacagagatgatgacctagacccaaacgtgccgtcgctcgaggaatggacacagcagagcagggatatgttggatgataggaaacgtggggacttcacttttcgtgataaagatttccgagcagccatagactgtgtatggatgtggggccaaagaaggcgtcaccaacagttctcgttcgacgcagttgctgccacctcatgtgcggcaacctggacgccgccctccgcgatgcaatgcaagcgcagcgtcagtatcccgactgcccaacctcactgtacatgcaagcagtggcactttcaaagctagggatgcatagtcaagccatgggcatgctgattgaggcgtcggagatggaagcgaatcagaaaaagacccgaaaagcagcttaagaagactcaacatgggcgaaacctatataccttcgttttgtttctgtaagctattcttgattgttgtatctgcttgccaaattgtctaggttggagtggaattgggaagctttacctcttggggataatgcatttcttgttgtattcccctctgaggatgaaatgctccgtatggctgatattgagtataagctcaagagtggaatttctattcatatggattaggcctggagatgctaatccggcctattttttttggatgagatttgggtgcatgtttctggtgttccgcatgaatggctgacacttcttggcattctgggcactactcttgacatacaggaaggggattattcgcctgctggttactcttgacatacaggaaggggatctatgattggcactactattgacaaagtggggtatgagattacaatcactcccgagccgtcggattttgaaccagcaatgcctcccaaatttgacaaggaggatggggattcaggcgggggagagagaatctggtacgtcgagaaagaagcaaaaaagtgcgacaagctcctttcaaatttgtaagatagctcccatgag

SEQ ID NO: 42398 - DNA, 3573 bp, Zea Mays
gtaggttcttgcccattaacatacccgtggcggctggagatatcatcccgtatccgtctttgtatgggggtaaaaccgtcggttattcgggtttccgttatgtattgccatcgtctatgcactgcatttcccttcctcacctccggcgcaaaaccgcagcagtaggatcccagccggtcggccgcccaggatgccggagcctgcgtccccgccctcagcggcgggagccggccgccacatatccactccacatcaacaagggagtggagaatgctcccggcgcctcttcgatctcgacctccggccggcctcatgtgggagacgagggacgatgggctcccttccctcagcgtcagcggtgagttctaagcccaaaaggtatttcagagttgggctttggacgatatgcagcagaaagggaacctaggtcgtcccgactctcttcttcctacttcctcaaaacaattagtgcgagaatcctactaagtcaagtcctcgagtattttagtatcgactaacactcaattttttttcacgaatcaacggaagacaaatttttttagaaaagggaagctttattcagaagtctaggatataaaaacaaactctcaaaaacggccacccatgtttgggtggatctccactgctgataccgatgctgatggttctttttctagtttattagcatggtgatagcccaatcgattatcgttcattccttttgtagtttattactattattattgatgacgcctgtttctgaccactcctttcggccggccaaattaactctggaatttattccatgccttcctcggccctgtttgttctgcatgtcttcaaagggttgtgaccccatatagccggatgtcagtcaattcatccatggcgatcaatccattcctcgagcaggccaaggttcttctctgggttttgaggaaggacccatctgcgatgctcatctaattaaggttacctggtcatcttgctactcggtcgcctacaggatcggatagcttactctatctataatcacaccgagcaaactgtccatcctagctacaatgggtagcacgcacaaggaagaagtaggtgtcctggaggaaatacttgacgggagaaaagagccgaggaagctatctttatcagttctaaaacacatcacaaatgacttctcgcacgagcgaataatcggttatggtgggtgcggagaggtttacaagaagatgaacagggcatcctgcaaaacggaagcgtcgctgtgaagaaaatcttcagcaacctaaatgttgaagataaggaatttgatcgagagattcagagcatgatgcaggtgaagcatccaaacgtagtgcggtttattggctactgttctaacacagagcatgaactgatgagaaaagaaggcaagtatattaaggtcgaggtgcgagaaaggctgctctgtttcgagcatatcagcaacggaagcctccgcagccacattacagaggatactgcgctccagaataccaataccatggcaaaatgtcccttaagtctgacatctatagtttaggtgtcataatgctggagctggtgaccgggagcaaggaggagccggacattactaatgtacttcgacggtggagccataggtggaaaaaatcaggacagcgtacaccatcatttcaacgccatcaagtgagtaaatgcataggtttggctaagagatgcaaagaagtagaaccaacaagaaggccttctatatgtgatatacttgctgccctaggcaaaatggaagatatgaattgcagtgatcaacaagtggacgaggaagtcacttatctggaggacatgctaggaatcgagcctcttgatctgcatttcctagtcgaacctaccaagcagatatcctgctcagtccatctgaccaacgctacgaatgactgtttcgccttcattgttcagacgacgaacccgaagcagtactgcatacagccggacagaggcgtcgttccaccacgatctgagtgtagtgttgccatcgtattatcgcaagaaccgacgcataataagcgatgcagcatggaggacgagctaagcgtgcagagcaccagagtggatgagggtgtgacagctgcggatgtgagtgaagcgttgttcactggaaaggaagatagaacggtcgatcacgtgagcctgatggtcggtttcgacatgtcgccatcgccacctgaggaacaaacggaggacttcacgtttgcaccactggcgtcgttgtacgacgaggagccacagttaagcgcggcgaaggtatcagtatggacatccaatcagttggggcgttctggtcgcttctctaagaagaagctagtgtctattctgaaatcctggcgagcaagattaaaggtatcatcccataagaaactcgagactccaaagcatgactgtgagattcctgaagctgtagagcatgaagaagttgccgcgcccaggtgtcccaaaggaccactgccacagcgcgatctttctccactgggcgaagcatgttctaggatgaacatgacggcgatccatgagatcctagtgaacagacattacagagatgatgacctagacccaaacgtgccgtcgctcgaggaatggacacagcagagcagggatatgttggatgataggaaacgtggggacttcacttttcgtgataaagatttccgagcagccatagactggtataccaagtgtatggatgtggggccaaagaaggcgtcaccaacagttctcgttcgacgcagttgctgccacctcatgtgcggcaacctggacgccgccctccgcgatgcaatgcaagcgcagcgtcagtatcccgactgcccaacctcactgtacatgcaagcagtggcactttcaaagctagggatgcatagtcaagccatgggcatgctgattgaggcgtcggagatggaagcgaatcagaaaaagacccgaaaagcagcttaagaagactcaacatgggcgaaacctatataccttcgttttgtttctgtaagctattcttgattgttgtatctgcttgccaaattgtctaggttggagtggaattgggaagctttacctcttggggataatgcatttcttgttgtattcccctctgaggatgaaatgctccgtatggctgatattgagtataagctcaagagtggaatttctattcatatggattaggcctggagatgctaatccggcctattttttttggatgagatttgggtgcatgtttctggtgttccgcatgaatggctgacacttcttggcattctgggcactactcttgacatacaggaaggggattattcgcctgctggttactcttgacatacaggaaggggatctatgattggcactactattgacaaagtggggtatgagattacaatcactcccgagccgtcggattttgaaccagcaatgcctcccaaatttgacaaggaggatggggattcaggcgggggagagagaatctggtacgtcgagaaagaagcaaaaaagtgcgacaagctcctttcaaatttgtaagatagctcccatgag

SEQ ID NO: 42399 - DNA, 3521 bp, Zea Mays
atcaatccatatccgtctacccaatgggtaggttcttgcccattaacatacccgtggcggctggagatatcatcccgtatccgtctttgtatgggggtaaaaccgtcggttattcgggtttccgttatgtattgccatcgtctatgcactgcatttcccttcctcacctccggcgcaaaaccgcagcagtaggatcccagccggtcggccgcccaggatgccggagcctgcgtccccgccctcagcggcgggagccggccgccacatatccactccacatcaacaagggagtggagaatgctcccggcgcctcttcgatctcgacctccggccggcctcatgtgggagacgagggacgatgggctcccttccctcagcgtcagcggtgagttctaagcccaaaaggtatttcagagttgggctttggacgatatgcagcagaaagggaacctaggtcgtcccgactctcttcttcctacttcctcaaaacaattagtgcgagaatcctactaagtcaagtcctcgagtattttagtatcgactaacactcaattttttttcacgaatcaacggaagacaaatttttttagaaaagggaagctttattcagaagtctaggatataaaaacaaactctcaaaaacggccacccatgtttgggtggatctccactgctgataccgatgctgatggttctttttctagtttattagcatggtgatagcccaatcgattatcgttcattccttttgtagtttattactattattattgatgacgcctgtttctgaccactcctttcggccggccaaattaactctggaatttattccatgccttcctcggccctgtttgttctgcatgtcttcaaagggttgtgaccccatatagccggatgtcagtcaattcatccatggcgatcaatccattcctcgagcaggccaaggttcttctctgggttttgaggaaggacccatctgcgatgctcatctaattaaggttacctggtcatcttgctactcggtcgcctacaggatcggatagcttactctatctataatcacaccgagcaaactgtccatcctagctacaatgggtagcacgcacaaggaagaagtaggtgtcctggaggaaatacttgacgggagaaaagagccgaggaagctatctttatcagttctaaaacacatcacaaatgacttctcgcacgagcgaataatcggttatggtgggtgcggagaggtttacaagggcatcctgcaaaacggaagcgtcgctgtgaagaaaatcttcagcaacctaaatgttgaagataaggaatttgatcgagagattcagagcatgatgcaggtgaagcatccaaacgtagtgcggtttattggctactgttctaacacagagcatgaactgatgagaaaagaaggcaagtatattaaggtcgaggtgcgagaaaggctgctctgtttcgagcatatcagcaacggaagcctccgcagccacattacaggtgtcataatgctggagctggtgaccgggagcaaggaggagccggacattactaatgtacttcgacggtggagccataggtggaaaaaatcaggacagcgtacaccatcatttcaacgccatcaagtgagtaaatgcataggtttggctaagagatgcaaagaagtagaaccaacaagaaggccttctatatgtgatatacttgctgccctaggcaaaatggaagatatgaattgcagtgatcaacaagtggacgaggaagtcacttatctggaggacatgctaggaatcgagcctcttgatctgcatttcctagtcgaacctaccaagcagatatcctgctcagtccatctgaccaacgctacgaatgactgtttcgccttcattgttcagacgacgaacccgaagcagtactgcatacagccggacagaggcgtcgttccaccacgatctgagtgtagtgttgccatcgtattatcgcaagaaccgacgcataataagcgatgcagcatggaggacgagctaagcgtgcagagcaccagagtggatgagggtgtgacagctgcggatgtgagtgaagcgttgttcactggaaaggaagatagaacggtcgatcacgtgagcctgatggtcggtttcgacatgtcgccatcgccacctgaggaacaaacggaggacttcacgtttgcaccactggcgtcgttgtacgacgaggagccacagttaagcgcggcgaaggtatcagtatggacatccaatcagttggggcgttctggtcgcttctctaagaagaagctagtgtctattctgaaatcctggcgagcaagattaaaggtatcatcccataagaaactcgagactccaaagcatgactgtgagattcctgaagctgtagagcatgaagaagttgccgcgcccaggtgtcccaaaggaccactgccacagcgcgatctttctccactgggcgaagcatgttctaggatgaacatgacggcgatccatgagatcctagtgaacagacattacagagatgatgacctagacccaaacgtgccgtcgctcgaggaatggacacagcagagcagggatatgttggatgataggaaacgtggggacttcacttttcgtgataaagatttccgagcagccatagactggtataccaagtgtatggatgtggggccaaagaaggcgtcaccaacagttctcgttcgacgcagttgctgccacctcatgtgcggcaacctggacgccgccctccgcgatgcaatgcaagcgcagcgtcagtatcccgactgcccaacctcactgtacatgcaagcagtggcactttcaaagctagggatgcatagtcaagccatgggcatgctgattgaggcgtcggagatggaagcgaatcagaaaaagacccgaaaagcagcttaagaagactcaacatgggcgaaacctatataccttcgttttgtttctgtaagctattcttgattgttgtatctgcttgccaaattgtctaggttggagtggaattgggaagctttacctcttggggataatgcatttcttgttgtattcccctctgaggatgaaatgctccgtatggctgatattgagtataagctcaagagtggaatttctattcatatggattaggcctggagatgctaatccggcctattttttttggatgagatttgggtgcatgtttctggtgttccgcatgaatggctgacacttcttggcattctgggcactactcttgacatacaggaaggggattattcgcctgctggttactcttgacatacaggaaggggatctatgattggcactactattgacaaagtggggtatgagattacaatcactcccgagccgtcggattttgaaccagcaatgcctcccaaatttgacaaggaggatggggattcaggcgggggagagagaatctggtacgtcgagaaagaagcaaaaaagtgcgacaagctcctttcaaatttgtaagatagctcccatgag

SEQ ID NO: 42400 - DNA, 3809 bp, Zea Mays
atcaatccatatccgtctacccaatgggtaggttcttgcccattaacatacccgtggcggctggagatatcatcccgtatccgtctttgtatgggggtaaaaccgtcggttattcgggtttccgttatgtattgccatcgtctatgcactgcatttcccttcctcacctccggcgcaaaaccgcagcagtaggatcccagccggtcggccgcccaggatgccggagcctgcgtccccgccctcagcggcgggagccggccgccacatatccactccacatcaacaagggagtggagaatgctcccggcgcctcttcgatctcgacctccggccggcctcatgtgggagacgagggacgatgggctcccttccctcagcgtcagcggtgagttctaagcccaaaaggtatttcagagttgggctttggacgatatgcagcagaaagggaacctaggtcgtcccgactctcttcttcctacttcctcaaaacaattagtgcgagaatcctactaagtcaagtcctcgagtattttagtatcgactaacactcaattttttttcacgaatcaacggaagacaaatttttttagaaaagggaagctttattcagaagtctaggatataaaaacaaactctcaaaaacggccacccatgtttgggtggatctccactgctgataccgatgctgatggttctttttctagtttattagcatggtgatagcccaatcgattatcgttcattccttttgtagtttattactattattattgatgacgcctgtttctgaccactcctttcggccggccaaattaactctggaatttattccatgccttcctcggccctgtttgttctgcatgtcttcaaagggttgtgaccccatatagccggatgtcagtcaattcatccatggcgatcaatccattcctcgagcaggccaaggttcttctctgggttttgaggaaggacccatctgcgatgctcatctaattaaggttacctggtcatcttgctactcggtcgcctacaggatcggatagcttactctatctataatcacaccgagcaaactgtccatcctagctacaatgggtagcacgcacaaggaagaagtaggtgtcctggaggaaatacttgacgggagaaaagagccgaggaagctatctttatcagttctaaaacacatcacaaatgacttctcgcacgagcgaataatcggttatggtgggtgcggagaggtttacaagggcatcctgcaaaacggaagcgtcgctgtgaagaaaatcttcagcaacctaaatgttgaagataaggaatttgatcgagagattcagagcatgatgcaggtgaagcatccaaacgtagtgcggtttattggctactgttctaacacagagcatgaactgatgagaaaagaaggcaagtatattaaggtcgaggtgcgagaaaggctgctctgtttcgagcatatcagcaacggaagcctccgcagccacattacagatggactaagagggcttgaatggcacgcacggtataaaataattaagggaatttgtgagggcctacatcatcttcacatggaaaaaaacatcattcacatggatcttaaacctgccaacatactagtacatgatcaaatggtaccaaagattgcagactttggtctatcaaggctggctgaagtatcacgtactatgagcaatgaacggcttttatccctaggatactgcgctccagaataccaataccatggcaaaatgtcccttaagtctgacatctatagtttaggtgtcataatgctggagctggtgaccgggagcaaggaggagccggacattactaatgtacttcgacggtggagccataggtggaaaaaatcaggacagcgtacaccatcatttcaacgccatcaagtgagtaaatgcataggtttggctaagagatgcaaagaagtagaaccaacaagaaggccttctatatgtgatatacttgctgccctaggcaaaatggaagatatgaattgcagtgatcaacaagtggacgaggaagtcacttatctggaggacatgctaggaatcgagcctcttgatctgcatttcctagtcgaacctaccaagcagatatcctgctcagtccatctgaccaacgctacgaatgactgtttcgccttcattgttcagacgacgaacccgaagcagtactgcatacagccggacagaggcgtcgttccaccacgatctgagtgtagtgttgccatcgtattatcgcaagaaccgacgcataataagcgatgcagcatggaggacgagctaagcgtgcagagcaccagagtggatgagggtgtgacagctgcggatgtgagtgaagcgttgttcactggaaaggaagatagaacggtcgatcacgtgagcctgatggtcggtttcgacatgtcgccatcgccacctgaggaacaaacggaggacttcacgtttgcaccactggcgtcgttgtacgacgaggagccacagttaagcgcggcgaaggtatcagtatggacatccaatcagttggggcgttctggtcgcttctctaagaagaagctagtgtctattctgaaatcctggcgagcaagattaaaggtatcatcccataagaaactcgagactccaaagcatgactgtgagattcctgaagctgtagagcatgaagaagttgccgcgcccaggtgtcccaaaggaccactgccacagcgcgatctttctccactgggcgaagcatgttctaggatgaacatgacggcgatccatgagatcctagtgaacagacattacagagatgatgacctagacccaaacgtgccgtcgctcgaggaatggacacagcagagcagggatatgttggatgataggaaacgtggggacttcacttttcgtgataaagatttccgagcagccatagactggtataccaagtgtatggatgtggggccaaagaaggcgtcaccaacagttctcgttcgacgcagttgctgccacctcatgtgcggcaacctggacgccgccctccgcgatgcaatgcaagcgcagcgtcagtatcccgactgcccaacctcactgtacatgcaagcagtggcactttcaaagctagggatgcatagtcaagccatgggcatgctgattgaggcgtcggagatggaagcgaatcagaaaaagacccgaaaagcagcttaagaagactcaacatgggcgaaacctatataccttcgttttgtttctgtaagctattcttgattgttgtatctgcttgccaaattgtctaggttggagtggaattgggaagctttacctcttggggataatgcatttcttgttgtattcccctctgaggatgaaatgctccgtatggctgatattgagtataagctcaagagtggaatttctattcatatggattaggcctggagatgctaatccggcctattttttttggatgagatttgggtgcatgtttctggtgttccgcatgaatggctgacacttcttggcattctgggcactactcttgacatacaggaaggggattattcgcctgctggttactcttgacatacaggaaggggatctatgattggcactactattgacaaagtggggtatgagattacaatcactcccgagccgtcggattttgaaccagcaatgcctcccaaatttgacaaggaggatggggattcaggcgggggagagagaatctggtacgtcgagaaagaagcaaaaaagtgcgacaagctcctttcaaatttgtaagatagctcccatgag

SEQ ID NO: 42401 - DNA, 3809 bp, Zea Mays
gtagaccggtatgggtagtatcaatccatatccgtctacccaatgggtaggttcttgcccattaacatacccgtggcggctggagatatcatcccgtatccgtctttgtatgggggtaaaaccgtcggttattcgggtttccgttatgtattgccatcgtctatgcactgcatttcccttcctcacctccggcgcaaaaccgcagcagtaggatcccagccggtcggccgcccaggatgccggagcctgcgtccccgccctcagcggcgggagccggccgccacatatccactccacatcaacaagggagtggagaatgctcccggcgcctcttcgatctcgacctccggccggcctcatgtgggagacgagggacgatgggctcccttccctcagcgtcagcggtgagttctaagcccaaaaggtatttcagagttgggctttggacgatatgcagcagaaagggaacctaggtcgtcccgactctcttcttcctacttcctcaaaacaattagtgcgagaatcctactaagtcaagtcctcgagtattttagtatcgactaacactcaattttttttcacgaatcaacggaagacaaatttttttagaaaagggaagctttattcagaagtctaggatataaaaacaaactctcaaaaacggccacccatgtttgggtggatctccactgctgataccgatgctgatggttctttttctagtttattagcatggtgatagcccaatcgattatcgttcattccttttgtagtttattactattattattgatgacgcctgtttctgaccactcctttcggccggccaaattaactctggaatttattccatgccttcctcggccctgtttgttctgcatgtcttcaaagggttgtgaccccatatagccggatgtcagtcaattcatccatggcgatcaatccattcctcgagcaggccaaggttcttctctgggttttgaggaaggacccatctgcgatgctcatctaattaaggttacctggtcatcttgctactcggtcgcctacaggatcggatagcttactctatctataatcacaccgagcaaactgtccatcctagctacaatgggtagcacgcacaaggaagaagtaggtgtcctggaggaaatacttgacgggagaaaagagccgaggaagctatctttatcagttctaaaacacatcacaaatgacttctcgcacgagcgaataatcggttatggtgggtgcggagaggtttacaagggcatcctgcaaaacggaagcgtcgctgtgaagaaaatcttcagcaacctaaatgttgaagataaggaatttgatcgagagattcagagcatgatgcaggtgaagcatccaaacgtagtgcggtttattggctactgttctaacacagagcatgaactgatgagaaaagaaggcaagtatattaaggtcgaggtgcgagaaaggctgctctgtttcgagcatatcagcaacggaagcctccgcagccacattacagatggactaagagggcttgaatggcacgcacggtataaaataattaagggaatttgtgagggcctacatcatcttcacatggaaaaaaacatcattcacatggatcttaaacctgccaacatactagtacatgatcaaatggtaccaaagattgcagactttggtctatcaaggctggctgaagtatcacgtactatgagcaatgaacggcttttatccctaggatactgcgctccagaataccaataccatggcaaaatgtcccttaagtctgacatctatagtttaggtgtcataatgctggagctggtgaccgggagcaaggaggagccggacattactaatgtacttcgacggtggagccataggtggaaaaaatcaggacagcgtacaccatcatttcaacgccatcaagtgagtaaatgcataggtttggctaagagatgcaaagaagtagaaccaacaagaaggccttctatatgtgatatacttgctgccctaggcaaaatggaagatatgaattgcagtgatcaacaagtggacgaggaagtcacttatctggaggacatgctaggaatcgagcctcttgatctgcatttcctagtcgaacctaccaagcagatatcctgctcagtccatctgaccaacgctacgaatgactgtttcgccttcattgttcagacgacgaacccgaagcagtactgcatacagccggacagaggcgtcgttccaccacgatctgagtgtagtgttgccatcgtattatcgcaagaaccgacgcataataagcgatgcagcatggaggacgagctaagcgtgcagagcaccagagtggatgagggtgtgacagctgcggatgtgagtgaagcgttgttcactggaaaggaagatagaacggtcgatcacgtgagcctgatggtcggtttcgacatgtcgccatcgccacctgaggaacaaacggaggacttcacgtttgcaccactggcgtcgttgtacgacgaggagccacagttaagcgcggcgaagagtgcgcgtttacagttggggcgttctggtcgcttctctaagaagaagctagtgtctattctgaaatcctggcgagcaagattaaaggtatcatcccataagaaactcgagactccaaagcatgactgtgagattcctgaagctgtagagcatgaagaagttgccgcgcccaggtgtcccaaaggaccactgccacagcgcgatctttctccactgggcgaagcatgttctaggatgaacatgacggcgatccatgagatcctagtgaacagacattacagagatgatgacctagacccaaacgtgccgtcgctcgaggaatggacacagcagagcagggatatgttggatgataggaaacgtggggacttcacttttcgtgataaagatttccgagcagccatagactgtgtatggatgtggggccaaagaaggcgtcaccaacagttctcgttcgacgcagttgctgccacctcatgtgcggcaacctggacgccgccctccgcgatgcaatgcaagcgcagcgtcagtatcccgactgcccaacctcactgtacatgcaagcagtggcactttcaaagctagggatgcatagtcaagccatgggcatgctgattgaggcgtcggagatggaagcgaatcagaaaaagacccgaaaagcagcttaagaagactcaacatgggcgaaacctatataccttcgttttgtttctgtaagctattcttgattgttgtatctgcttgccaaattgtctaggttggagtggaattgggaagctttacctcttggggataatgcatttcttgttgtattcccctctgaggatgaaatgctccgtatggctgatattgagtataagctcaagagtggaatttctattcatatggattaggcctggagatgctaatccggcctattttttttggatgagatttgggtgcatgtttctggtgttccgcatgaatggctgacacttcttggcattctgggcactactcttgacatacaggaaggggattattcgcctgctggttactcttgacatacaggaaggggatctatgattggcactactattgacaaagtggggtatgagattacaatcactcccgagccgtcggattttgaaccagcaatgcctcccaaatttgacaaggaggatggggattcaggcgggggagagagaatctggtacgtcgagaaagaagcaaaaaagtgcgacaagctcctttcaaatttgtaagatagctcccatgag

SEQ ID NO: 42402 - DNA, 3460 bp, Zea Mays
gaccggcactgatgattacataacttggtagttaaacaaataatagctagagaagagttttattttaattaagataggctctattagatgattataataatattgatgtggttatattttacctatgagtagaccggtatgggtagtatcaatccatatccgtctacccaatgggtaggttcttgcccattaacatacccgtggcggctggagatatcatcccgtatccgtctttgtatgggggtaaaaccgtcggttattcgggtttccgttatgtattgccatcgtctatgcactgcatttcccttcctcacctccggcgcaaaaccgcagcagtaggatcccagccggtcggccgcccaggatgccggagcctgcgtccccgccctcagcggcgggagccggccgccacatatccactccacatcaacaagggagtggagaatgctcccggcgcctcttcgatctcgacctccggccggcctcatgtgggagacgagggacgatgggctcccttccctcagcgtcagcgggttgtgaccccatatagccggatgtcagtcaattcatccatggcgatcaatccattcctcgagcaggccaaggttcttctctgggttttgaggaaggacccatctgcgatgctcatctaattaaggttacctggtcatcttgctactcggtcgcctacaggatcggatagcttactctatctataatcacaccgagcaaactgtccatcctagctacaatgggtagcacgcacaaggaagaagtaggtgtcctggaggaaatacttgacgggagaaaagagccgaggaagctatctttatcagttctaaaacacatcacaaatgacttctcgcacgagcgaataatcggttatggtgggtgcggagaggtttacaagggcatcctgcaaaacggaagcgtcgctgtgaagaaaatcttcagcaacctaaatgttgaagataaggaatttgatcgagagattcagagcatgatgcaggtgaagcatccaaacgtagtgcggtttattggctactgttctaacacagagcatgaactgatgagaaaagaaggcaagtatattaaggtcgaggtgcgagaaaggctgctctgtttcgagcatatcagcaacggaagcctccgcagccacattacagatggactaagagggcttgaatggcacgcacggtataaaataattaagggaatttgtgagggcctacatcatcttcacatggaaaaaaacatcattcacatggatcttaaacctgccaacatactagtacatgatcaaatggtaccaaagattgcagactttggtctatcaaggctggctgaagtatcacgtactatgagcaatgaacggcttttatccctaggatactgcgctccagaataccaataccatggcaaaatgtcccttaagtctgacatctatagtttaggtgtcataatgctggagctggtgaccgggagcaaggaggagccggacattactaatgtacttcgacggtggagccataggtggaaaaaatcaggacagcgtacaccatcatttcaacgccatcaagtgagtaaatgcataggtttggctaagagatgcaaagaagtagaaccaacaagaaggccttctatatgtgatatacttgctgccctaggcaaaatggaagatatgaattgcagtgatcaacaagtggacgaggaagtcacttatctggaggacatgctaggaatcgagcctcttgatctgcatttcctagtcgaacctaccaagcagatatcctgctcagtccatctgaccaacgctacgaatgactgtttcgccttcattgttcagacgacgaacccgaagcagtactgcatacagccggacagaggcgtcgttccaccacgatctgagtgtagtgttgccatcgtattatcgcaagaaccgacgcataataagcgatgcagcatggaggacgagctaagcgtgcagagcaccagagtggatgagggtgtgacagctgcggatgtgagtgaagcgttgttcactggaaaggaagatagaacggtcgatcacgtgagcctgatggtcggtttcgacatgtcgccatcgccacctgaggaacaaacggaggacttcacgtttgcaccactggcgtcgttgtacgacgaggagccacagttaagcgcggcgaagagtgcgcgtttacagttggggcgttctggtcgcttctctaagaagaagctagtgtctattctgaaatcctggcgagcaagattaaaggtatcatcccataagaaactcgagactccaaagcatgactgtgagattcctgaagctgtagagcatgaagaagttgccgcgcccaggtgtcccaaaggaccactgccacagcgcgatctttctccactgggcgaagcatgttctaggatgaacatgacggcgatccatgagatcctagtgaacagacattacagagatgatgacctagacccaaacgtgccgtcgctcgaggaatggacacagcagagcagggatatgttggatgataggaaacgtggggacttcacttttcgtgataaagatttccgagcagccatagactggtataccaagtgtatggatgtggggccaaagaaggcgtcaccaacagttctcgttcgacgcagttgctgccacctcatgtgcggcaacctggacgccgccctccgcgatgcaatgcaagcgcagcgtcagtatcccgactgcccaacctcactgtacatgcaagcagtggcactttcaaagctagggatgcatagtcaagccatgggcatgctgattgaggcgtcggagatggaagcgaatcagaaaaagacccgaaaagcagcttaagaagactcaacatgggcgaaacctatataccttcgttttgtttctgtaagctattcttgattgttgtatctgcttgccaaattgtctaggttggagtggaattgggaagctttacctcttggggataatgcatttcttgttgtattcccctctgaggatgaaatgctccgtatggctgatattgagtataagctcaagagtggaatttctattcatatggattaggcctggagatgctaatccggcctattttttttggatgagatttgggtgcatgtttctggtgttccgcatgaatggctgacacttcttggcattctgggcactactcttgacatacaggaaggggattattcgcctgctggttactcttgacatacaggaaggggatctatgattggcactactattgacaaagtggggtatgagattacaatcactcccgagccgtcggattttgaaccagcaatgcctcccaaatttgacaaggaggatggggattcaggcgggggagagagaatctggtacgtcgagaaagaagcaaaaaagtgcgacaagctcctttcaaatttgtaagatagctcccatgag

SEQ ID NO: 42403 - DNA, 6283 bp, Zea Mays
gctccacgcatgatggaccttcttacgacggccgttagtaatactccgatcatatgcagacacaaatgcatcctttgtactttctctctctctctatatatatatatctactatattaaagcacccgttttgacggttgtcctgcgtcgattttctttagaatcaacccacactcctataatctcttctctactactataatagaagagtttcttgcgtcctgattttagtgtgtcctcctcctccactaaccttcgtaagtcgtcgtgctttcccgcgtctacgaaacacactcccgcacactacgtgtataaaccgtctccgcacgccacacgccttcctccgcccgttatcgcaaccttagagcacgtcgtaaggataagtccccgtaaactccgcgccgagcgatgcaaggataggacctgtgaactccgcgtcgagtgacccgccacgtcgtaacctccgatagcgtgcctgccacagcgtcggtcgctataaatttctggcctctcgctctccgcgtcagcgcaacgaaaatggttaccactaccagcagcagggctcggatctttctaggtggcgggctcttcagagactcatgtcgtcagtctggtgctggcgtccgactgtttgccatgacatgtcgaggtcggacgaggacacagagacatgctggtcggtggctgcgaccacgggctccctcgttgtggcgccgacgaggaggaggctgtagtcgagcggcatggcgagggtgttgttccgcgtagggaggcgctttccgctctacatcacgccccatcattccatggtagttaaggtacccgtaccaccaactctttgactctaacgatcaatcgatctgcttaggctggaaaggtctcaattggtagctataggtggagtgctggcggtactaatgcgaaacagagcttgggagtcagattggtgcatatggggtgagcgatcgggtgcttgcttgctcatttctaaattgatggagcagggaattgagttatccgtgtttatagcggcgacgacggttacaaggatgcatgtcatgcatttgtggaattgcagcagccttcgttgagtcttggagagctacttctacggtcatgatctgaagaagtttctcaaagcgtgaacatctcttagcttgtaagatgattctaatttacagatgtttccatttcgatattaatcttattctgttaacaacatattttcttaaataacatcatgtttagcttcacaaatatgcttagtatttttttacatacatatattttcaatcagtagttataccaaatttgcaaattaaggcatgttagaggaagatacatcatgaaaaatagaataactaaaaattccaaacacaatggcttttgggcgtttaacttctctatacttcacagcccgtcgcagaagtattgttggatcgttgtggtctccatcctcttacaattgttgtcatgtgcaagctttgacgaaggaaactagagcgaaaaaatgggagaaaaccatatccaaccttccaacatatgcaacttgtgcacttggtctagttttatacgtcaatgaaaaagatatagatataccatgagaacaaaaacccatcagtaatagaagaggggaaatggtctcagcctctcagggaaacacatatgggagtaggacaactgcaaaggcacaactagggatgtcaaccggtacatactcatcgggtagtaccattccatacccgtacccataaaaatactatatccgtcaggttacccatatatactcgtgggtataaaatcatacccatacacgtactcacacaagtaattttaatccgtacccgctaggaaagtcttaaagtccaatacactaatcactcaaaatattaaataaacatacaaaaataagtttaacttcacgtacatcaaatcatatgattaccagtgccggtcctggcgggggtcgagcagtgcccccgaccagggcccccaaattaatggggcctcactttagttactaaataacagtatatatacagtcatatagcgtatattgtttatatatgtctgttggctctacaaaacttttaaagacctaattataagtcaacaacacggcaacaacaagcaaggagaattagacgtaacccattaatcttgatttctatattctagtagtagtacttcgtaatctcaggcccatctgactaggctctcagtcgcaaacagacaggcggtcgtgccgtctcctctcggtagccaacacacgacattgggtacgacaacgcttttgtctttccctacatagcgaacacgaaactaacatgacatgatcgattgatctcacaacgtattacatctatttgatcattgttcgaggtaaccttcttttgagtcatttggacacatatataccccatttttctacgagatgttatgttatattttagttactttgtatttaatgtgaacaacgttttcaaatatacataaatatttattaataatatatatatgcactataattatgtgtaataattaatattatcaagggcctccattataagtcttgttccgggcctctaaaatgtcaggaccggcactgatgattacataacttggtagttaaacaaataatagctagagaagagttttattttaattaagataggctctattagatgattataataatattgatgtggttatattttacctatgagtagaccggtatgggtagtatcaatccatatccgtctacccaatgggtaggttcttgcccattaacatacccgtggcggctggagatatcatcccgtatccgtctttgtatgggggtaaaaccgtcggttattcgggtttccgttatgtattgccatcgtctatgcactgcatttcccttcctcacctccggcgcaaaaccgcagcagtaggatcccagccggtcggccgcccaggatgccggagcctgcgtccccgccctcagcggcgggagccggccgccacatatccactccacatcaacaagggagtggagaatgctcccggcgcctcttcgatctcgacctccggccggcctcatgtgggagacgagggacgatgggctcccttccctcagcgtcagcggtgagttctaagcccaaaaggtatttcagagttgggctttggacgatatgcagcagaaagggaacctaggtcgtcccgactctcttcttcctacttcctcaaaacaattagtgcgagaatcctactaagtcaagtcctcgagtattttagtatcgactaacactcaattttttttcacgaatcaacggaagacaaatttttttagaaaagggaagctttattcagaagtctaggatataaaaacaaactctcaaaaacggccacccatgtttgggtggatctccactgctgataccgatgctgatggttctttttctagtttattagcatggtgatagcccaatcgattatcgttcattccttttgtagtttattactattattattgatgacgcctgtttctgaccactcctttcggccggccaaattaactctggaatttattccatgccttcctcggccctgtttgttctgcatgtcttcaaagggttgtgaccccatatagccggatgtcagtcaattcatccatggcgatcaatccattcctcgagcaggccaaggttcttctctgggttttgaggaaggacccatctgcgatgctcatctaattaaggttacctggtcatcttgctactcggtcgcctacaggatcggatagcttactctatctataatcacaccgagcaaactgtccatcctagctacaatgggtagcacgcacaaggaagaagtaggtgtcctggaggaaatacttgacgggagaaaagagccgaggaagctatctttatcagttctaaaacacatcacaaatgacttctcgcacgagcgaataatcggttatggtgggtgcggagaggtttacaagggcatcctgcaaaacggaagcgtcgctgtgaagaaaatcttcagcaacctaaatgttgaagataaggaatttgatcgagagattcagagcatgatgcaggtgaagcatccaaacgtagtgcggtttattggctactgttctaacacagagcatgaactgatgagaaaagaaggcaagtatattaaggtcgaggtgcgagaaaggctgctctgtttcgagcatatcagcaacggaagcctccgcagccacattacagatggactaagagggcttgaatggcacgcacggtataaaataattaagggaatttgtgagggcctacatcatcttcacatggaaaaaaacatcattcacatggatcttaaacctgccaacatactagtacatgatcaaatggtaccaaagattgcagactttggtctatcaaggctggctgaagtatcacgtactatgagcaatgaacggcttttatccctgtgtcataatgctggagctggtgaccgggagcaaggaggagccggacattactaatgaagtcacttatctggaggacatgctaggaatcgagcctcttgatctgcatttcctagtcgaacctaccaagcagatatcctgctcagtccatctgaccaacgctacgaatgactgtttcgccttcattgttcagacgacgaacccgaagcagtactgcatacagccggacagaggcgtcgttccaccacgatctgagtgtagtgttgccatcgtattatcgcaagaaccgacgcataataagcgatgcagcatggaggacgagctaagcgtgcagagcaccagagtggatgagggtgtgacagctgcggatgtgagtgaagcgttgttcactggaaaggaagatagaacggtcgatcacgtgagcctgatggtcggtttcgacatgtcgccatcgccacctgaggaacaaacggaggacttcacgtttgcaccactggcgtcgttgtacgacgaggagccacagttaagcgcggcgaaggtatcagtatggacatccaatcagttggggcgttctggtcgcttctctaagaagaagctagtgtctattctgaaatcctggcgagcaagattaaaggtatcatcccataagaaactcgagactccaaagcatgactgtgagattcctgaagctgtagagcatgaagaagttgccgcgcccaggtgtcccaaaggaccactgccacagcgcgatctttctccactgggcgaagcatgttctaggatgaacatgacggcgatccatgagatcctagtgaacagacattacagagatgatgacctagacccaaacgtgccgtcgctcgaggaatggacacagcagagcagggatatgttggatgataggaaacgtggggacttcacttttcgtgataaagatttccgagcagccatagactggtataccaagtgtatggatgtggggccaaagaaggcgtcaccaacagttctcgttcgacgcagttgctgccacctcatgtgcggcaacctggacgccgccctccgcgatgcaatgcaagcgcagcgtcagtatcccgactgcccaacctcactgtacatgcaagcagtggcactttcaaagctagggatgcatagtcaagccatgggcatgctgattgaggcgtcggagatggaagcgaatcagaaaaagacccgaaaagcagcttaagaagactcaacatgggcgaaacctatataccttcgttttgtttctgtaagctattcttgattgttgtatctgcttgccaaattgtctaggttggagtggaattgggaagctttacctcttggggataatgcatttcttgttgtattcccctctgaggatgaaatgctccgtatggctgatattgagtataagctcaagagtggaatttctattcatatggattaggcctggagatgctaatccggcctattttttttggatgagatttgggtgcatgtttctggtgttccgcatgaatggctgacacttcttggcattctgggcactactcttgacatacaggaaggggattattcgcctgctggttactcttgacatacaggaaggggatctatgattggcactactattgacaaagtggggtatgagattacaatcactcccgagccgtcggattttgaaccagcaatgcctcccaaatttgacaaggaggatggggattcaggcgggggagagagaatctggtacgtcgagaaagaagcaaaaaagtgcgacaagctcctttcaaatttgtaagatagctcccatgag

SEQ ID NO: 42404 - DNA, 6351 bp, Zea Mays
gctccacgcatgatggaccttcttacgacggccgttagtaatactccgatcatatgcagacacaaatgcatcctttgtactttctctctctctctatatatatatatctactatattaaagcacccgttttgacggttgtcctgcgtcgattttctttagaatcaacccacactcctataatctcttctctactactataatagaagagtttcttgcgtcctgattttagtgtgtcctcctcctccactaaccttcgtaagtcgtcgtgctttcccgcgtctacgaaacacactcccgcacactacgtgtataaaccgtctccgcacgccacacgccttcctccgcccgttatcgcaaccttagagcacgtcgtaaggataagtccccgtaaactccgcgccgagcgatgcaaggataggacctgtgaactccgcgtcgagtgacccgccacgtcgtaacctccgatagcgtgcctgccacagcgtcggtcgctataaatttctggcctctcgctctccgcgtcagcgcaacgaaaatggttaccactaccagcagcagggctcggatctttctaggtggcgggctcttcagagactcatgtcgtcagtctggtgctggcgtccgactgtttgccatgacatgtcgaggtcggacgaggacacagagacatgctggtcggtggctgcgaccacgggctccctcgttgtggcgccgacgaggaggaggctgtagtcgagcggcatggcgagggtgttgttccgcgtagggaggcgctttccgctctacatcacgccccatcattccatggtagttaaggtacccgtaccaccaactctttgactctaacgatcaatcgatctgcttaggctggaaaggtctcaattggtagctataggtggagtgctggcggtactaatgcgaaacagagcttgggagtcagattggtgcatatggggtgagcgatcgggtgcttgcttgctcatttctaaattgatggagcagggaattgagttatccgtgtttatagcggcgacgacggttacaaggatgcatgtcatgcatttgtggaattgcagcagccttcgttgagtcttggagagctacttctacggtcatgatctgaagaagtttctcaaagcgtgaacatctcttagcttgtaagatgattctaatttacagatgtttccatttcgatattaatcttattctgttaacaacatattttcttaaataacatcatgtttagcttcacaaatatgcttagtatttttttacatacatatattttcaatcagtagttataccaaatttgcaaattaaggcatgttagaggaagatacatcatgaaaaatagaataactaaaaattccaaacacaatggcttttgggcgtttaacttctctatacttcacagcccgtcgcagaagtattgttggatcgttgtggtctccatcctcttacaattgttgtcatgtgcaagctttgacgaaggaaactagagcgaaaaaatgggagaaaaccatatccaaccttccaacatatgcaacttgtgcacttggtctagttttatacgtcaatgaaaaagatatagatataccatgagaacaaaaacccatcagtaatagaagaggggaaatggtctcagcctctcagggaaacacatatgggagtaggacaactgcaaaggcacaactagggatgtcaaccggtacatactcatcgggtagtaccattccatacccgtacccataaaaatactatatccgtcaggttacccatatatactcgtgggtataaaatcatacccatacacgtactcacacaagtaattttaatccgtacccgctaggaaagtcttaaagtccaatacactaatcactcaaaatattaaataaacatacaaaaataagtttaacttcacgtacatcaaatcatatgattaccagtgccggtcctggcgggggtcgagcagtgcccccgaccagggcccccaaattaatggggcctcactttagttactaaataacagtatatatacagtcatatagcgtatattgtttatatatgtctgttggctctacaaaacttttaaagacctaattataagtcaacaacacggcaacaacaagcaaggagaattagacgtaacccattaatcttgatttctatattctagtagtagtacttcgtaatctcaggcccatctgactaggctctcagtcgcaaacagacaggcggtcgtgccgtctcctctcggtagccaacacacgacattgggtacgacaacgcttttgtctttccctacatagcgaacacgaaactaacatgacatgatcgattgatctcacaacgtattacatctatttgatcattgttcgaggtaaccttcttttgagtcatttggacacatatataccccatttttctacgagatgttatgttatattttagttactttgtatttaatgtgaacaacgttttcaaatatacataaatatttattaataatatatatatgcactataattatgtgtaataattaatattatcaagggcctccattataagtcttgttccgggcctctaaaatgtcaggaccggcactgatgattacataacttggtagttaaacaaataatagctagagaagagttttattttaattaagataggctctattagatgattataataatattgatgtggttatattttacctatgagtagaccggtatgggtagtatcaatccatatccgtctacccaatgggtaggttcttgcccattaacatacccgtggcggctggagatatcatcccgtatccgtctttgtatgggggtaaaaccgtcggttattcgggtttccgttatgtattgccatcgtctatgcactgcatttcccttcctcacctccggcgcaaaaccgcagcagtaggatcccagccggtcggccgcccaggatgccggagcctgcgtccccgccctcagcggcgggagccggccgccacatatccactccacatcaacaagggagtggagaatgctcccggcgcctcttcgatctcgacctccggccggcctcatgtgggagacgagggacgatgggctcccttccctcagcgtcagcggtgagttctaagcccaaaaggtatttcagagttgggctttggacgatatgcagcagaaagggaacctaggtcgtcccgactctcttcttcctacttcctcaaaacaattagtgcgagaatcctactaagtcaagtcctcgagtattttagtatcgactaacactcaattttttttcacgaatcaacggaagacaaatttttttagaaaagggaagctttattcagaagtctaggatataaaaacaaactctcaaaaacggccacccatgtttgggtggatctccactgctgataccgatgctgatggttctttttctagtttattagcatggtgatagcccaatcgattatcgttcattccttttgtagtttattactattattattgatgacgcctgtttctgaccactcctttcggccggccaaattaactctggaatttattccatgccttcctcggccctgtttgttctgcatgtcttcaaagggttgtgaccccatatagccggatgtcagtcaattcatccatggcgatcaatccattcctcgagcaggccaaggttcttctctgggttttgaggaaggacccatctgcgatgctcatctaattaaggttacctggtcatcttgctactcggtcgcctacaggatcggatagcttactctatctataatcacaccgagcaaactgtccatcctagctacaatgggtagcacgcacaaggaagaagtaggtgtcctggaggaaatacttgacgggagaaaagagccgaggaagctatctttatcagttctaaaacacatcacaaatgacttctcgcacgagcgaataatcggttatggtgggtgcggagaggtttacaagggcatcctgcaaaacggaagcgtcgctgtgaagaaaatcttcagcaacctaaatgttgaagataaggaatttgatcgagagattcagagcatgatgcaggtgaagcatccaaacgtagtgcggtttattggctactgttctaacacagagcatgaactgatgagaaaagaaggcaagtatattaaggtcgaggtgcgagaaaggctgctctgtttcgagcatatcagcaacggaagcctccgcagccacattacagatggactaagagggcttgaatggcacgcacggtataaaataattaagggaatttgtgagggcctacatcatcttcacatggaaaaaaacatcattcacatggatcttaaacctgccaacatactagtacatgatcaaatggtaccaaagattgcagactttggtctatcaaggctggctgaagtatcacgtactatgagcaatgaacggcttttatccctaggatactgcgctccagaataccaataccatggcaaaatgtcccttaagtctgacatctatagtttaggtgtcataatgctggagctggtgaccgggagcaaggaggagccggacattactaatgaagtcacttatctggaggacatgctaggaatcgagcctcttgatctgcatttcctagtcgaacctaccaagcagatatcctgctcagtccatctgaccaacgctacgaatgactgtttcgccttcattgttcagacgacgaacccgaagcagtactgcatacagccggacagaggcgtcgttccaccacgatctgagtgtagtgttgccatcgtattatcgcaagaaccgacgcataataagcgatgcagcatggaggacgagctaagcgtgcagagcaccagagtggatgagggtgtgacagctgcggatgtgagtgaagcgttgttcactggaaaggaagatagaacggtcgatcacgtgagcctgatggtcggtttcgacatgtcgccatcgccacctgaggaacaaacggaggacttcacgtttgcaccactggcgtcgttgtacgacgaggagccacagttaagcgcggcgaaggtatcagtatggacatccaatcagttggggcgttctggtcgcttctctaagaagaagctagtgtctattctgaaatcctggcgagcaagattaaaggtatcatcccataagaaactcgagactccaaagcatgactgtgagattcctgaagctgtagagcatgaagaagttgccgcgcccaggtgtcccaaaggaccactgccacagcgcgatctttctccactgggcgaagcatgttctaggatgaacatgacggcgatccatgagatcctagtgaacagacattacagagatgatgacctagacccaaacgtgccgtcgctcgaggaatggacacagcagagcagggatatgttggatgataggaaacgtggggacttcacttttcgtgataaagatttccgagcagccatagactggtataccaagtgtatggatgtggggccaaagaaggcgtcaccaacagttctcgttcgacgcagttgctgccacctcatgtgcggcaacctggacgccgccctccgcgatgcaatgcaagcgcagcgtcagtatcccgactgcccaacctcactgtacatgcaagcagtggcactttcaaagctagggatgcatagtcaagccatgggcatgctgattgaggcgtcggagatggaagcgaatcagaaaaagacccgaaaagcagcttaagaagactcaacatgggcgaaacctatataccttcgttttgtttctgtaagctattcttgattgttgtatctgcttgccaaattgtctaggttggagtggaattgggaagctttacctcttggggataatgcatttcttgttgtattcccctctgaggatgaaatgctccgtatggctgatattgagtataagctcaagagtggaatttctattcatatggattaggcctggagatgctaatccggcctattttttttggatgagatttgggtgcatgtttctggtgttccgcatgaatggctgacacttcttggcattctgggcactactcttgacatacaggaaggggattattcgcctgctggttactcttgacatacaggaaggggatctatgattggcactactattgacaaagtggggtatgagattacaatcactcccgagccgtcggattttgaaccagcaatgcctcccaaatttgacaaggaggatggggattcaggcgggggagagagaatctggtacgtcgagaaagaagcaaaaaagtgcgacaagctcctttcaaatttgtaagatagctcccatgag

SEQ ID NO: 42405 - DNA, 2755 bp, Zea Mays
gccgggagcattctccattcttgaccttcgcctccactagtccactccctcgttgatcaagtagggaggagtgcagtggatatgtggcggcggcagcagactctcctccgccggctgccaccgctgagggtggtggcgcaggctccggcatcctggccggcctgccggctgggacgcttctgcgggtctgtgccggagaagaggaagggaaaggcggcgcctttgcaggcgcggggcatggtggacaggttccggatgcgcgccaagggtggcgacggcggcaatggatgcgtcagcctcaggcgctctaggtccaaccgccagggcatgcctgacggtggtagtggagggaagggcggtgatgtaattcttgagtgttcaaggtctatctgggatttcagtggcttgcagcatcacatgagaggaggccgaggtggcaatggagtttctaagaatcagataggaacaagagattgcacaagtacctgtaggcacagtgattcatcttgtcgaaggcgagcaaccttctctgacagtaaataaaccaaccagagctctggatccctgggatatacctagtgctgaagaacactcttcagatttggaccagattgttaatatagtggcagaaggttttgatggtggcttgtcccatcggcatattgcccctaagcataacactgatggaaatgacactgtaaagggaagcagcagtcactcagaggatccaaaatactttcatacatgctccaagcttcagttctcaaactctaatcgtgatgtaagaatctattcatgtcaggaggggacagatgaaaaagatcaaactgaaagtgaggatgaagaattttgggaggatgaagacgagtttgacatggatgaggaggaagaagaggatgagaaggaagaacaagatgtgcaatattgtgttgctgagatgacgaaacctgggcagcggttaatcatagcacgaggaggcaaaggtggactggggaatgcttttgtcatgaaggagatgcggccatccaaagcaaacagacaagagaagatagcccgtttgagtactgggcagccaggaactgagagcatccttatcctggaactgaagagcattgcagatgttggtctggttggattgcccaatgctgggaagagcacattgctcagtgctctatctagggcgcaaccagagatagctgactacgaattcaccacgctgaggcccaacattggcagcctgacctacgaggactacttctcagttaaagtggctgatatacctggcctgatcaaaggagcacatgagaaccgtggcctgggccatgctttcctgaggcacatagagcgcaccaaagttattgcctatgtgcttgaccttgcagccacacttaatggcaggaagggtatcccgccttgggagcagctgcacgatttggtcacagagctggagcattaccaaaaaggaatgactcggcggccatcactgattgtggcaaacaagatagatgaagagggagctgaagagatgtacgaggagctgaagaggagagtgcagggtgttccaatatttccagtttgcgccatcttgcaggagggggtgccagatctgagagtgggtctaaggaaccttatggatgactcagatccgcagggcgttgattttgaggaaaacgactgttaaatgagaggactaggcaagaccaccctcgctcagctcatctacaacgaccctcaggtcaaggagcacttccatctactaaagtgggtatgtgtgtcagatgatttcagtgtccgtattcttgccaacaagatatgtaatacatcagaggcagtccttgaggatgcactaaagaagcttcaggaacatcttaagggaaagaggatcgacgataatggaatccgtctcacgccactccttccatgccgttgttgccttgggctgaagcttgttgaatccaaaggtgttcatttcttccacaaggtccttgaaggtgtcaacaatcccgcgaagcctgttgcccatcctaatatggaatgcagcacggttgtgggtagggaagagttttaccctggccataatgccaagcttggtgatgtgcccattcttcttggctcgacggtggagcgcctcatactcgaagtcatcgaagacctcgttcgcctcagaagcaggaggaagttcacagaggccatgaagcgccaggatcttagagatgctgtacttgtccttctcgtcgtttgtgagcaggaggacaacatagtccatgtctctgttctcaaccgccctaacagcatcgcagcaggggctatgccgggacacaacatagatggggtagccgagacggatgaaccggtcgcattcctctaggatcttgtccttctgttctttgctcactgatggcttaccactcacgaggaggctgggactgggagaagaaaccactacaaggactaggagagcggctacttgcttagacggaaacatcgatctcttattatcgcagtgcagatctccgcagctagtgatcgagttgccaccgcagctgcagccgtgggcggcctcgccggactccgccgcggcctcgacgaactcgggcgcggccttcttctccggggccacgccgaggacgacggtggcctgcgcggcggtgctcgtctcctccagcttgagccgcagccgcagcttgatccgcagttgcaagacatcctcgaccttgtggtgcaaaagaagctcgatctcttcaagaatcaatga

SEQ ID NO: 42406 - DNA, 2753 bp, Zea Mays
gtcgtctctcgtctcggctggccgccgccggaggttgagacacaagaggcgccgggagcattctccattcttgaccttcgcctccactagtccactccctcgttgatcaagtagggaggagtgcagtggatatgtggcggcggcagcagactctcctccgccggctgccaccgctgagggtggtggcgcaggctccggcatcctggccggcctgccggctgggacgcttctgcgggtctgtgccggagaagaggaagggaaaggcggcgcctttgcaggcgcggggcatggtggacaggttccggatgcgcgccaagggtggcgacggcggcaatggatgcgtcagcctcaggcgctctaggtccaaccgccagggcatgcctgacggtggtagtggagggaagggcggtgatgtaattcttgagtgttcaaggtctatctgggatttcagtggcttgcagcatcacatgattgcacaagtacctgtaggcacagtgattcatcttgtcgaaggcgagcaaccttctctgacagtaaataaaccaaccagagctctggatccctgggatatacctagtgctgaagaacactcttcagatttggaccagattgttaatatagtggcagaaggttttgatggtggcttgtcccatcggcatattgcccctaagcataacactgatggaaatgacactgtaaagggaagcagcagtcactcagaggatccaaaatactttcatacatgctccaagcttcagttctcaaactctaatcgtgatgtaagaatctattcatgtcaggaggggacagatgaaaaagatcaaactgaaagtgaggatgaagaattttgggaggatgaagacgagtttgacatggatgaggaggaagaagaggatgagaaggaagaacaagatgtgcaatattgtgttgctgagatgacgaaacctgggcagcggttaatcatagcacgaggaggcaaaggtggactggggaatgcttttgtcatgaaggagatgcggccatccaaagcaaacagacaagagaagatagcccgtttgagtactgggcagccaggaactgagagcatccttatcctggaactgaagagcattgcagatgttggtctggttggattgcccaatgctgggaagagcacattgctcagtgctctatctagggcgcaaccagagatagctgactacgaattcaccacgctgaggcccaacattggcagcctgacctacgaggactacttctcagttaaagtggctgatatacctggcctgatcaaaggagcacatgagaaccgtggcctgggccatgctttcctgaggcacatagagcgcaccaaagttattgcctatgtgcttgaccttgcagccacacttaatggcaggaagggtatcccgccttgggagcagctgcacgatttggtcacagagctggagcattaccaaaaaggaatgactcggcggccatcactgattgtggcaaacaagatagatgaagagggagctgaagagatgtacgaggagctgaagaggagagtgcagggtgttccaatatttccagtttgcgccatcttgcaggagggggtgccagatctgagagtgggtctaaggaaccttatggatgactcagatccgcagggcgttgattttgaggaaaacgactgttaaatgagaggactaggcaagaccaccctcgctcagctcatctacaacgaccctcaggtcaaggagcacttccatctactaaagtgggtatgtgtgtcagatgatttcagtgtccgtattcttgccaacaagatatgtaatacatcagaggcagtccttgaggatgcactaaagaagcttcaggaacatcttaagggaaagaggatcgacgataatggaatccgtctcacgccactccttccatgccgttgttgccttgggctgaagcttgttgaatccaaaggtgttcatttcttccacaaggtccttgaaggtgtcaacaatcccgcgaagcctgttgcccatcctaatatggaatgcagcacggttgtgggtagggaagagttttaccctggccataatgccaagcttggtgatgtgcccattcttcttggctcgacggtggagcgcctcatactcgaagtcatcgaagacctcgttcgcctcagaagcaggaggaagttcacagaggccatgaagcgccaggatcttagagatgctgtacttgtccttctcgtcgtttgtgagcaggaggacaacatagtccatgtctctgttctcaaccgccctaacagcatcgcagcaggggctatgccgggacacaacatagatggggtagccgagacggatgaaccggtcgcattcctctaggatcttgtccttctgttctttgctcactgatggcttaccactcacgaggaggctgggactgggagaagaaaccactacaaggactaggagagcggctacttgcttagacggaaacatcgatctcttattatcgcagtgcagatctccgcagctagtgatcgagttgccaccgcagctgcagccgtgggcggcctcgccggactccgccgcggcctcgacgaactcgggcgcggccttcttctccggggccacgccgaggacgacggtggcctgcgcggcggtgctcgtctcctccagcttgagccgcagccgcagcttgatccgcagttgcaagacatcctcgaccttgtggtgcaaaagaagctcgatctcttcaagaatcaatga

SEQ ID NO: 42407 - DNA, 2340 bp, Zea Mays
atgtggcggcggcagcagactctcctccgccggctgccaccgctgagggtggtggcgcaggctccggcatcctggccggcctgccggctgggacgcttctgcgggtctgtgccggagaagaggaagggaaaggcggcgcctttgcaggtctcctacttccatatccgtttccccgagtctatttccccctccgactgtttactgatgggtttggtgcaggcgcggggcatggtggacaggttccggatgcgcgccaagggtggcgacggcggcaatggatgcgtcagcctcaggcgctctaggtccaaccgccagggcatgcctgacggtggtagtggagggaagggcggtgatgtaattcttgagtgttcaaggtctatctgggatttcagtggcttgcagcatcacatgagaggaggccgaggtggcaatggagtttctaagaatcagataggaacaagaggcacagtgattcatcttgtcgaaggcgagcaaccttctctgacagtaaataaaccaaccagagctctggatccctgggatatacctagtgctgaagaacactcttcagatttggaccagattgttaatatagtggcagaaggttttgatggtggcttgtcccatcggcatattgcccctaagcataacactgatggaaatgacactgtaaagggaagcagcagtcactcagaggatccaaaatactttcatacatgctccaagcttcagttctcaaactctaatcgtgatgtaagaatctattcatgtcaggaggggacagatgaaaaagatcaaactgaaagtgaggatgaagaattttgggaggatgaagacgagtttgacatggatgaggaggaagaagaggatgagaaggaagaacaagatgtgcaatattgtgttgctgagatgacgaaacctgggcagcggttaatcatagcacgaggaggcaaaggtggactggggaatgcttttgtcatgaaggagatgcggccatccaaagcaaacagacaagagaagatagcccgtttgagtactgggcagccaggaactgagagcatccttatcctggaactgaagagcattgcagatgttggtctggttggattgcccaatgctgggaagagcacattgctcagtgctctatctagggcgcaaccagagatagctgactacgaattcaccacgctgaggcccaacattggcagcctgacctacgaggactacttctcagttaaagtggctgatatacctggcctgatcaaaggagcacatgagaaccgtggcctgggccatgctttcctgaggcacatagagcgcaccaaagttattgcctatgtgcttgaccttgcagccacacttaatggcaggaagggtatcccgccttgggagcagctgcacgatttggtcacagagctggagcattaccaaaaaggaatgactcggcggccatcactgattgtggcaaacaagatagatgaagagggagctgaagagatgtacgaggagctgaagaggagagtgcagggtgttccaatatttccagtttgcgccatcttgcaggagggggtgccagatctgagagtgggtctaaggaaccttatggatgactcagatccgcagggcgttgattttgaggaaaacgactgttaaatgagaggactaggcaagaccaccctcgctcagctcatctacaacgaccctcaggtcaaggagcacttccatctactaaagtgggtatgtgtgtcagatgatttcagtgtccgtattcttgccaacaagatatgtaatacatcagaggcagtccttgaggatgcactaaagaagcttcaggaacatcttaagggaaagaggatcgacgataatggaatccgtctcacgccactccttccatgccgttgttgccttgggctgaagcttgttgaatccaaaggtgttcatttcttccacaaggtccttgaaggtgtcaacaatcccgcgaagcctgttgcccatcctaatatggaatgcagcacggttgtgggtagggaagagttttaccctggccataatgccaagcttggtgatgtgcccattcttcttggctcgacggtggagcgcctcatactcgaagtcatcgaagacctcgttcgcctcagaagcaggaggaagttcacagaggccatgaagcgccaggatcttagagatgctgtacttgtccttctcgtcgtttgtgagcaggaggacaacatagtccatgtctctgttctcaaccgccctaacagcatcgcagcaggggctatgccgggacacaacatagatggggtagccgagacggatgaaccggtcgcattcctctag

SEQ ID NO: 42408 - DNA, 2354 bp, Zea Mays
cttcgcctccactagtccactccctcgttgatcaagtagggaggagtgcagtggatatgtggcggcggcagcagactctcctccgccggctgccaccgctgagggtggtggcgcaggctccggcatcctggccggcctgccggctgggacgcttctgcgggtctgtgccggagaagaggaagggaaaggcggcgcctttgcaggcgcggggcatggtggacaggttccggatgcgcgccaagggtggcgacggcggcaatggatgcgtcagcctcaggcgctctaggtccaaccgccagggcatgcctgacggtggtagtggagggaagggcggtgatgtaattcttgagtgttcaaggtctatctgggatttcagtggcttgcagcatcacatgagaggaggccgaggtggcaatggagtttctaagaatcagataggaacaagaggtcctgacaagattgcacaagtacctgtaggcacagtgattcatcttgtcgaaggcgagcaaccttctctgacagtaaataaaccaaccagagctctggatccctgggatatacctagtgctgaagaacactcttcagatttggaccagattgttaatatagtggcagaaggttttgatggtggcttgtcccatcggcatattgcccctaagcataacactgatggaaatgacactgtaaagggaagcagcagtcactcagaggatccaaaatactttcatacatgctccaagcttcagttctcaaactctaatcgtgatgtaagaatctattcatgtcaggaggggacagatgaaaaagatcaaactgaaagtgaggatgaagaattttgggaggatgaagacgagtttgacatggatgaggaggaagaagaggatgagaaggaagaacaagatgtgcaatattgtgttgctgagatgacgaaacctgggcagcggttaatcatagcacgaggaggcaaaggtggactggggaatgcttttgtcatgaaggagatgcggccatccaaagcaaacagacaagagaagatagcccgtttgagtactgggcagccaggaactgagagcatccttatcctggaactgaagagcattgcagatgttggtctggttggattgcccaatgctgggaagagcacattgctcagtgctctatctagggcgcaaccagagatagctgactacgaattcaccacgctgaggcccaacattggcagcctgacctacgaggactacttctcagttaaagtggctgatatacctggcctgatcaaaggagcacatgagaaccgtggcctgggccatgctttcctgaggcacatagagcgcaccaaagttattgcctatgtgcttgaccttgcagccacacttaatggcaggaagggtatcccgccttgggagcagctgcacgatttggtcacagagctggagcattaccaaaaaggaatgactcggcggccatcactgattgtggcaaacaagatagatgaagagggagctgaagagatgtacgaggagctgaagaggagagtgcagggtgttccaatatttccagtttgcgccatcttgcaggagggggtgccagatctgagagtgggtctaaggaaccttatggatgactcagatccgcagggcgttgattttgaggaaaacgactgttaaatgagaggactaggcaagaccaccctcgctcagctcatctacaacgaccctcaggtcaaggagcacttccatctactaaagtgggtatgtgtgtcagatgatttcagtgtccgtattcttgccaacaagatatgtaatacatcagaggcagtccttgaggatgcactaaagaagcttcaggaacatcttaagggaaagaggatcgacgataatggaatccgtctcacgccactccttccatgccgttgttgccttgggctgaagcttgttgaatccaaaggtgttcatttcttccacaaggtccttgaaggtgtcaacaatcccgcgaagcctgttgcccatcctaatatggaatgcagcacggttgtgggtagggaagagttttaccctggccataatgccaagcttggtgatgtgcccattcttcttggctcgacggtggagcgcctcatactcgaagtcatcgaagacctcgttcgcctcagaagcaggaggaagttcacagaggccatgaagcgccaggatcttagagatgctgtacttgtccttctcgtcgtttgtgagcaggaggacaacatagtccatgtctctgttctcaaccgccctaacagcatcgcagcaggggctatgccgggacacaacatagatggggtagccgagacggatgaaccggtcgcattcctctag

SEQ ID NO: 42409 - DNA, 2497 bp, Zea Mays
gagcccgtcgtctctcgtctcggctggccgccgccggaggttgagacacaagaggcgccgggagcattctccattcttgaccttcgcctccactagtccactccctcgttgatcaagtagggaggagtgcagtggatatgtggcggcggcagcagactctcctccgccggctgccaccgctgagggtggtggcgcaggctccggcatcctggccggcctgccggctgggacgcttctgcgggtctgtgccggagaagaggaagggaaaggcggcgcctttgcaggtctcctacttccatatccgtttccccgagtctatttccccctccgactgtttactgatgggtttggtgcaggcgcggggcatggtggacaggttccggatgcgcgccaagggtggcgacggcggcaatggatgcgtcagcctcaggcgctctaggtccaaccgccagggcatgcctgacggtggtagtggagggaagggcggtgatgtaattcttgagtgttcaaggtctatctgggatttcagtggcttgcagcatcacatggagaggaggccgaggtggcaatggagtttctaagaatcagataggaacaagagattgcacaagtacctgtaggcacagtgattcatcttgtcgaaggcgagcaaccttctctgacagtaaataaaccaaccagagctctggatccctgggatatacctagtgctgaagaacactcttcagatttggaccagattgttaatatagtggcagaaggttttgatggtggcttgtcccatcggcatattgcccctaagcataacactgatggaaatgacactgtaaagggaagcagcagtcactcagaggatccaaaatactttcatacatgctccaagcttcagttctcaaactctaatcgtgatgtaagaatctattcatgtcaggaggggacagatgaaaaagatcaaactgaaagtgaggatgaagaattttgggaggatgaagacgagtttgacatggatgaggaggaagaagaggatgagaaggaagaacaagatgtgcaatattgtgttgctgagatgacgaaacctgggcagcggttaatcatagcacgaggaggcaaaggtggactggggaatgcttttgtcatgaaggagatgcggccatccaaagcaaacagacaagagaagatagcccgtttgagtactgggcagccaggaactgagagcatccttatcctggaactgaagagcattgcagatgttggtctggttggattgcccaatgctgggaagagcacattgctcagtgctctatctagggcgcaaccagagatagctgactacgaattcaccacgctgaggcccaacattggcagcctgacctacgaggactacttctcagttaaagtggctgatatacctggcctgatcaaaggagcacatgagaaccgtggcctgggccatgctttcctgaggcacatagagcgcaccaaagttattgcctatgtgcttgaccttgcagccacacttaatggcaggaagggtatcccgccttgggagcagctgcacgatttggtcacagagctggagcattaccaaaaaggaatgactcggcggccatcactgattgtggcaaacaagatagatgaagagggagctgaagagatgtacgaggagctgaagaggagagtgcagggtgttccaatatttccagtttgcgccatcttgcaggagggggtgccagatctgagagtgggtctaaggaaccttatggatgactcagatccgcagggcgttgattttgaggaaaacgactgttaaatgagaggactaggcaagaccaccctcgctcagctcatctacaacgaccctcaggtcaaggagcacttccatctactaaagtgggtatgtgtgtcagatgatttcagtgtccgtattcttgccaacaagatatgtaatacatcagaggcagtccttgaggatgcactaaagaagcttcaggaacatcttaagggaaagaggatcgacgataatggaatccgtctcacgccactccttccatgccgttgttgccttgggctgaagcttgttgaatccaaaggtgttcatttcttccacaaggtccttgaaggtgtcaacaatcccgcgaagcctgttgcccatcctaatatggaatgcagcacggttgtgggtagggaagagttttaccctggccataatgccaagcttggtgatgtgcccattcttcttggctcgacggtggagcgcctcatactcgaagtcatcgaagacctcgttcgcctcagaagcaggaggaagttcacagaggccatgaagcgccaggatcttagagatgctgtacttgtccttctcgtcgtttgtgagcaggaggacaacatagtccatgtctctgttctcaaccgccctaacagcatcgcagcaggggctatgccgggacacaacatagatggggtagccgagacggatgaaccggtcgcattcctctag

SEQ ID NO: 42410 - DNA, 1812 bp, Zea Mays
caagaggcgccgggagcattctccattcttgaccttcgcctccactagtccactccctcgttgatcaagtagggaggagtgcagtggatatgtggcggcggcagcagactctcctccgccggctgccaccgctgagggtggtggcgcaggctccggcatcctggccggcctgccggctgggacgcttctgcgggtctgtgccggagaagaggaagggaaaggcggcgcctttgcaggtctcctacttccatatccgtttccccgagtctatttccccctccgactgtttactgatgggtttggtgcaggcgcggggcatggtggacaggttccggatgcgcgccaagggtggcgacggcggcaatggatgcgtcagcctcaggcgctctaggtccaaccgccagggcatgcctgacggtggtagtggagggaagggcggtgatgtaattcttgagtgttcaaggtctatctgggatttcagtggcttgcagcatcacatgattgcacaagtacctgtaggcacagtgattcatcttgtcgaaggcgagcaaccttctctgacagtaaataaaccaaccagagctctggatccctgggatatacctagtgctgaagaacactcttcagatttggaccagattgttaatatagtggcagaaggttttgatggtggcttgtcccatcggcatattgcccctaagcataacactgatggaaatgacactgtaaagggaagcagcagtcactcagaggatccaaaatactttcatacatgctccaagcttcagttctcaaactctaatcgtgatgtaagaatctattcatgtcaggaggggacagatgaaaaagatcaaactgaaagtgaggatgaagaattttgggaggatgaagacgagtttgacatggatgaggaggaagaagaggatgagaaggaagaacaagatgtgcaatattgtgttgctgagatgacgaaacctgggcagcggttaatcatagcacgaggaggcaaaggtggactggggaatgcttttgtcatgaaggagatgcggccatccaaagcaaacagacaagagaagatagcccgtttgagtactgggcagccaggaactgagagcatccttatcctggaactgaagagcattgcagatgttggtctggttggattgcccaatgctgggaagagcacattgctcagtgctctatctagggcgcaaccagagatagctgactacgaattcaccacgctgaggcccaacattggcagcctgacctacgaggactacttctcagttaaagtggctgatatacctggcctgatcaaaggagcacatgagaaccgtggcctgggccatgctttcctgaggcacatagagcgcaccaaagttattgcctatgtgcttgaccttgcagccacacttaatggcaggaagggtatcccgccttgggagcagctgcacgatttggtcacagagctggagcattaccaaaaaggaatgactcggcggccatcactgattgtggcaaacaagatagatgaagagggagctgaagagatgtacgaggagctgaagaggagagtgcagggtgttccaatatttccagtttgcgccatcttgcaggagggggtgccagatctgagagtgggtctaaggaaccttatggatgactcagatccgcagggcgttgattttgaggaaaacgactgttaaatgagggtagtagcagctgaaacattggcgttggtcggtaaataaacagaactgcgttttgcacttggtagaaccaacatgacaagaattagggcctgtatat

SEQ ID NO: 42411 - DNA, 1734 bp, Zea Mays
gaagaacaacccccaaacacacacccgaagaaagaggctcgctcctcccttcgctctctccaccttgcggcgctccacctccgtcccctcgccgccgcttctcacttcgcctcccctctcaaacaccccaagccgcagcgcaggcacgcgcgccgacgtctatccacccagcggcactcctcatgccctgcatcctccaccgcctgcagacgagtcccccacgccaccgcggccacgcctcgccgtccatgtccatggccgccgccccggcttcctgattcgtcccgtacccgcgcgtcgctcctcccgattccatccccgtccgcgccatgccgccgctgcgcggagccaagcgccgccggaaggcggcgttggagaagaaggcggcagcggtcgcaatggcgtctgccgccgcgggcgaccctcctggcgactggtgggaagccttctgcatccgtatgtcaggaaccttatcttctatcgaggatgcacaaagatttgagtctatattcaaaatgccaagaagagccttcgactatgtctgcaatttggtgagagatgaaatgatggtgaggtcctgcagctataccttccttgatggcacagtgctgtgtttggaagaccgagtggccattgctctgcgaaggctgaactctggtgggtcactggtgaccgtaggatcctctgttggagtgaaccactcaaccgtgtcgctgataacctggaggttcatcgaggctatggaggagcgagcgagccaccacctgcgctggccagactctattgaaatggagaagatcaagtccaagttcgagaagatccatggtctgccaaactgctgcggcgttgtggatacaacacacatcacaatgtgcctttcatcagccgagccgaactgcaaggtctggcttgatcaggagaagaactacagcatggtgttgcaagccgttgttgatctggacaccaagttcacagacatcgtgactggctggcctggtagcatgaaagagtcgagcattttgcacagctctggccttttcaagctctgcgagaaaggcgagcggctgaatggcagcaagctgaaggtatcagatgggtcagagatcggggaatacttgatcggcgactccggctacccccttctcccctggctgctcacaccttaccaagagaaggacctcacagagtccagtgctgagttcaacattaggcactcttctgcgagaacagtcgctccgagaacactggccaagttcaaggacacatggaagttcctgcaaggggagatgtggcgtccggacaagcacaagctgccccggataatccatgtctgctgcttgctgcacaacataatcatagaccttcaggaaacagcagtggacgaggcacaggcgtggccgagcgatcatgacgctaagtacaggcagcaagtgtgccagctagctgatgagaatggagtcagggtgagggacaaactgtcccagcacctgattagcaagtgaccaccaccaagcgtaaagcttattggacgagagagtagtgccattttcatctgtttcaggcagctctaaatcccttttgatgtccagttttgcagagttgtaaatgaggcaggcttcaatgtcagacctctactggttttcgtctacagcttgatctttgaaacacccagaggctagagctctattaccggtggcgaagctagagtaaatcttagggtgcaaatgttttgac

SEQ ID NO: 42412 - DNA, 656 bp, Zea Mays
ataaggaacgccgaggtgatcatctgggacctggccagcggtggccaacggagatgcagatgaacgttatgagcgacaagcaccacccagtctgagtctcacatgatttggtctcaccaccaccacacactaacgctggtccaagaggagccaaataaaaataaaaaggtgaggtatcaaaagcagcgtccaccgggcagtggatggatggatagaaaactaaaggctgctttgctttggcctgtgaggtgaggttagcaagcacacggtgagctgatgataacacttgtcctgccgtgggtctcagtggaggtacggtatcttggtgatcggcctcgaccctgacaccaagcattttcttaagcttgcctgaggtttgtgataagctaggtagcagcacggatggatgcatgcattttgtacgtttcaatatggacagcagcacttccatgggtcaccacgtttatcgcagtagccgccattcttagcagggaagttgtactcttggcaaactttgccgcagtgaaatggcgtgcagtattcacgatcgtatggaaagcagaatggtggccgcaacctggggacgacgccgcctgccaaaaaaacgttgctccacccgttatatatatatagttgattagtacatacatatatat

SEQ ID NO: 42413 - DNA, 738 bp, Zea Mays
ataaggaacgccgaggtgatcatctgggacctggccagcggtggccaacggagatgcagatgaacgttatgagcgacaagcaccacccagtctgagtctcacatgatttggtctcaccaccaccacacactaacgctggtccaagaggagccaaataaaaataaaaaggtgaggtatcaaaagcagcgtccaccgggcagtggatggatggatagaaaactaaaggctgctttgctttggcctgtgaggtgaggttagcaagcacacggtgagctgatgataacacttgtcctgccgtgggtctcagtggaggtcagttcatgcaccccctatctattgttgacgtacgtgctgggccattaacggttcatggatcatgacggtgttcggcttttggccgcagttctgaggtacggtatcttggtgatcggcctcgaccctgacaccaagcattttcttaagcttgcctgaggtagcagcacggatggatgcatgcattttgtacgtttcaatatggacagcagcacttccatgggtcaccacgtttatcgcagtagccgccattcttagcagggaagttgtactcttggcaaactttgccgcagtgaaatggcgtgcagtattcacgatcgtatggaaagcagaatggtggccgcaacctggggacgacgccgcctgccaaaaaaacgttgctccacccgttatatatatatagttgattagtacatacatatatat

SEQ ID NO: 42414 - DNA, 1117 bp, Zea Mays
ataaggaacgccgaggtgatcatctgggacctggccagcggtggccaacggagatgcagatgaacgttatgagcgacaagcaccacccagtctgagtctcacatgatttggtctcaccaccaccacacactaacgctggtccaagaggagccaaataaaaataaaaaggtgaggtatcaaaagcagcgtccaccgggcagtggatggatggatagaaaactaaaggctgctttgctttggcctgtgaggtgaggttagcaagcacacggtgagctgatgataacacttgtcctgccgtgggtctcagtggaggtacggtatcttggtgatcggcctcgaccctgacaccaagcattttcttaagcttgcctgaggtttgtgataagctaggtggtgtatcgtccttttccctgttctgtcattacggcctgtttttgctcatagctcagctggtgtcactgaggtatatataatcagatttattatgaaacatgttttcatagtatatttatttggtgtcacgtacagaagttgacaatcttttctacaaatctgatcaagtttgaaatagagactaaccggtttttaacagtccaaattcttaaattagtaatatctaaaggtcgtctgtgcaagttgagataaagatccgaaaaatttgggccttggcctaacaaatctacacatgcaagtgcgatctgggcaatgatattgattaggcccaacaaatctattgagtctcggacgcgagatcgtgggatcataagctcctgcactgcagtattttccaacacatgcattttattcattcattatatatattgatgatgattgacatgtatatcgatcaggtagcagcacggatggatgcatgcattttgtacgtttcaatatggacagcagcacttccatgggtcaccacgtttatcgcagtagccgccattcttagcagggaagttgtactcttggcaaactttgccgcagtgaaatggcgtgcagtattcacgatcgtatggaaagcagaatggtggccgcaacctggggacgacgccgcctgccaaaaaaacgttgctccacccgttatatatatatagttgattagtacatacatatatat

SEQ ID NO: 42415 - DNA, 788 bp, Zea Mays
agccaaccgattctcccaaaagcatatggtggtgataaggaacgccgaggtgatcatctgggacctggccagcggtggccaacggagatgcagatgaacgttatgagcgacaagcaccacccagtctgagtctcacatgatttggtctcaccaccaccacacactaacgctggtccaagaggagccaaataaaaataaaaaggtgaggtatcaaaagcagcgtccaccgggcagtggatggatggatagaaaactaaaggctgctttgctttggcctgtgaggtgaggttagcaagcacacggtgagctgatgataacacttgtcctgccgtgggtctcagtggaggtcagttcatgcaccccctatctattgttgacgtacgtgctgggccattaacggttcatggatcatgacggtgttcggcttttggccgcagttctgaggtacggtatcttggtgatcggcctcgaccctgacaccaagcattttcttaagcttgcctgaggtttgtgataagctaggtagcagcacggatggatgcatgcattttgtacgtttcaatatggacagcagcacttccatgggtcaccacgtttatcgcagtagccgccattcttagcagggaagttgtactcttggcaaactttgccgcagtgaaatggcgtgcagtattcacgatcgtatggaaagcagaatggtggccgcaacctggggacgacgccgcctgccaaaaaaacgttgctccacccgttatatatatatagttgattagtacatacatatatat

SEQ ID NO: 42416 - DNA, 1279 bp, Zea Mays
agccgagatgtggatgcctgcatgccgacgagccaaccgattctcccaaaagcatatggtggtgataaggaacgccgaggtgatcatctgggacctggccagcggtggccaacggagatgcagatgaacgttatgagcgacaagcaccacccagtctgagtctcacatgatttggtctcaccaccaccacacactaacgctggtccaagaggagccaaataaaaataaaaaggtgaggtatcaaaagcagcgtccaccgggcagtggatggatggatagaaaactaaaggctgctttgctttggcctgtgaggtgaggttagcaagcacacggtgagctgatgataacacttgtcctgccgtgggtctcagtggaggtcagttcatgcaccccctatctattgttgacgtacgtgctgggccattaacggttcatggatcatgacggtgttcggcttttggccgcagttctgaggtacggtatcttggtgatcggcctcgaccctgacaccaagcattttcttaagcttgcctgaggtttgtgataagctaggtggtgtatcgtccttttccctgttctgtcattacggcctgtttttgctcatagctcagctggtgtcactgaggtatatataatcagatttattatgaaacatgttttcatagtatatttatttggtgtcacgtacagaagttgacaatcttttctacaaatctgatcaagtttgaaatagagactaaccggtttttaacagtccaaattcttaaattagtaatatctaaaggtcgtctgtgcaagttgagataaagatccgaaaaatttgggccttggcctaacaaatctacacatgcaagtgcgatctgggcaatgatattgattaggcccaacaaatctattgagtctcggacgcgagatcgtgggatcataagctcctgcactgcagtattttccaacacatgcattttattcattcattatatatattgatgatgattgacatgtatatcgatcaggtagcagcacggatggatgcatgcattttgtacgtttcaatatggacagcagcacttccatgggtcaccacgtttatcgcagtagccgccattcttagcagggaagttgtactcttggcaaactttgccgcagtgaaatggcgtgcagtattcacgatcgtatggaaagcagaatggtggccgcaacctggggacgacgccgcctgccaaaaaaacgttgctccacccgttatatatatatagttgattagtacatacatatatat

SEQ ID NO: 42417 - DNA, 533 bp, Zea Mays
gaaaaaaggggattcatttgttcaatctggtggacatggtctatggtcctagccgcctccatttccattccgaatcagcagctgtcaatcagcctaaacatcaacaatctgaacatggttttcatcgcatggtgaattggtgatggagaccagcacaagccgatgagccagccagttttctgcaggaaataggttgatgggcaccgtacggtatcttggtgatcggcctcgaccctgacaccaagcattttcttaagcttgcctgaggtagcagcacggatggatgcatgcattttgtacgtttcaatatggacagcagcacttccatgggtcaccacgtttatcgcagtagccgccattcttagcagggaagttgtactcttggcaaactttgccgcagtgaaatggcgtgcagtattcacgatcgtatggaaagcagaatggtggccgcaacctggggacgacgccgcctgccaaaaaaacgttgctccacccgttatatatatatagttgattagtacatacatatatat

SEQ ID NO: 42418 - DNA, 1628 bp, Zea Mays
agatcccatctaacccatgcatttctgaatctctctctacataaacaaaaaccagtcctttgttcttcttcccccggcacgcccagcgccagtcaccaaccttccactccctccctccgtcgccatggcgcgcaagaagatccgggagtacgactccaagcgcctcctcagggagcacctcaagcgcctcgccggcatcgacctcaccatcctctccgcccagatcacgcaatcaacggacttcgcggagcttgtgagccagcagccatggctgtcaaccatgaagctagtggtgaagcctgatatgctgttcgggaagcgtgggaagagcggcctcgtggctctcaacttggatttcaatcaagtcaaggagtttgtcaaggagcggctgggggttgaggttgagatgggtggctgcaaggctccaatcacgaccttcatcgtcgagccatttgtgccacatgatcaagagtactacctttcgattgtctcagagaggttgggcagcaccatcagcttctcagagtgtggagggattgagattgaggagaactgggacaaggttaagactattttccttcctactgagaagccaatgacgtctgattcatgtgctcctttgattgcaacccttccattggaggcacgcggaaaaattggtgacttcattaaaggagtgtttgccgtcttcctagacttggatttctcatttcttgagatgaatccgttcaccatggtcaatggggagccatatcctctggacatgagaggagaactagatgacacagcagctttcaagaacttcaagaagtggggaggtatagaatttcctctaccttttggaagagtactcagccctacagaaagtttcatccatgaactagatgagaagacaagtgcctctctgaagttcacggttttgaacccgaaaggtcgcatctggaccatggtcgctggtggtggtgctagtgtcatttatgctgatacagttggagacttgggatatgcatcagagcttggaaactatgcagagtatagtggtgctcctaatgaggaggaggttctgaattattctagagttgttcttgattgtgcaactgctgatcctgatggccgcaagagagcccttctcattggaggtggcatagctaacttcactgatgttgctaccacattcaatggcatcatccgagccttaagggagaaggaatccaagttgaaggcttcaagaatgcacatttatgtccgccgaggtggtccaaattaccaatctggactggctaaaatgcgtaagcttggtgcagaactcggcgttccaattgaggtgtatgggccagaagcgactatgactggaatctgcaaacaagcaattgaatgcatcatggctgcagcgtaatcagagcgtagctctgggtagtttgggatctgcaaacacgcaattgaatgtgtcatggactcagcataaatgagagatggatagtagttgcattatatagttcacacatggtgtttctgttttttgtttcagatatgttgtagcgtgttgtttgaacgaaaccttcacagatcattactgcaaagaaattgctgtgtgttaaaataaattcaaagtctagttttgtgccaga

SEQ ID NO: 42419 - DNA, 718 bp, Zea Mays
tatcacagtacgttagctagtgtgcctaataatgtaatggaattatatctacaaatctgttgtcacggttacagtagagggggaaaaagattaaagcttgttgttgtttttaattatgtagagccacgcgaattggatacgaacacatttaatactttggtgtacacatttaatatatatatcctggctctgagatatgccagcattaatgtacgtacctggcgtttacactaacaatttccctctatataaacaagcacaatctgcacggcaatttgcatctcagaagtcagaacacaacctgcactgcacgagatgaggacggtgcactccacagctgctggcatttgcatccttcttctcatggtcatgtcttgcaccctcatgacgacacccacctgggcagcagaggattgctaccagcagtacccgacatgccaggacgccgtgtgcgaggcaaaatgcagtgaggaattccactccaagctctccggtttcaggtgcacgagccgtatgcacatccctgtttgctgctgcacccacacttgacgcggccggccggggatgcgtcagatccaattaatataatacaacaacaaccgtgctcaagctggtcaccgaatagtatgtaagagtagcaataattatatattctataaagatatatgtaacagctggacttgctcttccatgaaagaaaaagattttaaaaaataac

SEQ ID NO: 42420 - DNA, 886 bp, Zea Mays
atgatatttgatccactagctagaaccgttgtagttgtaggacactagctagaggcggctgtcccggagaagaggacagatagaagagcatcggcggcgtgtgcctccaactagaaccgccgtcgctccacttgatgctatcaacagctagcagcacgtatcgtacgtcctgtcaatgcctcgccacgtgcatgatccatgtatatgcaccctccccgtcactcagctctcagcggcacacaccttcccttgcattattggatggatagacacggacagacaacaaacaaactgatccaccaaaacatgaagagccagcagcatgtcgtcctcgctgctctcatcgtcgtcgtcgtcgccaccatattggtgcagacgacgccgccgccgcgtggtgcggaggcggccattattccgggtaatgttagcgcccccaacgccgtcgtcttcggcgtagtgccatgcagcaccgggagctccatcaacgtggccaccgccccgccgttcccaagtcgtcgtaggatgatggggtcgtaggacgatgggatgtgatctccaacaaataaaaggaactactgcgactacgagggagggagtctatagatgcatggaataaattaaacaaatgatgatatgtgtaccgtgtgttgtgttgtgttatcatatcacgtaattatacgtatatatatacctgtaccgtgcgttgtattatggtactaataataagcacgtacgtataacatgcttctctgcaacgcactttgttgttgtcgcctcctgtttcagttttgtgaaaacaattaaaatgatgtggtgtcacgttatatcgtacacatgtcattggaataacacaggattagaatacacatatcatttgtttggacca

SEQ ID NO: 42421 - DNA, 314 bp, Zea Mays
ccaccactgcctcacgcccttcgtcgagcacggccaataatccacttcgtcccctcctgctgctgatccccttcgtcgagcacggccaaggagaaggggacggtggcgagtcgcaagcggccgactgccaccatcgaggagtagtgtgggcaggctgccggcgagggcaagtgtgcgcgactaccgcgaggacgagtgcgggcgggctgctacagattcttggatcacatccattggtaagtggtaatctccagccttaacttttccatattctattgattagaactatcttcactaggaaatctacttaattc

SEQ ID NO: 42422 - DNA, 2993 bp, Zea Mays
atgacaggtgcgaagcttaatggcaagattactatcatccaggatttaatcagatgtgtacagtcctatccggagtttatggcggttccgacgaatgaggctcctagtcaaggcgctgcttcttcctccactacttcaagcacccagggctttccgctggctgatcttgtgggcaagaaggaggacctcgatgagcttctggacctcctcgtccggagacccgacaatgagctggacaaggtcctcaaggtgatggtgatctccgtcgtcggcttcggtggcataggggagaccaagctttgccacacagtgtacacggacgtacaggagagcagaaggttctccctgcatgcgtatgtcagcgctgctgggaaggactgcagcatcgttctggaagagataatcgagcaatttagactgcaagaggatccacaagatagcagtggtggattttttcacaggtattttgtggtggtggatggcgtggagtctgaagaactggtgagtggcatagcatctgccttcccggataatagtatgggcagtagaattatcatgggtatgaggaccgcagtgggcagggatgcagagagatgtgtgggtcatcatcacaagatgtggccacttgaagacaagcagtcggtggtgtgcttcctaaatgaagcggagcggcggcgacgacgacatgaacaagacgaccactcgtcgttcattaggtttcaggaacaagaccactcatcatcctgtttgcacaaggtatgtgatggcgtaccacttgcgctggttagcgtatgtgaagtccgcagagggtccatcatcactgctgccgttgaagaacaagaccgctggccacacagaatgcccaaggtgctcgaccacagctacgatggtctgcatatccggggtgctgggagctgtccgaaccaatacatcccctatctccaagcctgcctgctgtactttgccatgttcccccgcggcaatcatgtcaagaggggatccctgatcaggcgatggcaggcggaaggcctagagttcggaggcagcaatcaagctgccgaaaacctcaaggccctcgtagaccggaacttcgtttggcccctccatgcgagcctgaatgagcacgccaagacattccagcctcctggagtggtgctcaactacatctcccgcaggtctcaagaggaggaattcatcctcaggtcttgtccaagtggggaacttaatcccaattacagccgccggctttgtctacatcctgccgaggaagaagaaggtgaaccccaacccgtggtcattaccaacggttctgtaccaccacgcctgcgaactctggctgtgtcctgggggcagcaacaggccagcaggattgctgaatgcgagcagctccgagtgctggatctggcgtcatacaatggtctacagccagaccagctagaggagatatgcaagaaactgaagcttctcaaatatctgagcctcctgccagatatcatcactcaagttccaagctcaatgtctaatttgcagtgcttggagacactcgaggtgggggaggtcaatggcagggcggcagttctggtgcctatccaagtcttggaactgccacgcataaaacacctaatcggaaaatttgagcttattgacaacttcaacggactaccaattagggcttatccagatgcactagtaccaaaggcaatcaaggaaagcaacctggagacggtgtcggggttcttcacccgcagaggccaaggatttccgccactcatgcgtcacattaggcagctcaggaaggtgaagatatggttctacagggatgcagaacccaaatacctagcaagctatctcccgaaagcgattacaaaattcctcaggaatgacaacgttcatcgctccctgtcacttgacttccaggatggcccaagacaaacagaaatactgcaggcttgtgtggctgaagctagcggtaatctttactccctgaagctgtcgtccggcacaaatctgagcaggatccaactgtcggttattgccaccaacaagctgactggaatcacaaagctatgcctttcccgctggaaaacgataacgttggatgcagaatttctgaatgagctgaccaaattggccagtctgacgtatctgaagctggatgcagaaacaataaaaggtacgtacgaccaaaacccaacaccaggaggaaataaccaagagaaggtcgtcatagagactgggcacattgcaaatctgcggcggatgtgccttgtggccaggcagacgctgcccgacatacaagtcaagcctacagctctgcaacgactcgtttcacttcatctcatcagtgaaacggacgattattgtccttccgccaacgtcatctgtaaagccaacccccaggacgacaacgagccggcgccgttcacgagcctccaggaagtctcgctgaatgctacggtacccgaaaatttaagggattcttggcgtaatgctgcaagggaccatccaaagaggccacgaattctcttcatccaacaccctcaccgtgcgggataacccctatatgttcttcgtttgaaacctccaagttcgatctgtcactttctccacgcagtgctcctgcttcttcaagattgattcgtctccttatatattatacttgcctccaccttcattcaaataatgtttgattgtattctttttgtatactgcggttttgtatccgttgaggtaatttttcaagctgttgagcactaaaaatagcacgaacggtctggccctgaggccggacggtccgtggtcctgacggtccgcgcctgtgggccggacggtccgctcaagcgcagaacagattatggtttcgagtttcttactatgtttgttggcgagaatatcgagataagctcggaattttgttggtaacgggtacagcccccctcctctataaaagcagaggaatacatgcgatttaattaatcaatcgaaccttcaat

SEQ ID NO: 42423 - DNA, 5211 bp, Zea Mays
atgtcgatacatatttgcaagaacggttatatgccaggctatgaggtgtgggtgcaccatggttgggtcacccgcagatcaaggagtactggtgttggccttctgatggccgtgcgagggtccacatacatgatcaggcaatatataaaggagccaggattcaatgtagcgaatgagatggcatccatcaaccaggagataagacagattggtagaatgatggtcatatcaggcaatatattggagccgccggaatggattctgcaagcccaagacctggcctgtgatgtgcaggatttcacggatatctacacatggctgcaaagcaaatcgcggaggcgtgcccttgcacatataggctacatagcgcagctgaaggatcggatcagcagccttcgagagtggcaacagagaggaggcagcagcagcagcagcagccagcaggagcgtgctgctgccttgtccttctcgcggcgatcatgcgggccttgcgcccctgaggatgtgctagttggcattgatcagcccagaaaagaactttcggacctcattttcgaaagggaggatgttgtgcatatcgtgcaacagaagcccagggtggtctctgtcgttgggtatagtggcattggcaagacagccctggcaagagcagtctactacgaccgtagtgtccgttctgcctttgacgacgttgcttgggttgtggcatctgagtgcagccatgggtgcgaccttgtaagtaagatctgccagcaggtcaaggacgaacaagcagggaacggtgctgtcgtcgtccctgattgttataggttaaaagagattatgcgggataaaaggtttcttatcgttattgacgaccttcacggagctggcatgtggaacgatataaaaggtgtcttcagtgaaactcacagtggcagtcgaataatcgttaccacgagtattcagtcggtcgccgctgcctgcactcctgagccgcgatacatttacaggatgccaagtcttggtaatttggactctgaaaagctactgtggatgagggtcggcaggcatgcaagccgtacgcctgctctggagcatgctttaggcaacgacaccttgaaaaaatgcggcggtctacctctggcactgatcagtgttgccaatcatttgtgtcttgggaaagcattatttgaggagatggacagggttcttgccaaatgctatgacagcttgcctgacaatgctcacaggatgtgcttgctgtccctgagcacattccctcagggtcatgtgatgaagaggaagaggctaattagaagatggatagctgaaggattggctgtcgtcggagactgtgagctcagtgctgaacaagttgccggtaacatatttgatgtgttgattgacaggaacgttactgagcctgtgctgactgctggccacggttctcgtagtaaggtcaaggcatgcttagttcttggtgtgatcaaggacttcatcaacaaaacggcagtctcaaatgagactgtagctataatccagaacgatgagcttctccttcccaacaggatgctggtcgcccatcgccctgttcgtcgactgcttgttcatggaggcacaacaaagaaaagtgaagctgttgcaaaggcgatcggactggatcagggctgctggttgctgcgggtcttggacctggaggcttgccaggggatcgacaagagcatccttggcagcatatgcaagctggtgtttctcaagtacctgagccttaggggcaccgatgtttacggaatacccaagaaagtaaaaaagctccagtgtttggagacgctggacctcagggacacacgggttgaagaactgcccatccaagtcttgatgctcccacggttggcccatctgtttggcaagtttgagctacctccacagctcaagcatggtcatcgaaccgcaaggaggaggaggagtaggctgcaggcatttttctcccagagaagcaggctgcagactctttcaggattcgtcatggtggatgatagcaacagcttcgagcacatgatgataaccataaagtcactgaggaaggttaaggtatggtgcaagaattcaatctcctcccaccaagaacgccatctcgcttcttcccttcagcaacggctagtagcaggaaacagtaatcccctagaatctctgtcaattgattttggcaatgaatccatcaatttcctcaatgatgttggagctatcagtgcacttattggctctatgaagctacagggaaggctaacctcgctccctagcttcatgacttcgtacgatactacactctcccagctgcagctgtcctcaactggtttgggcatagaagccttgtccctgctgcagatcttacgtcggctggtttctctgaagctcgctcaggatggtgatggattttggggtgactgcttcgctgttaagaaggatggatttccaagccttttacgcctgtgcattcaggccagggagcttccccagttgcacatccatgaaggaggcatgagctctctcacctccctcgaactactctgtcccatgttcgctagtcgcggtcaatctgactctgactctgactctgactctgacaatctgtccccagttgcatttcggtacgcgtacgcggaaacctattcagagaagagatccaaacaagttctttcggtagagaagcccaaagcagttgatcccgggatcagcttcaaggaaccaagttctgagacaagatcagaaggaactgaaattcaggagattgattcccctaaaacgtccaaggaggctggtcccagcataggcttcaaggaaccaagttctgagacaagatcagaaggaactgaaattcaggagattgattcccctaaaacgtccaaggaggctggtcccagcataggcttcaaggatattattcttccggagaacacattcagaagaaacttttcgaagcaagtcaaaagtagatttgatctgaaacaacacttcaagggaatggagtacctccaatgtctcaatgagctggtactacatcgttctgttagcgacgaggtattggatgcctggacaaaacgagcaagcagtcacatcaataggccaaaggtgacaaggcaatgcacaagagcagcgctgtcgattggtagaggcccgggaacagcgaagcacgagaaagaagggcagcacagaagccagctcatgaaaaatagaggttcagaaacagcaatccatgaggaggtagcagagcaacacagctcagtagaaacgagccgtgaggaagcaggattattccaagaacagacctcagatacaagtcacaaagaagaagaagaagaagaaggagaaggagaagaagaagaagaagaagaagaagaagaagaagaagaagaatgtactagtgaagtaggagcgggtaaacacagctcagtaggaacgagccgtgaggaagcaggattattccaagaacagacctcaggtcacaaagaagaagaagaagaatatatgagtgaagactgggcattaagtcaaccatgcgacatgctcattggcaacaggatgaccgtacgatgtctaggatggccagattcttggcgactacgaagtggcatgatatcttcccccatgctgatctgcaggccattgggtccgtgacctcagatcattgtcccttacttatgcaaggtttatctacctttagtttctatagggggtttagatttgaagttttttggacaaaaattgatgggttcaatgaggtggttcagcaagcttggacatctagtgttcgttcttccgatgccattcttaggctgcatgtgaagatgatccgcacggctaaagctctattgatctggagacgaaagacagtaggcaattttaaagatcaattagcaatcattcagaccgtccttactcttcttgagaaagcacaggaatccaggcaactttccggggacgagctagagttcagaagaagtctaaaaatgaaaatccttgggctagtgacagtccaaaaggcaagagctagacaacattccagacttgtctggatgcgtctgagagatgcaaacacaaaaaaaattcatctgatggcaaataatagaagaaggaaaattttcatcagatcgctggttcgtgatgacaggttgctcaccagtcaggaagacaaactgcatgaggcccaccatcatttcactgaagctattggtagaaggggtgagagacagagggccgttcggtggggtaacctaggctatagtccatttgacttatcagatctggatttcttgttcaacgaggatgagattaaaaatgtggttatagggatgcactctgaaaaggcgccgggtcgagatggttttatagggatcttctataagagttgttttgagctgattaaggatgatctatcaagtgcaattcatgatttctatcaccatagatgcaaaaacctaaacctcgttaatgaggcaaatatcgcgcttttacaaaaaaagggagggtgctgacaggattgacatgtttaggccgatcagtctcatcaatagcttcataaaaatattgaccaagattttagcaaacagacttgcgccaagaatgaatgagattgtctccactgcccaaaacgcgttcattcaaaaacgttcaattcatgataattttctctatgtccaaaaagttattcagaaacttcataggaacaatcagccaaccctttttgtcaaacttgacatatcaaaagctttcgattccatcaactgggcatatctgttagaggtactgagagctctaggtttttcccagaaatggagaaattggatcgcaacaatattagggtcttcctcttcaaaaatcatcatcaacggtcaacaaacaaatgcaattaagcacatgcgtggcgttcgtcagggtgacccgctatcctcgttcctgtttattctagcaatggaccctctgcagaggatgattgagatggcggcagatgctgggcttctggggcgggttctgccaaataaggctaaactgcgttgttctctttatgcaaatgatgcaggtgtgtttgttagagcagataaagaggatctgaacgaattgaaaaggattctggaagtttttgaagggtgttcagggctgaagatcaatttcgataaaaccaaaattttcccgattcgttacccccaaactctttggccagatctgatggag
